(19) United States
(12) Patent Application Publication
(10) Pub. No.: US 2025/0074962 A1
(43) Pub. Date: Mar. 6, 2025

(54) MODIFIED POLYNUCLEOTIDES FOR THE PRODUCTION OF ONCOLOGY-RELATED PROTEINS AND PEPTIDES

(71) Applicant: ModernaTX, Inc., Cambridge, MA (US)

(72) Inventors: Antonin DE FOUGEROLLES, Waterloo (BE); Justin GUILD, Framingham, MA (US)

(21) Appl. No.: 18/592,122

(22) Filed: Feb. 29, 2024

Related U.S. Application Data
(63) Continuation of application No. 16/707,998, filed on Dec. 9, 2019, now abandoned.
Application No. 16/707,998 is a continuation of application No. 15/425,813, filed on Feb. 6, 2017, now Pat. No. 10,501,513.
Application No. 15/425,813 is a continuation of application No. 15/015,684, filed on Feb. 4, 2016, now Pat. No. 9,587,003.
Application No. 15/015,684 is a continuation of application No. 14/106,988, filed on Dec. 16, 2013, now Pat. No. 9,301,993.
Application No. 14/106,988 is a continuation of application No. PCT/US2013/030070, filed on Mar. 9, 2013.
(60) Provisional application No. 61/737,168, filed on Dec. 14, 2012.
(60) Provisional application No. 61/737,174, filed on Dec. 14, 2012.
(60) Provisional application No. 61/737,184, filed on Dec. 14, 2012.
(60) Provisional application No. 61/737,191, filed on Dec. 14, 2012.
(60) Provisional application No. 61/737,203, filed on Dec. 14, 2012.
(60) Provisional application No. 61/737,244, filed on Dec. 14, 2012.
(60) Provisional application No. 61/737,139, filed on Dec. 14, 2012.
(60) Provisional application No. 61/737,135, filed on Dec. 14, 2012.
(60) Provisional application No. 61/737,134, filed on Dec. 14, 2012.
(60) Provisional application No. 61/737,130, filed on Dec. 14, 2012.
(60) Provisional application No. 61/737,160, filed on Dec. 14, 2012.
(60) Provisional application No. 61/737,155, filed on Dec. 14, 2012.
(60) Provisional application No. 61/737,147, filed on Dec. 14, 2012.
(60) Provisional application No. 61/737,152, filed on Dec. 14, 2012.
(60) Provisional application No. 61/681,742, filed on Aug. 10, 2012.
(60) Provisional application No. 61/681,704, filed on Aug. 10, 2012.
(60) Provisional application No. 61/681,696, filed on Aug. 10, 2012.
(60) Provisional application No. 61/681,687, filed on Aug. 10, 2012.
(60) Provisional application No. 61/681,675, filed on Aug. 10, 2012.
(60) Provisional application No. 61/681,667, filed on Aug. 10, 2012.
(60) Provisional application No. 61/681,658, filed on Aug. 10, 2012.
(60) Provisional application No. 61/681,654, filed on Aug. 10, 2012.
(60) Provisional application No. 61/681,650, filed on Aug. 10, 2012.
(60) Provisional application No. 61/681,648, filed on Aug. 10, 2012.
(60) Provisional application No. 61/681,647, filed on Aug. 10, 2012.
(60) Provisional application No. 61/681,645, filed on Aug. 10, 2012.
(60) Provisional application No. 61/681,661, filed on Aug. 10, 2012.
(60) Provisional application No. 61/668,157, filed on Jul. 5, 2012.
(60) Provisional application No. 61/648,286, filed on May 17, 2012.
(60) Provisional application No. 61/618,935, filed on Apr. 2, 2012.
(60) Provisional application No. 61/618,922, filed on Apr. 2, 2012.
(60) Provisional application No. 61/618,911, filed on Apr. 2, 2012.
(60) Provisional application No. 61/618,896, filed on Apr. 2, 2012.
(60) Provisional application No. 61/618,885, filed on Apr. 2, 2012.
(60) Provisional application No. 61/618,878, filed on Apr. 2, 2012.
(60) Provisional application No. 61/618,873, filed on Apr. 2, 2012.
(60) Provisional application No. 61/618,870, filed on Apr. 2, 2012.
(60) Provisional application No. 61/618,868, filed on Apr. 2, 2012.
(60) Provisional application No. 61/618,866, filed on Apr. 2, 2012.
(60) Provisional application No. 61/618,862, filed on Apr. 2, 2012.
(60) Provisional application No. 61/618,945, filed on Apr. 2, 2012.
(60) Provisional application No. 61/618,953, filed on Apr. 2, 2012.
(60) Provisional application No. 61/618,961, filed on Apr. 2, 2012.

(30) Foreign Application Priority Data
Dec. 14, 2012 (WO) PCT/US2012/069610

(51) Int. Cl. C07K 14/535; A61K 9/00; A61K 9/127; A61K 9/14; A61K 9/50; A61K 31/7088; A61K 31/7115; A61K 38/17; A61K 38/18; A61K 38/19; A61K 38/21; A61K 38/36; A61K 38/44; A61K 38/48; A61K 39/395; A61K 47/10; A61K 47/60; A61K 48/00; C07K 14/47; C07K 14/475; C07K 14/505; C07K 14/525; C07K 14/56; C07K 14/565; C07K 14/745; C07K 14/75; C07K 16/28; C07K 16/32; C07K 19/00; C12N 9/02; C12N 9/64; C12N 15/85; C12N 15/88

(52) U.S. Cl. CPC C07K 14/535; A61K 9/0019; A61K 9/0043; A61K 9/1271; A61K 9/1272; A61K 9/1277; A61K 9/14; A61K 9/145; A61K 9/5031; A61K 31/7088; A61K 31/7115; A61K 38/1767; A61K 38/1816; A61K 38/1866; A61K 38/191; A61K 38/193; A61K 38/212; A61K 38/215; A61K 38/36; A61K 38/363; A61K 38/44; A61K 38/4833; A61K 38/4846; A61K 39/3955; A61K 47/10; A61K 47/60; A61K 48/0033; A61K 48/0066; A61K 48/0075; C07K 14/47; C07K 14/475; C07K 14/505; C07K 14/525; C07K 14/56; C07K 14/565; C07K 14/745; C07K 14/75; C07K 16/2887; C07K 16/32; C07K 19/00; C12N 9/0069; C12N 9/644; C12N 15/85; C12N 15/88; C12Y 113/12007; C12Y 304/21005; C12Y 304/21022; A61K 48/00; C12N 2840/00

(57) ABSTRACT

The invention relates to compositions including polynucleotides encoding polypeptides which have been chemically modified by replacing the uridines with 1-methyl-pseudouridine to improve one or more of the stability and/or clearance in tissues, receptor uptake and/or kinetics, cellular access by the compositions, engagement with translational machinery, mRNA half-life, translation efficiency, immune evasion, protein production capacity, secretion efficiency, accessibility to circulation, protein half-life and/or modulation of a cell's status, function, and/or activity.

### REFERENCE TO SEQUENCE LISTING

[0001] The instant application contains a Sequence Listing which has been submitted electronically in XML format and is hereby incorporated by reference in its entirety. Said XML copy, created on Feb. 28, 2024 is named “51165-0120011_Sequence_Listing_2_28_24” and is 92,721,152 bytes in size.

### FIELD OF THE INVENTION

[0002] The invention relates to compositions, methods, processes, kits and devices for the design, preparation, manufacture and/or formulation of oncology-ralted polynucleotides, primary constructs and modified mRNA molecules (mmRNA).

### BACKGROUND OF THE INVENTION

[0003] Cancer is a disease characterized by uncontrolled cell division and growth within the body. In the United States, roughly a third of all women and half of all men will experience cancer in their lifetime. Polypeptides are involved in every aspect of the disease including cancer cell biology (carcinogenesis, cell cycle suppression, DNA repair and angiogenesis), treatment (immunotherapy, hormone manipulation, enzymatic inhibition), diagnosis and determination of cancer type (molecular markers for breast, prostate, colon and cervical cancer for example). With the host of undesired consequences brought about by standard treatments such as chemotherapy and radiotherapy used today, genetic therapy for the manipulation of disease-related peptides provides a more targeted approach to disease diagnosis, treatment and management.

[0004] To this end, the inventors have shown that certain modified mRNA sequences have the potential as therapeutics with benefits beyond just evading, avoiding or diminishing the immune response. Such studies are detailed in published co-pending applications International Application PCT/US2011/046861 filed Aug. 5, 2011 and PCT/US2011/054636 filed Oct. 3, 2011, International Application number PCT/US2011/054617 filed Oct. 3, 2011, the contents of which are incorporated herein by reference in their entirety.

[0005] The present invention addresses this need by providing nucleic acid based compounds or polynucleotide-encoding nucleic acid-based compounds (e.g., modified mRNA or mmRNA) which encode an oncology-related polypeptide of interest and which have structural and/or chemical features that avoid one or more of the problems in the art.

### SUMMARY OF THE INVENTION

[0006] Described herein are compositions, methods, processes, kits and devices for the design, preparation, manufacture and/or formulation of modified mRNA (mmRNA) molecules encoding at least one oncology-related polypeptide of interest.

[0007] The present invention provides a method of treating a disease, disorder and/or condition in a subject in need thereof by increasing the level of an oncology-related polypeptide of interest comprising administering to said subject an isolated polynucleotide encoding said oncology-related polypeptide. The disease, disorder and/or condition may include, but is not limited to, adrenal cortical cancer, advanced cancer, anal cancer, aplastic anemia, bileduct cancer, bladder cancer, bone cancer, bone metastasis, brain tumors, brain cancer, breast cancer, childhood cancer, cancer of unknown primary origin, Castleman disease, cervical cancer, colon/rectal cancer, endometrial cancer, esophagus cancer, Ewing family of tumors, eye cancer, gallbladder cancer, gastrointestinal carcinoid tumors, gastrointestinal stromal tumors, gestational trophoblastic disease, Hodgkin disease, Kaposi sarcoma, renal cell carcinoma, laryngeal and hypopharyngeal cancer, acute lymphocytic leukemia, acute myeloid leukemia, chronic lymphocytic leukemia, chronic myeloid leukemia, chronic myelomonocytic leukemia, liver cancer, non-small cell lung cancer, small cell lung cancer, lung carcinoid tumor, lymphoma of the skin, malignant mesothelioma, multiple myeloma, myelodysplastic syndrome, nasal cavity and paranasal sinus cancer, nasopharyngeal cancer, neuroblastoma, non-Hodgkin lymphoma, oral cavity and oropharyngeal cancer, osteosarcoma, ovarian cancer, pancreatic cancer, penile cancer, pituitary tumors, prostate cancer, retinoblastoma, rhabdomyosarcoma, salivary gland cancer, sarcoma in adult soft tissue, basal and squamous cell skin cancer, melanoma, small intestine cancer, stomach cancer, testicular cancer, throat cancer, thymus cancer, thyroid cancer, uterine sarcoma, vaginal cancer, vulvar cancer, Waldenstrom macroglobulinemia, Wilms tumor and secondary cancers caused by cancer treatment.

[0008] The present invention provides a method of reducing, eliminating, or preventing tumor growth in a subject in need thereof by increasing the level of an oncology-related polypeptide of interest comprising administering to said subject an isolated polynucleotide encoding said oncology-related polypeptide. The tumor growth may be associated with or results from a disease, disorder and/or condition such as, but not limited to, adrenal cortical cancer, advanced cancer, anal cancer, aplastic anemia, bileduct cancer, bladder cancer, bone cancer, bone metastasis, brain tumors, brain cancer, breast cancer, childhood cancer, cancer of unknown primary origin, Castleman disease, cervical cancer, colon/rectal cancer, endometrial cancer, esophagus cancer, Ewing family of tumors, eye cancer, gallbladder cancer, gastrointestinal carcinoid tumors, gastrointestinal stromal tumors, gestational trophoblastic disease, Hodgkin disease, Kaposi sarcoma, renal cell carcinoma, laryngeal and hypopharyngeal cancer, acute lymphocytic leukemia, acute myeloid leukemia, chronic lymphocytic leukemia, chronic myeloid leukemia, chronic myelomonocytic leukemia, liver cancer, non-small cell lung cancer, small cell lung cancer, lung carcinoid tumor, lymphoma of the skin, malignant mesothelioma, multiple myeloma, myelodysplastic syndrome, nasal cavity and paranasal sinus cancer, nasopharyngeal cancer, neuroblastoma, non-Hodgkin lymphoma, oral cavity and oropharyngeal cancer, osteosarcoma, ovarian cancer, pancreatic cancer, penile cancer, pituitary tumors, prostate cancer, retinoblastoma, rhabdomyosarcoma, salivary gland cancer, sarcoma in adult soft tissue, basal and squamous cell skin cancer, melanoma, small intestine cancer, stomach cancer, testicular cancer, throat cancer, thymus cancer, thyroid cancer, uterine sarcoma, vaginal cancer, vulvar cancer, Waldenstrom macroglobulinemia, Wilms tumor and secondary cancers caused by cancer treatment.

[0009] The present invention provides a method of reducing and/or ameriorating at least on symptom of cancer in a subject in need thereof by increasing the level of an oncology-related polypeptide of interest comprising administering to said subject an isolated polynucleotide encoding said oncology-related polypeptide.

[0010] The present invention provides an isolated polynucleotide comprising a first region of linked nucleosides, said first region encoding the oncology-related polypeptide of interest, a first flanking region located at the 5′ terminus of said first region comprising a sequence of linked nucleosides selected from the group consisting of the native 5′ untranslated region (UTR) of any of SEQ ID NOs: 4704-9203, SEQ ID NOs: 1-4 and functional variants thereof and a second flanking region located at the 3′ terminus of said first region comprising a sequence of linked nucleosides selected from the group consisting of the native 3′ UTR of any of SEQ ID NOs: 4704-9203, SEQ ID NOs: 5-21 and functional variants thereof and a 3′ tailing sequence of linked nucleosides. The isolated polynucleotide may further be substantially purified.

[0011] Further, the first region of the isolated polynucleotides of the present may comprise two stop codons. In one embodiment, the first region further comprises a first stop codon “TGA” and a second stop codon selected from the group consisting of “TAA,” “TGA” and “TAG.”

[0012] The 3′ tailing sequence of the isolated polynucleotides of the present invention may further include linked nucleosides such as, but not limited to, a poly-A tail of approximately 130 nucleotides and a poly A-G quartet.

[0013] The first flanking region of the isolated polynucleotide may further comprise at least one 5′ terminal cap such as, but not limited to, Cap0, Cap1, ARCA, inosine, N1-methyl-guanosine, 2′fluoro-guanosine, 7-deaza-guanosine, 8-oxo-guanosine, 2-amino-guanosine, LNA-guanosine, and 2-azido-guanosine.

[0014] The nucleotides of the isolated polynucleotides of the present invention may comprise at least two modifications and a translatable region. The modification may be on at least one nucleoside and/or the backbone of said nucleotides, on both a nucleoside and a backbone linkage or on a sugar of the nucleoside. The modification may comprise replacing at least one phosphodiester linkage with a phosphorothioate linkage. The modification may include, but are not limited to, pyridin-4-one ribonucleoside, 5-aza-uridine, 2-thio-5-aza-uridine, 2-thiouridine, 4-thio-pseudouridine, 2-thio-pseudouridine, 5-hydroxyuridine, 3-methyluridine, 5-carboxymethyl-uridine, 1-carboxymethyl-pseudouridine, 5-propynyl-uridine, 1-propynyl-pseudouridine, 5-taurinomethyluridine, 1-taurinomethyl-pseudouridine, 5-taurinomethyl-2-thio-uridine, 1-taurinomethyl-4-thio-uridine, 5-methyl-uridine, 1-methyl-pseudouridine, 4-thio-1-methyl-pseudouridine, 2-thio-1-methyl-pseudouridine, 1-methyl-1-deaza-pseudouridine, 2-thio-1-methyl-1-deaza-pseudouridine, dihydrouridine, dihydropseudouridine, 2-thio-dihydrouridine, 2-thio-dihydropseudouridine, 2-methoxyuridine, 2-methoxy-4-thio-uridine, 4-methoxy-pseudouridine, 4-methoxy-2-thio-pseudouridine, 5-aza-cytidine, pseudoisocytidine, 3-methyl-cytidine, N4-acetylcytidine, 5-formylcytidine, N4-methylcytidine, 5-hydroxymethylcytidine, 1-methyl-pseudoisocytidine, pyrrolo-cytidine, pyrrolo-pseudoisocytidine, 2-thio-cytidine, 2-thio-5-methyl-cytidine, 4-thio-pseudoisocytidine, 4-thio-1-methyl-pseudoisocytidine, 4-thio-1-methyl-1-deaza-pseudoisocytidine, 1-methyl-1-deaza-pseudoisocytidine, zebularine, 5-aza-zebularine, 5-methyl-zebularine, 5-aza-2-thio-zebularine, 2-thio-zebularine, 2-methoxy-cytidine, 2-methoxy-5-methyl-cytidine, 4-methoxy-pseudoisocytidine, 4-methoxy-1-methyl-pseudoisocytidine, 2-aminopurine, 2, 6-diaminopurine, 7-deaza-adenine, 7-deaza-8-aza-adenine, 7-deaza-2-aminopurine, 7-deaza-8-aza-2-aminopurine, 7-deaza-2,6-diaminopurine, 7-deaza-8-aza-2,6-diaminopurine, 1-methyladenosine, N6-methyladenosine, N6-isopentenyladenosine, N6-(cis-hydroxyisopentenyl)adenosine, 2-methylthio-N6-(cis-hydroxyisopentenyl) adenosine, N6-glycinylcarbamoyladenosine, N6-threonylcarbamoyladenosine, 2-methylthio-N6-threonyl carbamoyladenosine, N6,N6-dimethyladenosine, 7-methyladenine, 2-methylthio-adenine, 2-methoxy-adenine, inosine, 1-methyl-inosine, wyosine, wybutosine, 7-deaza-guanosine, 7-deaza-8-aza-guanosine, 6-thio-guanosine, 6-thio-7-deaza-guanosine, 6-thio-7-deaza-8-aza-guanosine, 7-methyl-guanosine, 6-thio-7-methyl-guanosine, 7-methylinosine, 6-methoxy-guanosine, 1-methylguanosine, N2-methylguanosine, N2,N2-dimethylguanosine, 8-oxo-guanosine, 7-methyl-8-oxo-guanosine, 1-methyl-6-thio-guanosine, N2-methyl-6-thio-guanosine, and N2,N2-dimethyl-6-thio-guanosine. The backbone linkage may be modified by the replacement of one or more oxygen atoms. The nucleobase modified may be selected from, but is not limited to, cytosine, guanine, adenine, thymine and uracil.

[0015] The isolated polynucleotides of the present invention may be formulated. The formulation may comprise a lipid which may include, but is not limited to, DLin-DMA, DLin-K-DMA, DLin-KC2-DMA, 98N12-5, C12-200, DLin-MC3-DMA, PLGA, PEG, PEG-DMG, PEGylated lipids and mixtures thereof.

[0016] The isolated polynucleotides of the present invention may be administered at a total daily dose of between 0.001 ug and 150 ug. The administration may be by injection, topical administration, ophthalmic administration and intranasal administration. The injection may include injections such as, but not limited to, intradermal, subcutaneous and intramuscular. The topical administration may be, but is not limited to, a cream, lotion, ointment, gel, spray, solution and the like. The topical administration may further include a penetration enhancer such as, but not limited to, surfactants, fatty acids, bile salts, chelating agents, non-chelating non-surfactants, polyoxyethylene-9-lauryl ether, polyoxyethylene-20-cetyl ether, fatty acids and/or salts in combination with bile acids and/or salts, sodium salt in combination with lauric acid, capric acid and UDCA, and the like.

[0017] The isolated polynucleotide formulation may further include a pharmaceutically acceptable excipient such as, but not limited to, a solvent, aqueous solvent, non-aqueous solvent, dispersion media, diluent, dispersion, suspension aid, surface active agent, isotonic agent, thickening or emulsifying agent, preservative, lipid, lipidoids liposome, lipid nanoparticle, core-shell nanoparticles, polymer, lipoplex, peptide, protein, cell, hyaluronidase, and mixtures thereof.

[0018] The details of various embodiments of the invention are set forth in the description below. Other features, objects, and advantages of the invention will be apparent from the description and the drawings, and from the claims.

### BRIEF DESCRIPTION OF THE DRAWINGS

[0019] The foregoing and other objects, features and advantages will be apparent from the following description of particular embodiments of the invention, as illustrated in the accompanying drawings in which like reference characters refer to the same parts throughout the different views. The drawings are not necessarily to scale, emphasis instead being placed upon illustrating the principles of various embodiments of the invention.

[0020] FIG. 1 is a schematic of an oncology related-primary construct of the present invention.

[0021] FIG. 2 illustrates lipid structures in the prior art useful in the present invention. Shown are the structures for 98N12-5 (TETA5-LAP), DLin-DMA, DLin-K-DMA (2,2-Dilinoleyl-4-dimethylaminomethyl-[1,3]-dioxolane), DLin-KC2-DMA, DLin-MC3-DMA and C12-200.

[0022] FIG. 3 is a representative plasmid useful in the IVT reactions taught herein. The plasmid contains Insert 64818, designed by the instant inventors.

[0023] FIG. 4 is a gel profile of modified mRNA encapsulated in PLGA microspheres.

### DETAILED DESCRIPTION

[0024] It is of great interest in the fields of therapeutics, diagnostics, reagents and for biological assays to be able to deliver a nucleic acid, e.g., a ribonucleic acid (RNA) inside a cell, whether in vitro, in vivo, in situ or ex vivo, such as to cause intracellular translation of the nucleic acid and production of an encoded polypeptide of interest. Of particular importance is the delivery and function of a non-integrative polynucleotide.

[0025] Described herein are compositions (including pharmaceutical compositions) and methods for the design, preparation, manufacture and/or formulation of polynucleotides encoding one or more oncology-related polypeptides of interest. Also provided are systems, processes, devices and kits for the selection, design and/or utilization of the polynucleotides encoding the oncology-related polypeptides of interest described herein.

[0026] According to the present invention, these oncology-related polynucleotides are preferably modified as to avoid the deficiencies of other polypeptide-encoding molecules of the art. Hence these polynucleotides are referred to as modified mRNA or mmRNA.

[0027] The use of modified polynucleotides in the fields of antibodies, viruses, veterinary applications and a variety of in vivo settings has been explored by the inventors and these studies are disclosed in for example, co-pending and co-owned United States provisional patent application serial numbers 61/470,451 filed Mar. 31, 2011 teaching in vivo applications of mmRNA; 61/517,784 filed on Apr. 26, 2011 teaching engineered nucleic acids for the production of antibody polypeptides; 61/519,158 filed May 17, 2011 teaching veterinary applications of mmRNA technology; 61/533,537 filed on Sep. 12, 2011 teaching antimicrobial applications of mmRNA technology; 61/533,554 filed on Sep. 12, 2011 teaching viral applications of mmRNA technology, 61/542,533 filed on Oct. 3, 2011 teaching various chemical modifications for use in mmRNA technology; 61/570,690 filed on Dec. 14, 2011 teaching mobile devices for use in making or using mmRNA technology; 61/570,708 filed on Dec. 14, 2011 teaching the use of mmRNA in acute care situations; 61/576,651 filed on Dec. 16, 2011 teaching terminal modification architecture for mmRNA; 61/576,705 filed on Dec. 16, 2011 teaching delivery methods using lipidoids for mmRNA; 61/578,271 filed on Dec. 21, 2011 teaching methods to increase the viability of organs or tissues using mmRNA; 61/581,322 filed on Dec. 29, 2011 teaching mmRNA encoding cell penetrating peptides; 61/581,352 filed on Dec. 29, 2011 teaching the incorporation of cytotoxic nucleosides in mmRNA and 61/631,729 filed on Jan. 10, 2012 teaching methods of using mmRNA for crossing the blood brain barrier; all of which are herein incorporated by reference in their entirety.

[0028] Provided herein, in part, are oncology-related polynucleotides, oncology-related primary constructs and/or oncology-related mmRNA encoding oncology-related polypeptides of interest which have been designed to improve one or more of the stability and/or clearance in tissues, receptor uptake and/or kinetics, cellular access by the compositions, engagement with translational machinery, mRNA half-life, translation efficiency, immune evasion, protein production capacity, secretion efficiency (when applicable), accessibility to circulation, protein half-life and/or modulation of a cell's status, function and/or activity.

### I. Compositions of the Invention (mmRNA)

[0029] The present invention provides nucleic acid molecules, specifically oncology-related polynucleotides, oncology-related primary constructs and/or oncology-related mmRNA which encode one or more oncology-related polypeptides of interest. The term “nucleic acid,” in its broadest sense, includes any compound and/or substance that comprise a polymer of nucleotides. These polymers are often referred to as polynucleotides. Exemplary nucleic acids or polynucleotides of the invention include, but are not limited to, ribonucleic acids (RNAs), deoxyribonucleic acids (DNAs), threose nucleic acids (TNAs), glycol nucleic acids (GNAs), peptide nucleic acids (PNAs), locked nucleic acids (LNAs, including LNA having a β-D-ribo configuration, α-LNA having an α-L-ribo configuration (a diastereomer of LNA), 2′-amino-LNA having a 2′-amino functionalization, and 2′-amino-α-LNA having a 2′-amino functionalization) or hybrids thereof.

[0030] In preferred embodiments, the nucleic acid molecule is a messenger RNA (mRNA). As used herein, the term “messenger RNA” (mRNA) refers to any oncology-related polynucleotide which encodes an oncology-related polypeptide of interest and which is capable of being translated to produce the encoded oncology-related polypeptide of interest in vitro, in vivo, in situ or ex vivo.

[0031] Traditionally, the basic components of an mRNA molecule include at least a coding region, a 5′UTR, a 3′UTR, a 5′ cap and a poly-A tail. Building on this wild type modular structure, the present invention expands the scope of functionality of traditional mRNA molecules by providing oncology-related polynucleotides or oncology-related primary RNA constructs which maintain a modular organization, but which comprise one or more structural and/or chemical modifications or alterations which impart useful properties to the polynucleotide including, in some embodiments, the lack of a substantial induction of the innate immune response of a cell into which the oncology-related polynucleotide is introduced. As such, modified mRNA molecules of the present invention are termed “mmRNA.” As used herein, a “structural” feature or modification is one in which two or more linked nucleotides are inserted, deleted, duplicated, inverted or randomized in an oncology-related polynucleotide, oncology-related primary construct or oncology-related mmRNA without significant chemical modification to the nucleotides themselves. Because chemical bonds will necessarily be broken and reformed to effect a structural modification, structural modifications are of a chemical nature and hence are chemical modifications. However, structural modifications will result in a different sequence of nucleotides. For example, the polynucleotide “ATCG” may be chemically modified to “AT-5meC-G”. The same polynucleotide may be structurally modified from “ATCG” to “ATCCCG”. Here, the dinucleotide “CC” has been inserted, resulting in a structural modification to the oncology-related polynucleotide.

mmRNA Architecture

[0032] The mmRNA of the present invention are distinguished from wild type mRNA in their functional and/or structural design features which serve to, as evidenced herein, overcome existing problems of effective polypeptide production using nucleic acid-based therapeutics.

[0033] FIG. 1 shows a representative polynucleotide primary construct 100 of the present invention. As used herein, the term “primary construct” or “primary mRNA construct” refers to an oncology-related polynucleotide transcript which encodes one or more oncology-related polypeptides of interest and which retains sufficient structural and/or chemical features to allow the oncology-related polypeptide of interest encoded therein to be translated. Oncology-related primary constructs may be oncology-related polynucleotides of the invention. When structurally or chemically modified, the oncology-related primary construct may be referred to as an oncology-related mmRNA.

[0034] Returning to FIG. 1, the oncology-related primary construct 100 here contains a first region of linked nucleotides 102 that is flanked by a first flanking region 104 and a second flaking region 106. As used herein, the “first region” may be referred to as a “coding region” or “region encoding” or simply the “first region.” This first region may include, but is not limited to, the encoded oncology-related polypeptide of interest. The oncology-related polypeptide of interest may comprise at its 5′ terminus one or more signal sequences encoded by a signal sequence region 103. The flanking region 104 may comprise a region of linked nucleotides comprising one or more complete or incomplete 5′ UTRs sequences. The flanking region 104 may also comprise a 5′ terminal cap 108. The second flanking region 106 may comprise a region of linked nucleotides comprising one or more complete or incomplete 3′ UTRs. The flanking region 106 may also comprise a 3′ tailing sequence 110.

[0035] Bridging the 5′ terminus of the first region 102 and the first flanking region 104 is a first operational region 105. Traditionally this operational region comprises a start codon. The operational region may alternatively comprise any translation initiation sequence or signal including a start codon.

[0036] Bridging the 3′ terminus of the first region 102 and the second flanking region 106 is a second operational region 107. Traditionally this operational region comprises a stop codon. The operational region may alternatively comprise any translation initiation sequence or signal including a stop codon. According to the present invention, multiple serial stop codons may also be used. In one embodiment, the operation region of the present invention may comprise two stop codons. The first stop codon may be “TGA” and the second stop codon may be selected from the group consisting of “TAA,” “TGA” and “TAG.”

[0037] Generally, the shortest length of the first region of the oncology-related primary construct of the present invention can be the length of a nucleic acid sequence that is sufficient to encode for a dipeptide, a tripeptide, a tetrapeptide, a pentapeptide, a hexapeptide, a heptapeptide, an octapeptide, a nonapeptide, or a decapeptide. In another embodiment, the length may be sufficient to encode a peptide of 2-30 amino acids, e.g. 5-30, 10-30, 2-25, 5-25, 10-25, or 10-20 amino acids. The length may be sufficient to encode for a peptide of at least 11, 12, 13, 14, 15, 17, 20, 25 or 30 amino acids, or a peptide that is no longer than 40 amino acids, e.g. no longer than 35, 30, 25, 20, 17, 15, 14, 13, 12, 11 or 10 amino acids. Examples of dipeptides that the polynucleotide sequences can encode or include, but are not limited to, carnosine and anserine.

[0038] Generally, the length of the first region encoding the oncology-related polypeptide of interest of the present invention is greater than about 30 nucleotides in length (e.g., at least or greater than about 35, 40, 45, 50, 55, 60, 70, 80, 90, 100, 120, 140, 160, 180, 200, 250, 300, 350, 400, 450, 500, 600, 700, 800, 900, 1,000, 1,100, 1,200, 1,300, 1,400, 1,500, 1,600, 1,700, 1,800, 1,900, 2,000, 2,500, and 3,000, 4,000, 5,000, 6,000, 7,000, 8,000, 9,000, 10,000, 20,000, 30,000, 40,000, 50,000, 60,000, 70,000, 80,000, 90,000 or up to and including 100,000 nucleotides). As used herein, the “first region” may be referred to as a “coding region” or “region encoding” or simply the “first region.”

[0039] In some embodiments, the oncology-related polynucleotide, oncology-related primary construct, or oncology-related mmRNA includes from about 30 to about 100,000 nucleotides (e.g., from 30 to 50, from 30 to 100, from 30 to 250, from 30 to 500, from 30 to 1,000, from 30 to 1,500, from 30 to 3,000, from 30 to 5,000, from 30 to 7,000, from 30 to 10,000, from 30 to 25,000, from 30 to 50,000, from 30 to 70,000, from 100 to 250, from 100 to 500, from 100 to 1,000, from 100 to 1,500, from 100 to 3,000, from 100 to 5,000, from 100 to 7,000, from 100 to 10,000, from 100 to 25,000, from 100 to 50,000, from 100 to 70,000, from 100 to 100,000, from 500 to 1,000, from 500 to 1,500, from 500 to 2,000, from 500 to 3,000, from 500 to 5,000, from 500 to 7,000, from 500 to 10,000, from 500 to 25,000, from 500 to 50,000, from 500 to 70,000, from 500 to 100,000, from 1,000 to 1,500, from 1,000 to 2,000, from 1,000 to 3,000, from 1,000 to 5,000, from 1,000 to 7,000, from 1,000 to 10,000, from 1,000 to 25,000, from 1,000 to 50,000, from 1,000 to 70,000, from 1,000 to 100,000, from 1,500 to 3,000, from 1,500 to 5,000, from 1,500 to 7,000, from 1,500 to 10,000, from 1,500 to 25,000, from 1,500 to 50,000, from 1,500 to 70,000, from 1,500 to 100,000, from 2,000 to 3,000, from 2,000 to 5,000, from 2,000 to 7,000, from 2,000 to 10,000, from 2,000 to 25,000, from 2,000 to 50,000, from 2,000 to 70,000, and from 2,000 to 100,000).

[0040] According to the present invention, the first and second flanking regions may range independently from 15-1,000 nucleotides in length (e.g., greater than 30, 40, 45, 50, 55, 60, 70, 80, 90, 100, 120, 140, 160, 180, 200, 250, 300, 350, 400, 450, 500, 600, 700, 800, and 900 nucleotides or at least 30, 40, 45, 50, 55, 60, 70, 80, 90, 100, 120, 140, 160, 180, 200, 250, 300, 350, 400, 450, 500, 600, 700, 800, 900, and 1,000 nucleotides).

[0041] According to the present invention, the tailing sequence may range from absent to 500 nucleotides in length (e.g., at least 60, 70, 80, 90, 120, 140, 160, 180, 200, 250, 300, 350, 400, 450, or 500 nucleotides). Where the tailing region is a polyA tail, the length may be determined in units of or as a function of polyA binding protein binding. In this embodiment, the polyA tail is long enough to bind at least 4 monomers of polyA binding protein. PolyA binding protein monomers bind to stretches of approximately 38 nucleotides. As such, it has been observed that polyA tails of about 80 nucleotides and 160 nucleotides are functional.

[0042] According to the present invention, the capping region may comprise a single cap or a series of nucleotides forming the cap. In this embodiment the capping region may be from 1 to 10, e.g. 2-9, 3-8, 4-7, 1-5, 5-10, or at least 2, or 10 or fewer nucleotides in length. In some embodiments, the cap is absent.

[0043] According to the present invention, the first and second operational regions may range from 3 to 40, e.g., 5-30, 10-20, 15, or at least 4, or 30 or fewer nucleotides in length and may comprise, in addition to a start and/or stop codon, one or more signal and/or restriction sequences.

Cyclic mmRNA

[0044] According to the present invention, an oncology-related primary construct or oncology-related mmRNA may be cyclized, or concatemerized, to generate a translation competent molecule to assist interactions between poly-A binding proteins and 5′-end binding proteins. The mechanism of cyclization or concatemerization may occur through at least 3 different routes: 1) chemical, 2) enzymatic, and 3) ribozyme catalyzed. The newly formed 5′-/3′-linkage may be intramolecular or intermolecular.

[0045] In the first route, the 5′-end and the 3′-end of the nucleic acid may contain chemically reactive groups that, when close together, form a new covalent linkage between the 5′-end and the 3′-end of the molecule. The 5′-end may contain an NHS-ester reactive group and the 3′-end may contain a 3′-amino-terminated nucleotide such that in an organic solvent the 3′-amino-terminated nucleotide on the 3′-end of a synthetic mRNA molecule will undergo a nucleophilic attack on the 5′-NHS-ester moiety forming a new 5′-/3′-amide bond.

[0046] In the second route, T4 RNA ligase may be used to enzymatically link a 5′-phosphorylated nucleic acid molecule to the 3′-hydroxyl group of a nucleic acid forming a new phosphorodiester linkage. In an example reaction, 1 μg of a nucleic acid molecule is incubated at 37° C. for 1 hour with 1-10 units of T4 RNA ligase (New England Biolabs, Ipswich, MA) according to the manufacturer's protocol. The ligation reaction may occur in the presence of a split oligonucleotide capable of base-pairing with both the 5′- and 3′-region in juxtaposition to assist the enzymatic ligation reaction.

[0047] In the third route, either the 5′- or 3′-end of the cDNA template encodes a ligase ribozyme sequence such that during in vitro transcription, the resultant nucleic acid molecule can contain an active ribozyme sequence capable of ligating the 5′-end of a nucleic acid molecule to the 3′-end of a nucleic acid molecule. The ligase ribozyme may be derived from the Group I Intron, Group I Intron, Hepatitis Delta Virus, Hairpin ribozyme or may be selected by SELEX (systematic evolution of ligands by exponential enrichment). The ribozyme ligase reaction may take 1 to 24 hours at temperatures between 0 and 37° C.

mmRNA Multimers

[0048] According to the present invention, multiple distinct oncology-related polynucleotides, oncology-related primary constructs or oncology-related mmRNA may be linked together through the 3′-end using nucleotides which are modified at the 3′-terminus. Chemical conjugation may be used to control the stoichiometry of delivery into cells. For example, the glyoxylate cycle enzymes, isocitrate lyase and malate synthase, may be supplied into HepG2 cells at a 1:1 ratio to alter cellular fatty acid metabolism. This ratio may be controlled by chemically linking oncology-related polynucleotides, oncology-related primary constructs or oncology-related mmRNA using a 3′-azido terminated nucleotide on one oncology-related polynucleotide, oncology-related primary construct or oncology-related mmRNA species and a C5-ethynyl or alkynyl-containing nucleotide on the opposite oncology-related polynucleotide, oncology-related primary construct or oncology-related mmRNA species. The modified nucleotide is added post-transcriptionally using terminal transferase (New England Biolabs, Ipswich, MA) according to the manufacturer's protocol. After the addition of the 3′-modified nucleotide, the two oncology-related polynucleotide, oncology-related primary construct or oncology-related mmRNA species may be combined in an aqueous solution, in the presence or absence of copper, to form a new covalent linkage via a click chemistry mechanism as described in the literature.

[0049] In another example, more than two oncology-related polynucleotides may be linked together using a functionalized linker molecule. For example, a functionalized saccharide molecule may be chemically modified to contain multiple chemical reactive groups (SH—, NH₂—, N₃, etc . . . ) to react with the cognate moiety on a 3′-functionalized oncology-related mRNA molecule (i.e., a 3′-maleimide ester, 3′-NHS-ester, alkynyl). The number of reactive groups on the modified saccharide can be controlled in a stoichiometric fashion to directly control the stoichiometric ratio of conjugated oncology-related polynucleotide, oncology-related primary construct or oncology-related mmRNA.

mmRNA Conjugates and Combinations

[0050] In order to further enhance oncology-related protein production, oncology-related primary constructs or oncology-related mmRNA of the present invention can be designed to be conjugated to other polynucleotides, oncology-related polypeptides, dyes, intercalating agents (e.g. acridines), cross-linkers (e.g. psoralene, mitomycin C), porphyrins (TPPC4, texaphyrin, Sapphyrin), polycyclic aromatic hydrocarbons (e.g., phenazine, dihydrophenazine), artificial endonucleases (e.g. EDTA), alkylating agents, phosphate, amino, mercapto, PEG (e.g., PEG-40K), MPEG, [MPEG]₂, polyamino, alkyl, substituted alkyl, radiolabeled markers, enzymes, haptens (e.g. biotin), transport/absorption facilitators (e.g., aspirin, vitamin E, folic acid), synthetic ribonucleases, proteins, e.g., glycoproteins, or peptides, e.g., molecules having a specific affinity for a co-ligand, or antibodies e.g., an antibody, that binds to a specified cell type such as a cancer cell, endothelial cell, or bone cell, hormones and hormone receptors, non-peptidic species, such as lipids, lectins, carbohydrates, vitamins, cofactors, or a drug.

[0051] Conjugation may result in increased stability and/or half life and may be particularly useful in targeting the oncology-related polynucleotides, oncology-related primary constructs or oncology-related mmRNA to specific sites in the cell, tissue or organism.

[0052] According to the present invention, the oncology-related mmRNA or oncology-related primary constructs may be administered with, or further encode one or more of RNAi agents, siRNAs, shRNAs, miRNAs, miRNA binding sites, antisense RNAs, ribozymes, catalytic DNA, tRNA, RNAs that induce triple helix formation, aptamers or vectors, and the like.

Bifunctional mmRNA

[0053] In one embodiment of the invention are bifunctional oncology-related polynucleotides (e.g., bifunctional oncology-related primary constructs or oncology-related bifunctional mmRNA). As the name implies, bifunctional oncology-related polynucleotides are those having or capable of at least two functions. These molecules may also by convention be referred to as multi-functional.

[0054] The multiple functionalities of bifunctional oncology-related polynucleotides may be encoded by the RNA (the function may not manifest until the encoded product is translated) or may be a property of the polynucleotide itself. It may be structural or chemical. Bifunctional modified oncology-related polynucleotides may comprise a function that is covalently or electrostatically associated with the polynucleotides. Further, the two functions may be provided in the context of a complex of a mmRNA and another molecule.

[0055] Bifunctional oncology-related polynucleotides may encode oncology-related peptides which are anti-proliferative. These peptides may be linear, cyclic, constrained or random coil. They may function as aptamers, signaling molecules, ligands or mimics or mimetics thereof. Anti-proliferative peptides may, as translated, be from 3 to 50 amino acids in length. They may be 5-40, 10-30, or approximately 15 amino acids long. They may be single chain, multichain or branched and may form complexes, aggregates or any multi-unit structure once translated.

### Noncoding Oncology-Related Polynucleotides and Primary Constructs

[0056] As described herein, provided are oncology-related polynucleotides and oncology-related primary constructs having sequences that are partially or substantially not translatable, e.g., having a noncoding region. Such noncoding region may be the “first region” of the oncology-related primary construct. Alternatively, the noncoding region may be a region other than the first region. Such molecules are generally not translated, but can exert an effect on protein production by one or more of binding to and sequestering one or more translational machinery components such as a ribosomal protein or a transfer RNA (tRNA), thereby effectively reducing protein expression in the cell or modulating one or more pathways or cascades in a cell which in turn alters protein levels. The oncology-related polynucleotide and/or oncology-related primary construct may contain or encode one or more long noncoding RNA (lncRNA, or lincRNA) or portion thereof, a small nucleolar RNA (sno-RNA), micro RNA (miRNA), small interfering RNA (siRNA) or Piwi-interacting RNA (piRNA).

### Oncology-Related Polypeptides of Interest

[0057] According to the present invention, the oncology-related primary construct is designed to encode one or more oncology-related polypeptides of interest or fragments thereof Δn oncology-related polypeptide of interest may include, but is not limited to, whole polypeptides, a plurality of polypeptides or fragments of polypeptides, which independently may be encoded by one or more nucleic acids, a plurality of nucleic acids, fragments of nucleic acids or variants of any of the aforementioned. As used herein, the term “oncology-related polypeptides of interest” refers to any polypeptide which is selected to be encoded in the oncology-related primary construct of the present invention. As used herein, “polypeptide” means a polymer of amino acid residues (natural or unnatural) linked together most often by peptide bonds. The term, as used herein, refers to proteins, polypeptides, and peptides of any size, structure, or function. In some instances the polypeptide encoded is smaller than about 50 amino acids and the polypeptide is then termed a peptide. If the polypeptide is a peptide, it will be at least about 2, 3, 4, or at least 5 amino acid residues long. Thus, polypeptides include gene products, naturally occurring polypeptides, synthetic polypeptides, homologs, orthologs, paralogs, fragments and other equivalents, variants, and analogs of the foregoing. A polypeptide may be a single molecule or may be a multi-molecular complex such as a dimer, trimer or tetramer. They may also comprise single chain or multichain polypeptides such as antibodies or insulin and may be associated or linked. Most commonly disulfide linkages are found in multichain polypeptides. The term polypeptide may also apply to amino acid polymers in which one or more amino acid residues are an artificial chemical analogue of a corresponding naturally occurring amino acid.

[0058] The term “polypeptide variant” refers to molecules which differ in their amino acid sequence from a native or reference sequence. The amino acid sequence variants may possess substitutions, deletions, and/or insertions at certain positions within the amino acid sequence, as compared to a native or reference sequence. Ordinarily, variants will possess at least about 50% identity (homology) to a native or reference sequence, and preferably, they will be at least about 80%, more preferably at least about 90% identical (homologous) to a native or reference sequence.

[0059] In some embodiments “variant mimics” are provided. As used herein, the term “variant mimic” is one which contains one or more amino acids which would mimic an activated sequence. For example, glutamate may serve as a mimic for phosphoro-threonine and/or phosphoro-serine. Alternatively, variant mimics may result in deactivation or in an inactivated product containing the mimic, e.g., phenylalanine may act as an inactivating substitution for tyrosine; or alanine may act as an inactivating substitution for serine.

[0060] “Homology” as it applies to amino acid sequences is defined as the percentage of residues in the candidate amino acid sequence that are identical with the residues in the amino acid sequence of a second sequence after aligning the sequences and introducing gaps, if necessary, to achieve the maximum percent homology. Methods and computer programs for the alignment are well known in the art. It is understood that homology depends on a calculation of percent identity but may differ in value due to gaps and penalties introduced in the calculation.

[0061] By “homologs” as it applies to polypeptide sequences means the corresponding sequence of other species having substantial identity to a second sequence of a second species.

[0062] “Analogs” is meant to include polypeptide variants which differ by one or more amino acid alterations, e.g., substitutions, additions or deletions of amino acid residues that still maintain one or more of the properties of the parent or starting polypeptide.

[0063] The present invention contemplates several types of compositions which are polypeptide based including variants and derivatives. These include substitutional, insertional, deletion and covalent variants and derivatives. The term “derivative” is used synonymously with the term “variant” but generally refers to a molecule that has been modified and/or changed in any way relative to a reference molecule or starting molecule.

[0064] As such, mmRNA encoding oncology-related polypeptides containing substitutions, insertions and/or additions, deletions and covalent modifications with respect to reference sequences, in particular the oncology-related polypeptide sequences disclosed herein, are included within the scope of this invention. For example, sequence tags or amino acids, such as one or more lysines, can be added to the peptide sequences of the invention (e.g., at the N-terminal or C-terminal ends). Sequence tags can be used for peptide purification or localization. Lysines can be used to increase peptide solubility or to allow for biotinylation. Alternatively, amino acid residues located at the carboxy and amino terminal regions of the amino acid sequence of a peptide or protein may optionally be deleted providing for truncated sequences. Certain amino acids (e.g., C-terminal or N-terminal residues) may alternatively be deleted depending on the use of the sequence, as for example, expression of the sequence as part of a larger sequence which is soluble, or linked to a solid support.

[0065] “Substitutional variants” when referring to polypeptides are those that have at least one amino acid residue in a native or starting sequence removed and a different amino acid inserted in its place at the same position. The substitutions may be single, where only one amino acid in the molecule has been substituted, or they may be multiple, where two or more amino acids have been substituted in the same molecule.

[0066] As used herein the term “conservative amino acid substitution” refers to the substitution of an amino acid that is normally present in the sequence with a different amino acid of similar size, charge, or polarity. Examples of conservative substitutions include the substitution of a non-polar (hydrophobic) residue such as isoleucine, valine and leucine for another non-polar residue. Likewise, examples of conservative substitutions include the substitution of one polar (hydrophilic) residue for another such as between arginine and lysine, between glutamine and asparagine, and between glycine and serine. Additionally, the substitution of a basic residue such as lysine, arginine or histidine for another, or the substitution of one acidic residue such as aspartic acid or glutamic acid for another acidic residue are additional examples of conservative substitutions. Examples of non-conservative substitutions include the substitution of a non-polar (hydrophobic) amino acid residue such as isoleucine, valine, leucine, alanine, methionine for a polar (hydrophilic) residue such as cysteine, glutamine, glutamic acid or lysine and/or a polar residue for a non-polar residue.

[0067] “Insertional variants” when referring to polypeptides are those with one or more amino acids inserted immediately adjacent to an amino acid at a particular position in a native or starting sequence. “Immediately adjacent” to an amino acid means connected to either the alpha-carboxy or alpha-amino functional group of the amino acid.

[0068] “Deletional variants” when referring to polypeptides are those with one or more amino acids in the native or starting amino acid sequence removed. Ordinarily, deletional variants will have one or more amino acids deleted in a particular region of the molecule.

[0069] “Covalent derivatives” when referring to polypeptides include modifications of a native or starting protein with an organic proteinaceous or non-proteinaceous derivatizing agent, and/or post-translational modifications. Covalent modifications are traditionally introduced by reacting targeted amino acid residues of the protein with an organic derivatizing agent that is capable of reacting with selected side-chains or terminal residues, or by harnessing mechanisms of post-translational modifications that function in selected recombinant host cells. The resultant covalent derivatives are useful in programs directed at identifying residues important for biological activity, for immunoassays, or for the preparation of anti-protein antibodies for immunoaffinity purification of the recombinant glycoprotein. Such modifications are within the ordinary skill in the art and are performed without undue experimentation.

[0070] Certain post-translational modifications are the result of the action of recombinant host cells on the expressed oncology-related polypeptide. Glutaminyl and asparaginyl residues are frequently post-translationally deamidated to the corresponding glutamyl and aspartyl residues. Alternatively, these residues are deamidated under mildly acidic conditions. Either form of these residues may be present in the oncology-related polypeptides produced in accordance with the present invention.

[0071] Other post-translational modifications include hydroxylation of proline and lysine, phosphorylation of hydroxyl groups of seryl or threonyl residues, methylation of the alpha-amino groups of lysine, arginine, and histidine side chains (T. E. Creighton, Proteins: Structure and Molecular Properties, W.H. Freeman & Co., San Francisco, pp. 79-86 (1983)).

[0072] “Features” when referring to polypeptides are defined as distinct amino acid sequence-based components of a molecule. Features of the polypeptides encoded by the mmRNA of the present invention include surface manifestations, local conformational shape, folds, loops, half-loops, domains, half-domains, sites, termini or any combination thereof.

[0073] As used herein when referring to polypeptides the term “surface manifestation” refers to a polypeptide based component of a protein appearing on an outermost surface.

[0074] As used herein when referring to polypeptides the term “local conformational shape” means a polypeptide based structural manifestation of a protein which is located within a definable space of the protein.

[0075] As used herein when referring to polypeptides the term “fold” refers to the resultant conformation of an amino acid sequence upon energy minimization. A fold may occur at the secondary or tertiary level of the folding process. Examples of secondary level folds include beta sheets and alpha helices. Examples of tertiary folds include domains and regions formed due to aggregation or separation of energetic forces. Regions formed in this way include hydrophobic and hydrophilic pockets, and the like.

[0076] As used herein the term “turn” as it relates to protein conformation means a bend which alters the direction of the backbone of a peptide or polypeptide and may involve one, two, three or more amino acid residues.

[0077] As used herein when referring to polypeptides the term “loop” refers to a structural feature of a polypeptide which may serve to reverse the direction of the backbone of a peptide or polypeptide. Where the loop is found in a polypeptide and only alters the direction of the backbone, it may comprise four or more amino acid residues. Oliva et al. have identified at least 5 classes of protein loops (J. Mol Biol 266 (4): 814-830; 1997). Loops may be open or closed. Closed loops or “cyclic” loops may comprise 2, 3, 4, 5, 6, 7, 8, 9, 10 or more amino acids between the bridging moieties. Such bridging moieties may comprise a cysteine-cysteine bridge (Cys-Cys) typical in polypeptides having disulfide bridges or alternatively bridging moieties may be non-protein based such as the dibromozylyl agents used herein.

[0078] As used herein when referring to polypeptides the term “half-loop” refers to a portion of an identified loop having at least half the number of amino acid resides as the loop from which it is derived. It is understood that loops may not always contain an even number of amino acid residues. Therefore, in those cases where a loop contains or is identified to comprise an odd number of amino acids, a half-loop of the odd-numbered loop will comprise the whole number portion or next whole number portion of the loop (number of amino acids of the loop/2+/−0.5 amino acids). For example, a loop identified as a 7 amino acid loop could produce half-loops of 3 amino acids or 4 amino acids (7/2=3.5+/−0.5 being 3 or 4).

[0079] As used herein when referring to polypeptides the term “domain” refers to a motif of a polypeptide having one or more identifiable structural or functional characteristics or properties (e.g., binding capacity, serving as a site for protein-protein interactions).

[0080] As used herein when referring to polypeptides the term “half-domain” means a portion of an identified domain having at least half the number of amino acid resides as the domain from which it is derived. It is understood that domains may not always contain an even number of amino acid residues. Therefore, in those cases where a domain contains or is identified to comprise an odd number of amino acids, a half-domain of the odd-numbered domain will comprise the whole number portion or next whole number portion of the domain (number of amino acids of the domain/2+/−0.5 amino acids). For example, a domain identified as a 7 amino acid domain could produce half-domains of 3 amino acids or 4 amino acids (7/2=3.5+/−0.5 being 3 or 4). It is also understood that sub-domains may be identified within domains or half-domains, these subdomains possessing less than all of the structural or functional properties identified in the domains or half domains from which they were derived. It is also understood that the amino acids that comprise any of the domain types herein need not be contiguous along the backbone of the polypeptide (i.e., nonadjacent amino acids may fold structurally to produce a domain, half-domain or subdomain).

[0081] As used herein when referring to polypeptides the terms “site” as it pertains to amino acid based embodiments is used synonymously with “amino acid residue” and “amino acid side chain.” A site represents a position within a peptide or polypeptide that may be modified, manipulated, altered, derivatized or varied within the polypeptide based molecules of the present invention.

[0082] As used herein the terms “termini” or “terminus” when referring to polypeptides refers to an extremity of a peptide or polypeptide. Such extremity is not limited only to the first or final site of the peptide or polypeptide but may include additional amino acids in the terminal regions. The polypeptide based molecules of the present invention may be characterized as having both an N-terminus (terminated by an amino acid with a free amino group (NH2)) and a C-terminus (terminated by an amino acid with a free carboxyl group (COOH)). Proteins of the invention are in some cases made up of multiple polypeptide chains brought together by disulfide bonds or by non-covalent forces (multimers, oligomers). These sorts of proteins will have multiple N- and C-termini. Alternatively, the termini of the polypeptides may be modified such that they begin or end, as the case may be, with a non-polypeptide based moiety such as an organic conjugate.

[0083] Once any of the features have been identified or defined as a desired component of a polypeptide to be encoded by the oncology-related primary construct or oncology-related mmRNA of the invention, any of several manipulations and/or modifications of these features may be performed by moving, swapping, inverting, deleting, randomizing or duplicating. Furthermore, it is understood that manipulation of features may result in the same outcome as a modification to the molecules of the invention. For example, a manipulation which involved deleting a domain would result in the alteration of the length of a molecule just as modification of a nucleic acid to encode less than a full length molecule would.

[0084] Modifications and manipulations can be accomplished by methods known in the art such as, but not limited to, site directed mutagenesis. The resulting modified molecules may then be tested for activity using in vitro or in vivo assays such as those described herein or any other suitable screening assay known in the art.

[0085] According to the present invention, the oncology-related polypeptides may comprise a consensus sequence which is discovered through rounds of experimentation. As used herein a “consensus” sequence is a single sequence which represents a collective population of sequences allowing for variability at one or more sites.

[0086] As recognized by those skilled in the art, protein fragments, functional protein domains, and homologous proteins are also considered to be within the scope of oncology-related polypeptides of interest of this invention. For example, provided herein is any protein fragment (meaning an oncology-related polypeptide sequence at least one amino acid residue shorter than a reference oncology-related polypeptide sequence but otherwise identical) of a reference oncology-related protein 10, 20, 30, 40, 50, 60, 70, 80, 90, 100 or greater than 100 amino acids in length. In another example, any oncology-related protein that includes a stretch of about 20, about 30, about 40, about 50, or about 100 amino acids which are about 40%, about 50%, about 60%, about 70%, about 80%, about 90%, about 95%, or about 100% identical to any of the sequences described herein can be utilized in accordance with the invention. In certain embodiments, a polypeptide to be utilized in accordance with the invention includes 2, 3, 4, 5, 6, 7, 8, 9, 10, or more mutations as shown in any of the sequences provided or referenced herein.

### Encoded Oncology-Related Polypeptides

[0087] The oncology-related primary constructs or oncology-related mmRNA of the present invention may be designed to encode oncology-related polypeptides of interest such as oncology-related peptides and proteins.

[0088] In one embodiment oncology-related primary constructs or oncology-related mmRNA of the present invention may encode variant polypeptides which have a certain identity with a reference oncology-related polypeptide sequence. As used herein, a “reference oncology-related polypeptide sequence” refers to a starting oncology-related polypeptide sequence. Reference sequences may be wild type sequences or any sequence to which reference is made in the design of another sequence. A “reference polypeptide sequence” may, e.g., be any one of SEQ ID NOs: 4704-9203 as disclosed herein, e.g., any of SEQ ID NOs 4704, 4705, 4706, 4707, 4708, 4709, 4710, 4711, 4712, 4713, 4714, 4715, 4716, 4717, 4718, 4719, 4720, 4721, 4722, 4723, 4724, 4725, 4726, 4727, 4728, 4729, 4730, 4731, 4732, 4733, 4734, 4735, 4736, 4737, 4738, 4739, 4740, 4741, 4742, 4743, 4744, 4745, 4746, 4747, 4748, 4749, 4750, 4751, 4752, 4753, 4754, 4755, 4756, 4757, 4758, 4759, 4760, 4761, 4762, 4763, 4764, 4765, 4766, 4767, 4768, 4769, 4770, 4771, 4772, 4773, 4774, 4775, 4776, 4777, 4778, 4779, 4780, 4781, 4782, 4783, 4784, 4785, 4786, 4787, 4788, 4789, 4790, 4791, 4792, 4793, 4794, 4795, 4796, 4797, 4798, 4799, 4800, 4801, 4802, 4803, 4804, 4805, 4806, 4807, 4808, 4809, 4810, 4811, 4812, 4813, 4814, 4815, 4816, 4817, 4818, 4819, 4820, 4821, 4822, 4823, 4824, 4825, 4826, 4827, 4828, 4829, 4830, 4831, 4832, 4833, 4834, 4835, 4836, 4837, 4838, 4839, 4840, 4841, 4842, 4843, 4844, 4845, 4846, 4847, 4848, 4849, 4850, 4851, 4852, 4853, 4854, 4855, 4856, 4857, 4858, 4859, 4860, 4861, 4862, 4863, 4864, 4865, 4866, 4867, 4868, 4869, 4870, 4871, 4872, 4873, 4874, 4875, 4876, 4877, 4878, 4879, 4880, 4881, 4882, 4883, 4884, 4885, 4886, 4887, 4888, 4889, 4890, 4891, 4892, 4893, 4894, 4895, 4896, 4897, 4898, 4899, 4900, 4901, 4902, 4903, 4904, 4905, 4906, 4907, 4908, 4909, 4910, 4911, 4912, 4913, 4914, 4915, 4916, 4917, 4918, 4919, 4920, 4921, 4922, 4923, 4924, 4925, 4926, 4927, 4928, 4929, 4930, 4931, 4932, 4933, 4934, 4935, 4936, 4937, 4938, 4939, 4940, 4941, 4942, 4943, 4944, 4945, 4946, 4947, 4948, 4949, 4950, 4951, 4952, 4953, 4954, 4955, 4956, 4957, 4958, 4959, 4960, 4961, 4962, 4963, 4964, 4965, 4966, 4967, 4968, 4969, 4970, 4971, 4972, 4973, 4974, 4975, 4976, 4977, 4978, 4979, 4980, 4981, 4982, 4983, 4984, 4985, 4986, 4987, 4988, 4989, 4990, 4991, 4992, 4993, 4994, 4995, 4996, 4997, 4998, 4999, 5000, 5001, 5002, 5003, 5004, 5005, 5006, 5007, 5008, 5009, 5010, 5011, 5012, 5013, 5014, 5015, 5016, 5017, 5018, 5019, 5020, 5021, 5022, 5023, 5024, 5025, 5026, 5027, 5028, 5029, 5030, 5031, 5032, 5033, 5034, 5035, 5036, 5037, 5038, 5039, 5040, 5041, 5042, 5043, 5044, 5045, 5046, 5047, 5048, 5049, 5050, 5051, 5052, 5053, 5054, 5055, 5056, 5057, 5058, 5059, 5060, 5061, 5062, 5063, 5064, 5065, 5066, 5067, 5068, 5069, 5070, 5071, 5072, 5073, 5074, 5075, 5076, 5077, 5078, 5079, 5080, 5081, 5082, 5083, 5084, 5085, 5086, 5087, 5088, 5089, 5090, 5091, 5092, 5093, 5094, 5095, 5096, 5097, 5098, 5099, 5100, 5101, 5102, 5103, 5104, 5105, 5106, 5107,5108,5109,5110,5111,5112,5113,5114,5115,5116,5117,5118,5119,5120, 5121, 5122, 5123, 5124, 5125, 5126, 5127, 5128, 5129, 5130, 5131, 5132, 5133, 5134, 5135, 5136, 5137, 5138, 5139, 5140, 5141, 5142, 5143, 5144, 5145, 5146, 5147, 5148, 5149,5150,5151,5152,5153,5154,5155,5156,5157,5158,5159,5160,5161,5162, 5163, 5164, 5165, 5166, 5167, 5168, 5169, 5170, 5171, 5172, 5173, 5174, 5175, 5176, 5177, 5178, 5179, 5180, 5181, 5182, 5183, 5184, 5185, 5186, 5187, 5188, 5189, 5190, 5191, 5192, 5193, 5194, 5195, 5196, 5197, 5198, 5199, 5200, 5201, 5202, 5203, 5204, 5205, 5206, 5207, 5208, 5209, 5210, 5211, 5212, 5213, 5214, 5215, 5216, 5217, 5218, 5219, 5220, 5221, 5222, 5223, 5224, 5225, 5226, 5227, 5228, 5229, 5230, 5231, 5232, 5233, 5234, 5235, 5236, 5237, 5238, 5239, 5240, 5241, 5242, 5243, 5244, 5245, 5246, 5247, 5248, 5249, 5250, 5251, 5252, 5253, 5254, 5255, 5256, 5257, 5258, 5259, 5260, 5261, 5262, 5263, 5264, 5265, 5266, 5267, 5268, 5269, 5270, 5271, 5272, 5273, 5274, 5275, 5276, 5277, 5278, 5279, 5280, 5281, 5282, 5283, 5284, 5285, 5286, 5287, 5288, 5289, 5290, 5291, 5292, 5293, 5294, 5295, 5296, 5297, 5298, 5299, 5300, 5301, 5302, 5303, 5304, 5305, 5306, 5307, 5308, 5309, 5310, 5311, 5312, 5313, 5314, 5315, 5316, 5317, 5318, 5319, 5320, 5321, 5322, 5323, 5324, 5325, 5326, 5327, 5328, 5329, 5330, 5331, 5332, 5333, 5334, 5335, 5336, 5337, 5338, 5339, 5340, 5341, 5342, 5343, 5344, 5345, 5346, 5347, 5348, 5349, 5350, 5351, 5352, 5353, 5354, 5355, 5356, 5357, 5358, 5359, 5360, 5361, 5362, 5363, 5364, 5365, 5366, 5367, 5368, 5369, 5370, 5371, 5372, 5373, 5374, 5375, 5376, 5377, 5378, 5379, 5380, 5381, 5382, 5383, 5384, 5385, 5386, 5387, 5388, 5389, 5390, 5391, 5392, 5393, 5394, 5395, 5396, 5397, 5398, 5399, 5400, 5401, 5402, 5403, 5404, 5405, 5406, 5407, 5408, 5409, 5410, 5411, 5412, 5413, 5414, 5415, 5416, 5417, 5418, 5419, 5420, 5421, 5422, 5423, 5424, 5425, 5426, 5427, 5428, 5429, 5430, 5431, 5432, 5433, 5434, 5435, 5436, 5437, 5438, 5439, 5440, 5441, 5442, 5443, 5444, 5445, 5446, 5447, 5448, 5449, 5450, 5451, 5452, 5453, 5454, 5455, 5456, 5457, 5458, 5459, 5460, 5461, 5462, 5463, 5464, 5465, 5466, 5467, 5468, 5469, 5470, 5471, 5472, 5473, 5474, 5475, 5476, 5477, 5478, 5479, 5480, 5481, 5482, 5483, 5484, 5485, 5486, 5487, 5488, 5489, 5490, 5491, 5492, 5493, 5494, 5495, 5496, 5497, 5498, 5499, 5500, 5501, 5502, 5503, 5504, 5505, 5506, 5507, 5508, 5509, 5510, 5511, 5512, 5513, 5514, 5515, 5516, 5517, 5518, 5519, 5520, 5521, 5522, 5523, 5524, 5525, 5526, 5527, 5528, 5529, 5530, 5531, 5532, 5533, 5534, 5535, 5536, 5537, 5538, 5539, 5540, 5541, 5542, 5543, 5544, 5545, 5546, 5547, 5548, 5549, 5550, 5551, 5552, 5553, 5554, 5555, 5556, 5557, 5558, 5559, 5560, 5561, 5562, 5563, 5564, 5565, 5566, 5567, 5568, 5569, 5570, 5571, 5572, 5573, 5574, 5575, 5576, 5577, 5578, 5579, 5580, 5581, 5582, 5583, 5584, 5585, 5586, 5587, 5588, 5589, 5590, 5591, 5592, 5593, 5594, 5595, 5596, 5597, 5598, 5599, 5600, 5601, 5602, 5603, 5604, 5605, 5606, 5607, 5608, 5609, 5610, 5611, 5612, 5613, 5614, 5615, 5616, 5617, 5618, 5619, 5620, 5621, 5622, 5623, 5624, 5625, 5626, 5627, 5628, 5629, 5630, 5631, 5632, 5633, 5634, 5635, 5636, 5637, 5638, 5639, 5640, 5641, 5642, 5643, 5644, 5645, 5646, 5647, 5648, 5649, 5650, 5651, 5652, 5653, 5654, 5655, 5656, 5657, 5658, 5659, 5660, 5661, 5662, 5663, 5664, 5665, 5666, 5667, 5668, 5669, 5670, 5671, 5672, 5673, 5674, 5675, 5676, 5677, 5678, 5679, 5680, 5681, 5682, 5683, 5684, 5685, 5686, 5687, 5688, 5689, 5690, 5691, 5692, 5693, 5694, 5695, 5696, 5697, 5698, 5699, 5700, 5701, 5702, 5703, 5704, 5705, 5706, 5707, 5708, 5709, 5710, 5711, 5712, 5713, 5714, 5715, 5716, 5717, 5718, 5719, 5720, 5721, 5722, 5723, 5724, 5725, 5726, 5727, 5728, 5729, 5730, 5731, 5732, 5733, 5734, 5735, 5736, 5737, 5738, 5739, 5740, 5741, 5742, 5743, 5744, 5745, 5746, 5747, 5748, 5749, 5750, 5751, 5752, 5753, 5754, 5755, 5756, 5757, 5758, 5759, 5760, 5761, 5762, 5763, 5764, 5765, 5766, 5767, 5768, 5769, 5770, 5771, 5772, 5773, 5774, 5775, 5776, 5777, 5778, 5779, 5780, 5781, 5782, 5783, 5784, 5785, 5786, 5787, 5788, 5789, 5790, 5791, 5792, 5793, 5794, 5795, 5796, 5797, 5798, 5799, 5800, 5801, 5802, 5803, 5804, 5805, 5806, 5807, 5808, 5809, 5810, 5811, 5812, 5813, 5814, 5815, 5816, 5817, 5818, 5819, 5820, 5821, 5822, 5823, 5824, 5825, 5826, 5827, 5828, 5829, 5830, 5831, 5832, 5833, 5834, 5835, 5836, 5837, 5838, 5839, 5840, 5841, 5842, 5843, 5844, 5845, 5846, 5847, 5848, 5849, 5850, 5851, 5852, 5853, 5854, 5855, 5856, 5857, 5858, 5859, 5860, 5861, 5862, 5863, 5864, 5865, 5866, 5867, 5868, 5869, 5870, 5871, 5872, 5873, 5874, 5875, 5876, 5877, 5878, 5879, 5880, 5881, 5882, 5883, 5884, 5885, 5886, 5887, 5888, 5889, 5890, 5891, 5892, 5893, 5894, 5895, 5896, 5897, 5898, 5899, 5900, 5901, 5902, 5903, 5904, 5905, 5906, 5907, 5908, 5909, 5910, 5911, 5912, 5913, 5914, 5915, 5916, 5917, 5918, 5919, 5920, 5921, 5922, 5923, 5924, 5925, 5926, 5927, 5928, 5929, 5930, 5931, 5932, 5933, 5934, 5935, 5936, 5937, 5938, 5939, 5940, 5941, 5942, 5943, 5944, 5945, 5946, 5947, 5948, 5949, 5950, 5951, 5952, 5953, 5954, 5955, 5956, 5957, 5958, 5959, 5960, 5961, 5962, 5963, 5964, 5965, 5966, 5967, 5968, 5969, 5970, 5971, 5972, 5973, 5974, 5975, 5976, 5977, 5978, 5979, 5980, 5981, 5982, 5983, 5984, 5985, 5986, 5987, 5988, 5989, 5990, 5991, 5992, 5993, 5994, 5995, 5996, 5997, 5998, 5999, 6000, 6001, 6002, 6003, 6004, 6005, 6006, 6007, 6008, 6009, 6010, 6011, 6012, 6013, 6014, 6015, 6016, 6017, 6018, 6019, 6020, 6021, 6022, 6023, 6024, 6025, 6026, 6027, 6028, 6029, 6030, 6031, 6032, 6033, 6034, 6035, 6036, 6037, 6038, 6039, 6040, 6041, 6042, 6043, 6044, 6045, 6046, 6047, 6048, 6049, 6050, 6051, 6052, 6053, 6054, 6055, 6056, 6057, 6058, 6059, 6060, 6061, 6062, 6063, 6064, 6065, 6066, 6067, 6068, 6069, 6070, 6071, 6072, 6073, 6074, 6075, 6076, 6077, 6078, 6079, 6080, 6081, 6082, 6083, 6084, 6085, 6086, 6087, 6088, 6089, 6090, 6091, 6092, 6093, 6094, 6095, 6096, 6097, 6098, 6099, 6100, 6101, 6102, 6103, 6104, 6105, 6106, 6107, 6108, 6109, 6110, 6111, 6112, 6113, 6114, 6115, 6116, 6117, 6118, 6119, 6120, 6121, 6122, 6123, 6124, 6125, 6126, 6127, 6128, 6129,6130,6131,6132,6133,6134,6135,6136,6137,6138,6139,6140,6141,6142, 6143, 6144, 6145, 6146, 6147, 6148, 6149, 6150, 6151, 6152, 6153, 6154, 6155, 6156, 6157, 6158, 6159, 6160, 6161, 6162, 6163, 6164, 6165, 6166, 6167, 6168, 6169, 6170, 6171, 6172, 6173, 6174, 6175, 6176, 6177, 6178, 6179, 6180, 6181, 6182, 6183, 6184, 6185, 6186, 6187, 6188, 6189, 6190, 6191, 6192, 6193, 6194, 6195, 6196, 6197, 6198, 6199, 6200, 6201, 6202, 6203, 6204, 6205, 6206, 6207, 6208, 6209, 6210, 6211, 6212, 6213, 6214, 6215, 6216, 6217, 6218, 6219, 6220, 6221, 6222, 6223, 6224, 6225, 6226, 6227, 6228, 6229, 6230, 6231, 6232, 6233, 6234, 6235, 6236, 6237, 6238, 6239, 6240, 6241, 6242, 6243, 6244, 6245, 6246, 6247, 6248, 6249, 6250, 6251, 6252, 6253, 6254, 6255, 6256, 6257, 6258, 6259, 6260, 6261, 6262, 6263, 6264, 6265, 6266, 6267, 6268, 6269, 6270, 6271, 6272, 6273, 6274, 6275, 6276, 6277, 6278, 6279, 6280, 6281, 6282, 6283, 6284, 6285, 6286, 6287, 6288, 6289, 6290, 6291, 6292, 6293, 6294, 6295, 6296, 6297, 6298, 6299, 6300, 6301, 6302, 6303, 6304, 6305, 6306, 6307, 6308, 6309, 6310, 6311, 6312, 6313, 6314, 6315, 6316, 6317, 6318, 6319, 6320, 6321, 6322, 6323, 6324, 6325, 6326, 6327, 6328, 6329, 6330, 6331, 6332, 6333, 6334, 6335, 6336, 6337, 6338, 6339, 6340, 6341, 6342, 6343, 6344, 6345, 6346, 6347, 6348, 6349, 6350, 6351, 6352, 6353, 6354, 6355, 6356, 6357, 6358, 6359, 6360, 6361, 6362, 6363, 6364, 6365, 6366, 6367, 6368, 6369, 6370, 6371, 6372, 6373, 6374, 6375, 6376, 6377, 6378, 6379, 6380, 6381, 6382, 6383, 6384, 6385, 6386, 6387, 6388, 6389, 6390, 6391, 6392, 6393, 6394, 6395, 6396, 6397, 6398, 6399, 6400, 6401, 6402, 6403, 6404, 6405, 6406, 6407, 6408, 6409, 6410, 6411, 6412, 6413, 6414, 6415, 6416, 6417, 6418, 6419, 6420, 6421, 6422, 6423, 6424, 6425, 6426, 6427, 6428, 6429, 6430, 6431, 6432, 6433, 6434, 6435, 6436, 6437, 6438, 6439, 6440, 6441, 6442, 6443, 6444, 6445, 6446, 6447, 6448, 6449, 6450, 6451, 6452, 6453, 6454, 6455, 6456, 6457, 6458, 6459, 6460, 6461, 6462, 6463, 6464, 6465, 6466, 6467, 6468, 6469, 6470, 6471, 6472, 6473, 6474, 6475, 6476, 6477, 6478, 6479, 6480, 6481, 6482, 6483, 6484, 6485, 6486, 6487, 6488, 6489, 6490, 6491, 6492, 6493, 6494, 6495, 6496, 6497, 6498, 6499, 6500, 6501, 6502, 6503, 6504, 6505, 6506, 6507, 6508, 6509, 6510, 6511, 6512, 6513, 6514, 6515, 6516, 6517, 6518, 6519, 6520, 6521, 6522, 6523, 6524, 6525, 6526, 6527, 6528, 6529, 6530, 6531, 6532, 6533, 6534, 6535, 6536, 6537, 6538, 6539, 6540, 6541, 6542, 6543, 6544, 6545, 6546, 6547, 6548, 6549, 6550, 6551, 6552, 6553, 6554, 6555, 6556, 6557, 6558, 6559, 6560, 6561, 6562, 6563, 6564, 6565, 6566, 6567, 6568, 6569, 6570, 6571, 6572, 6573, 6574, 6575, 6576, 6577, 6578, 6579, 6580, 6581, 6582, 6583, 6584, 6585, 6586, 6587, 6588, 6589, 6590, 6591, 6592, 6593, 6594, 6595, 6596, 6597, 6598, 6599, 6600, 6601, 6602, 6603, 6604, 6605, 6606, 6607, 6608, 6609, 6610, 6611, 6612, 6613, 6614, 6615, 6616, 6617, 6618, 6619, 6620, 6621, 6622, 6623, 6624, 6625, 6626, 6627, 6628, 6629, 6630, 6631, 6632, 6633, 6634, 6635, 6636, 6637, 6638, 6639, 6640, 6641, 6642, 6643, 6644, 6645, 6646, 6647, 6648, 6649, 6650, 6651, 6652, 6653, 6654, 6655, 6656, 6657, 6658, 6659, 6660, 6661, 6662, 6663, 6664, 6665, 6666, 6667, 6668, 6669, 6670, 6671, 6672, 6673, 6674, 6675, 6676, 6677, 6678, 6679, 6680, 6681, 6682, 6683, 6684, 6685, 6686, 6687, 6688, 6689, 6690, 6691, 6692, 6693, 6694, 6695, 6696, 6697, 6698, 6699, 6700, 6701, 6702, 6703, 6704, 6705, 6706, 6707, 6708, 6709, 6710, 6711, 6712, 6713, 6714, 6715, 6716, 6717, 6718, 6719, 6720, 6721, 6722, 6723, 6724, 6725, 6726, 6727, 6728, 6729, 6730, 6731, 6732, 6733, 6734, 6735, 6736, 6737, 6738, 6739, 6740, 6741, 6742, 6743, 6744, 6745, 6746, 6747, 6748, 6749, 6750, 6751, 6752, 6753, 6754, 6755, 6756, 6757, 6758, 6759, 6760, 6761, 6762, 6763, 6764, 6765, 6766, 6767, 6768, 6769, 6770, 6771, 6772, 6773, 6774, 6775, 6776, 6777, 6778, 6779, 6780, 6781, 6782, 6783, 6784, 6785, 6786, 6787, 6788, 6789, 6790, 6791, 6792, 6793, 6794, 6795, 6796, 6797, 6798, 6799, 6800, 6801, 6802, 6803, 6804, 6805, 6806, 6807, 6808, 6809, 6810, 6811, 6812, 6813, 6814, 6815, 6816, 6817, 6818, 6819, 6820, 6821, 6822, 6823, 6824, 6825, 6826, 6827, 6828, 6829, 6830, 6831, 6832, 6833, 6834, 6835, 6836, 6837, 6838, 6839, 6840, 6841, 6842, 6843, 6844, 6845, 6846, 6847, 6848, 6849, 6850, 6851, 6852, 6853, 6854, 6855, 6856, 6857, 6858, 6859, 6860, 6861, 6862, 6863, 6864, 6865, 6866, 6867, 6868, 6869, 6870, 6871, 6872, 6873, 6874, 6875, 6876, 6877, 6878, 6879, 6880, 6881, 6882, 6883, 6884, 6885, 6886, 6887, 6888, 6889, 6890, 6891, 6892, 6893, 6894, 6895, 6896, 6897, 6898, 6899, 6900, 6901, 6902, 6903, 6904, 6905, 6906, 6907, 6908, 6909, 6910, 6911, 6912, 6913, 6914, 6915, 6916, 6917, 6918, 6919, 6920, 6921, 6922, 6923, 6924, 6925, 6926, 6927, 6928, 6929, 6930, 6931, 6932, 6933, 6934, 6935, 6936, 6937, 6938, 6939, 6940, 6941, 6942, 6943, 6944, 6945, 6946, 6947, 6948, 6949, 6950, 6951, 6952, 6953, 6954, 6955, 6956, 6957, 6958, 6959, 6960, 6961, 6962, 6963, 6964, 6965, 6966, 6967, 6968, 6969, 6970, 6971, 6972, 6973, 6974, 6975, 6976, 6977, 6978, 6979, 6980, 6981, 6982, 6983, 6984, 6985, 6986, 6987, 6988, 6989, 6990, 6991, 6992, 6993, 6994, 6995, 6996, 6997, 6998, 6999, 7000, 7001, 7002, 7003, 7004, 7005, 7006, 7007, 7008, 7009, 7010, 7011, 7012, 7013, 7014, 7015, 7016, 7017, 7018, 7019, 7020, 7021, 7022, 7023, 7024, 7025, 7026, 7027, 7028, 7029, 7030, 7031, 7032, 7033, 7034, 7035, 7036, 7037, 7038, 7039, 7040, 7041, 7042, 7043, 7044, 7045, 7046, 7047, 7048, 7049, 7050, 7051, 7052, 7053, 7054, 7055, 7056, 7057, 7058, 7059, 7060, 7061, 7062, 7063, 7064, 7065, 7066, 7067, 7068, 7069, 7070, 7071, 7072, 7073, 7074, 7075, 7076, 7077, 7078, 7079, 7080, 7081, 7082, 7083, 7084, 7085, 7086, 7087, 7088, 7089, 7090, 7091, 7092, 7093, 7094, 7095, 7096, 7097, 7098, 7099, 7100, 7101, 7102, 7103, 7104, 7105, 7106, 7107, 7108, 7109,7110,7111,7112,7113,7114,7115,7116,7117,7118,7119,7120,7121,7122, 7123,7124,7125,7126,7127,7128,7129,7130, 7131, 7132, 7133, 7134, 7135, 7136, 7137, 7138, 7139, 7140, 7141, 7142, 7143, 7144, 7145, 7146, 7147, 7148, 7149, 7150, 7151, 7152, 7153, 7154, 7155, 7156, 7157, 7158, 7159, 7160, 7161, 7162, 7163, 7164, 7165, 7166, 7167, 7168, 7169, 7170, 7171, 7172, 7173, 7174, 7175, 7176, 7177, 7178, 7179, 7180, 7181, 7182, 7183, 7184, 7185, 7186, 7187, 7188, 7189, 7190, 7191, 7192, 7193, 7194, 7195, 7196, 7197, 7198, 7199, 7200, 7201, 7202, 7203, 7204, 7205, 7206, 7207, 7208, 7209, 7210, 7211, 7212, 7213, 7214, 7215, 7216, 7217, 7218, 7219, 7220, 7221, 7222, 7223, 7224, 7225, 7226, 7227, 7228, 7229, 7230, 7231, 7232, 7233, 7234, 7235, 7236, 7237, 7238, 7239, 7240, 7241, 7242, 7243, 7244, 7245, 7246, 7247, 7248, 7249, 7250, 7251, 7252, 7253, 7254, 7255, 7256, 7257, 7258, 7259, 7260, 7261, 7262, 7263, 7264, 7265, 7266, 7267, 7268, 7269, 7270, 7271, 7272, 7273, 7274, 7275, 7276, 7277, 7278, 7279, 7280, 7281, 7282, 7283, 7284, 7285, 7286, 7287, 7288, 7289, 7290, 7291, 7292, 7293, 7294, 7295, 7296, 7297, 7298, 7299, 7300, 7301, 7302, 7303, 7304, 7305, 7306, 7307, 7308, 7309, 7310, 7311, 7312, 7313, 7314, 7315, 7316, 7317, 7318, 7319, 7320, 7321, 7322, 7323, 7324, 7325, 7326, 7327, 7328, 7329, 7330, 7331, 7332, 7333, 7334, 7335, 7336, 7337, 7338, 7339, 7340, 7341, 7342, 7343, 7344, 7345, 7346, 7347, 7348, 7349, 7350, 7351, 7352, 7353, 7354, 7355, 7356, 7357, 7358, 7359, 7360, 7361, 7362, 7363, 7364, 7365, 7366, 7367, 7368, 7369, 7370, 7371, 7372, 7373, 7374, 7375, 7376, 7377, 7378, 7379, 7380, 7381, 7382, 7383, 7384, 7385, 7386, 7387, 7388, 7389, 7390, 7391, 7392, 7393, 7394, 7395, 7396, 7397, 7398, 7399, 7400, 7401, 7402, 7403, 7404, 7405, 7406, 7407, 7408, 7409, 7410, 7411, 7412, 7413, 7414, 7415, 7416, 7417, 7418, 7419, 7420, 7421, 7422, 7423, 7424, 7425, 7426, 7427, 7428, 7429, 7430, 7431, 7432, 7433, 7434, 7435, 7436, 7437, 7438, 7439, 7440, 7441, 7442, 7443, 7444, 7445, 7446, 7447, 7448, 7449, 7450, 7451, 7452, 7453, 7454, 7455, 7456, 7457, 7458, 7459, 7460, 7461, 7462, 7463, 7464, 7465, 7466, 7467, 7468, 7469, 7470, 7471, 7472, 7473, 7474, 7475, 7476, 7477, 7478, 7479, 7480, 7481, 7482, 7483, 7484, 7485, 7486, 7487, 7488, 7489, 7490, 7491, 7492, 7493, 7494, 7495, 7496, 7497, 7498, 7499, 7500, 7501, 7502, 7503, 7504, 7505, 7506, 7507, 7508, 7509, 7510, 7511, 7512, 7513, 7514, 7515, 7516, 7517, 7518, 7519, 7520, 7521, 7522, 7523, 7524, 7525, 7526, 7527, 7528, 7529, 7530, 7531, 7532, 7533, 7534, 7535, 7536, 7537, 7538, 7539, 7540, 7541, 7542, 7543, 7544, 7545, 7546, 7547, 7548, 7549, 7550, 7551, 7552, 7553, 7554, 7555, 7556, 7557, 7558, 7559, 7560, 7561, 7562, 7563, 7564, 7565, 7566, 7567, 7568, 7569, 7570, 7571, 7572, 7573, 7574, 7575, 7576, 7577, 7578, 7579, 7580, 7581, 7582, 7583, 7584, 7585, 7586, 7587, 7588, 7589, 7590, 7591, 7592, 7593, 7594, 7595, 7596, 7597, 7598, 7599, 7600, 7601, 7602, 7603, 7604, 7605, 7606, 7607, 7608, 7609, 7610, 7611, 7612, 7613, 7614, 7615, 7616, 7617, 7618, 7619, 7620, 7621, 7622, 7623, 7624, 7625, 7626, 7627, 7628, 7629, 7630, 7631, 7632, 7633, 7634, 7635, 7636, 7637, 7638, 7639, 7640, 7641, 7642, 7643, 7644, 7645, 7646, 7647, 7648, 7649, 7650, 7651, 7652, 7653, 7654, 7655, 7656, 7657, 7658, 7659, 7660, 7661, 7662, 7663, 7664, 7665, 7666, 7667, 7668, 7669, 7670, 7671, 7672, 7673, 7674, 7675, 7676, 7677, 7678, 7679, 7680, 7681, 7682, 7683, 7684, 7685, 7686, 7687, 7688, 7689, 7690, 7691, 7692, 7693, 7694, 7695, 7696, 7697, 7698, 7699, 7700, 7701, 7702, 7703, 7704, 7705, 7706, 7707, 7708, 7709, 7710, 7711, 7712, 7713, 7714, 7715, 7716, 7717, 7718, 7719, 7720, 7721, 7722, 7723, 7724, 7725, 7726, 7727, 7728, 7729, 7730, 7731, 7732, 7733, 7734, 7735, 7736, 7737, 7738, 7739, 7740, 7741, 7742, 7743, 7744, 7745, 7746, 7747, 7748, 7749, 7750, 7751, 7752, 7753, 7754, 7755, 7756, 7757, 7758, 7759, 7760, 7761, 7762, 7763, 7764, 7765, 7766, 7767, 7768, 7769, 7770, 7771, 7772, 7773, 7774, 7775, 7776, 7777, 7778, 7779, 7780, 7781, 7782, 7783, 7784, 7785, 7786, 7787, 7788, 7789, 7790, 7791, 7792, 7793, 7794, 7795, 7796, 7797, 7798, 7799, 7800, 7801, 7802, 7803, 7804, 7805, 7806, 7807, 7808, 7809, 7810, 7811, 7812, 7813, 7814, 7815, 7816, 7817, 7818, 7819, 7820, 7821, 7822, 7823, 7824, 7825, 7826, 7827, 7828, 7829, 7830, 7831, 7832, 7833, 7834, 7835, 7836, 7837, 7838, 7839, 7840, 7841, 7842, 7843, 7844, 7845, 7846, 7847, 7848, 7849, 7850, 7851, 7852, 7853, 7854, 7855, 7856, 7857, 7858, 7859, 7860, 7861, 7862, 7863, 7864, 7865, 7866, 7867, 7868, 7869, 7870, 7871, 7872, 7873, 7874, 7875, 7876, 7877, 7878, 7879, 7880, 7881, 7882, 7883, 7884, 7885, 7886, 7887, 7888, 7889, 7890, 7891, 7892, 7893, 7894, 7895, 7896, 7897, 7898, 7899, 7900, 7901, 7902, 7903, 7904, 7905, 7906, 7907, 7908, 7909, 7910, 7911, 7912, 7913, 7914, 7915, 7916, 7917, 7918, 7919, 7920, 7921, 7922, 7923, 7924, 7925, 7926, 7927, 7928, 7929, 7930, 7931, 7932, 7933, 7934, 7935, 7936, 7937, 7938, 7939, 7940, 7941, 7942, 7943, 7944, 7945, 7946, 7947, 7948, 7949, 7950, 7951, 7952, 7953, 7954, 7955, 7956, 7957, 7958, 7959, 7960, 7961, 7962, 7963, 7964, 7965, 7966, 7967, 7968, 7969, 7970, 7971, 7972, 7973, 7974, 7975, 7976, 7977, 7978, 7979, 7980, 7981, 7982, 7983, 7984, 7985, 7986, 7987, 7988, 7989, 7990, 7991, 7992, 7993, 7994, 7995, 7996, 7997, 7998, 7999, 8000, 8001, 8002, 8003, 8004, 8005, 8006, 8007, 8008, 8009, 8010, 8011, 8012, 8013, 8014, 8015, 8016, 8017, 8018, 8019, 8020, 8021, 8022, 8023, 8024, 8025, 8026, 8027, 8028, 8029, 8030, 8031, 8032, 8033, 8034, 8035, 8036, 8037, 8038, 8039, 8040, 8041, 8042, 8043, 8044, 8045, 8046, 8047, 8048, 8049, 8050, 8051, 8052, 8053, 8054, 8055, 8056, 8057, 8058, 8059, 8060, 8061, 8062, 8063, 8064, 8065, 8066, 8067, 8068, 8069, 8070, 8071, 8072, 8073, 8074, 8075, 8076, 8077, 8078, 8079, 8080, 8081, 8082, 8083, 8084, 8085, 8086, 8087, 8088, 8089, 8090, 8091, 8092, 8093, 8094, 8095, 8096, 8097, 8098, 8099, 8100, 8101, 8102, 8103, 8104, 8105, 8106, 8107, 8108, 8109, 8110, 8111, 8112, 8113, 8114, 8115, 8116, 8117, 8118, 8119, 8120, 8121, 8122, 8123, 8124, 8125, 8126, 8127, 8128, 8129, 8130, 8131, 8132, 8133, 8134, 8135, 8136, 8137, 8138, 8139, 8140, 8141, 8142, 8143, 8144, 8145, 8146, 8147, 8148, 8149, 8150, 8151, 8152, 8153, 8154, 8155, 8156, 8157, 8158, 8159, 8160, 8161, 8162, 8163, 8164, 8165, 8166, 8167, 8168, 8169, 8170, 8171, 8172, 8173, 8174, 8175, 8176, 8177, 8178, 8179, 8180, 8181, 8182, 8183, 8184, 8185, 8186, 8187, 8188, 8189, 8190, 8191, 8192, 8193, 8194, 8195, 8196, 8197, 8198, 8199, 8200, 8201, 8202, 8203, 8204, 8205, 8206, 8207, 8208, 8209, 8210, 8211, 8212, 8213, 8214, 8215, 8216, 8217, 8218, 8219, 8220, 8221, 8222, 8223, 8224, 8225, 8226, 8227, 8228, 8229, 8230, 8231, 8232, 8233, 8234, 8235, 8236, 8237, 8238, 8239, 8240, 8241, 8242, 8243, 8244, 8245, 8246, 8247, 8248, 8249, 8250, 8251, 8252, 8253, 8254, 8255, 8256, 8257, 8258, 8259, 8260, 8261, 8262, 8263, 8264, 8265, 8266, 8267, 8268, 8269, 8270, 8271, 8272, 8273, 8274, 8275, 8276, 8277, 8278, 8279, 8280, 8281, 8282, 8283, 8284, 8285, 8286, 8287, 8288, 8289, 8290, 8291, 8292, 8293, 8294, 8295, 8296, 8297, 8298, 8299, 8300, 8301, 8302, 8303, 8304, 8305, 8306, 8307, 8308, 8309, 8310, 8311, 8312, 8313, 8314, 8315, 8316, 8317, 8318, 8319, 8320, 8321, 8322, 8323, 8324, 8325, 8326, 8327, 8328, 8329, 8330, 8331, 8332, 8333, 8334, 8335, 8336, 8337, 8338, 8339, 8340, 8341, 8342, 8343, 8344, 8345, 8346, 8347, 8348, 8349, 8350, 8351, 8352, 8353, 8354, 8355, 8356, 8357, 8358, 8359, 8360, 8361, 8362, 8363, 8364, 8365, 8366, 8367, 8368, 8369, 8370, 8371, 8372, 8373, 8374, 8375, 8376, 8377, 8378, 8379, 8380, 8381, 8382, 8383, 8384, 8385, 8386, 8387, 8388, 8389, 8390, 8391, 8392, 8393, 8394, 8395, 8396, 8397, 8398, 8399, 8400, 8401, 8402, 8403, 8404, 8405, 8406, 8407, 8408, 8409, 8410, 8411, 8412, 8413, 8414, 8415, 8416, 8417, 8418, 8419, 8420, 8421, 8422, 8423, 8424, 8425, 8426, 8427, 8428, 8429, 8430, 8431, 8432, 8433, 8434, 8435, 8436, 8437, 8438, 8439, 8440, 8441, 8442, 8443, 8444, 8445, 8446, 8447, 8448, 8449, 8450, 8451, 8452, 8453, 8454, 8455, 8456, 8457, 8458, 8459, 8460, 8461, 8462, 8463, 8464, 8465, 8466, 8467, 8468, 8469, 8470, 8471, 8472, 8473, 8474, 8475, 8476, 8477, 8478, 8479, 8480, 8481, 8482, 8483, 8484, 8485, 8486, 8487, 8488, 8489, 8490, 8491, 8492, 8493, 8494, 8495, 8496, 8497, 8498, 8499, 8500, 8501, 8502, 8503, 8504, 8505, 8506, 8507, 8508, 8509, 8510, 8511, 8512, 8513, 8514, 8515, 8516, 8517, 8518, 8519, 8520, 8521, 8522, 8523, 8524, 8525, 8526, 8527, 8528, 8529, 8530, 8531, 8532, 8533, 8534, 8535, 8536, 8537, 8538, 8539, 8540, 8541, 8542, 8543, 8544, 8545, 8546, 8547, 8548, 8549, 8550, 8551, 8552, 8553, 8554, 8555, 8556, 8557, 8558, 8559, 8560, 8561, 8562, 8563, 8564, 8565, 8566, 8567, 8568, 8569, 8570, 8571, 8572, 8573, 8574, 8575, 8576, 8577, 8578, 8579, 8580, 8581, 8582, 8583, 8584, 8585, 8586, 8587, 8588, 8589, 8590, 8591, 8592, 8593, 8594, 8595, 8596, 8597, 8598, 8599, 8600, 8601, 8602, 8603, 8604, 8605, 8606, 8607, 8608, 8609, 8610, 8611, 8612, 8613, 8614, 8615, 8616, 8617, 8618, 8619, 8620, 8621, 8622, 8623, 8624, 8625, 8626, 8627, 8628, 8629, 8630, 8631, 8632, 8633, 8634, 8635, 8636, 8637, 8638, 8639, 8640, 8641, 8642, 8643, 8644, 8645, 8646, 8647, 8648, 8649, 8650, 8651, 8652, 8653, 8654, 8655, 8656, 8657, 8658, 8659, 8660, 8661, 8662, 8663, 8664, 8665, 8666, 8667, 8668, 8669, 8670, 8671, 8672, 8673, 8674, 8675, 8676, 8677, 8678, 8679, 8680, 8681, 8682, 8683, 8684, 8685, 8686, 8687, 8688, 8689, 8690, 8691, 8692, 8693, 8694, 8695, 8696, 8697, 8698, 8699, 8700, 8701, 8702, 8703, 8704, 8705, 8706, 8707, 8708, 8709, 8710, 8711, 8712, 8713, 8714, 8715, 8716, 8717, 8718, 8719, 8720, 8721, 8722, 8723, 8724, 8725, 8726, 8727, 8728, 8729, 8730, 8731, 8732, 8733, 8734, 8735, 8736, 8737, 8738, 8739, 8740, 8741, 8742, 8743, 8744, 8745, 8746, 8747, 8748, 8749, 8750, 8751, 8752, 8753, 8754, 8755, 8756, 8757, 8758, 8759, 8760, 8761, 8762, 8763, 8764, 8765, 8766, 8767, 8768, 8769, 8770, 8771, 8772, 8773, 8774, 8775, 8776, 8777, 8778, 8779, 8780, 8781, 8782, 8783, 8784, 8785, 8786, 8787, 8788, 8789, 8790, 8791, 8792, 8793, 8794, 8795, 8796, 8797, 8798, 8799, 8800, 8801, 8802, 8803, 8804, 8805, 8806, 8807, 8808, 8809, 8810, 8811, 8812, 8813, 8814, 8815, 8816, 8817, 8818, 8819, 8820, 8821, 8822, 8823, 8824, 8825, 8826, 8827, 8828, 8829, 8830, 8831, 8832, 8833, 8834, 8835, 8836, 8837, 8838, 8839, 8840, 8841, 8842, 8843, 8844, 8845, 8846, 8847, 8848, 8849, 8850, 8851, 8852, 8853, 8854, 8855, 8856, 8857, 8858, 8859, 8860, 8861, 8862, 8863, 8864, 8865, 8866, 8867, 8868, 8869, 8870, 8871, 8872, 8873, 8874, 8875, 8876, 8877, 8878, 8879, 8880, 8881, 8882, 8883, 8884, 8885, 8886, 8887, 8888, 8889, 8890, 8891, 8892, 8893, 8894, 8895, 8896, 8897, 8898, 8899, 8900, 8901, 8902, 8903, 8904, 8905, 8906, 8907, 8908, 8909, 8910, 8911, 8912, 8913, 8914, 8915, 8916, 8917, 8918, 8919, 8920, 8921, 8922, 8923, 8924, 8925, 8926, 8927, 8928, 8929, 8930, 8931, 8932, 8933, 8934, 8935, 8936, 8937, 8938, 8939, 8940, 8941, 8942, 8943, 8944, 8945, 8946, 8947, 8948, 8949, 8950, 8951, 8952, 8953, 8954, 8955, 8956, 8957, 8958, 8959, 8960, 8961, 8962, 8963, 8964, 8965, 8966, 8967, 8968, 8969, 8970, 8971, 8972, 8973, 8974, 8975, 8976, 8977, 8978, 8979, 8980, 8981, 8982, 8983, 8984, 8985, 8986, 8987, 8988, 8989, 8990, 8991, 8992, 8993, 8994, 8995, 8996, 8997, 8998, 8999, 9000, 9001, 9002, 9003, 9004, 9005, 9006, 9007, 9008, 9009, 9010, 9011, 9012, 9013, 9014, 9015, 9016, 9017, 9018, 9019, 9020, 9021, 9022, 9023, 9024, 9025, 9026, 9027, 9028, 9029, 9030, 9031, 9032, 9033, 9034, 9035, 9036, 9037, 9038, 9039, 9040, 9041, 9042, 9043, 9044, 9045, 9046, 9047, 9048, 9049, 9050, 9051, 9052, 9053, 9054, 9055, 9056, 9057, 9058, 9059, 9060, 9061, 9062, 9063, 9064, 9065, 9066, 9067, 9068, 9069, 9070, 9071, 9072, 9073, 9074, 9075, 9076, 9077, 9078, 9079, 9080, 9081, 9082, 9083, 9084, 9085, 9086, 9087, 9088, 9089, 9090, 9091, 9092, 9093, 9094, 9095, 9096, 9097, 9098, 9099, 9100, 9101, 9102, 9103, 9104, 9105, 9106, 9107, 9108, 9109, 9110, 9111, 9112, 9113, 9114, 9115, 9116, 9117, 9118, 9119, 9120, 9121, 9122, 9123, 9124, 9125, 9126, 9127, 9128, 9129, 9130, 9131, 9132, 9133, 9134, 9135, 9136, 9137, 9138, 9139, 9140, 9141, 9142, 9143, 9144, 9145, 9146, 9147, 9148, 9149, 9150, 9151, 9152, 9153, 9154, 9155, 9156, 9157, 9158, 9159, 9160, 9161, 9162, 9163, 9164, 9165, 9166, 9167, 9168, 9169, 9170, 9171, 9172, 9173, 9174, 9175, 9176, 9177, 9178, 9179, 9180, 9181, 9182, 9183, 9184, 9185, 9186, 9187, 9188, 9189, 9190, 9191, 9192, 9193, 9194, 9195, 9196, 9197, 9198, 9199, 9200, 9201, 9202, 9203.

[0089] The term “identity” as known in the art, refers to a relationship between the sequences of two or more peptides, as determined by comparing the sequences. In the art, identity also means the degree of sequence relatedness between peptides, as determined by the number of matches between strings of two or more amino acid residues. Identity measures the percent of identical matches between the smaller of two or more sequences with gap alignments (if any) addressed by a particular mathematical model or computer program (i.e., “algorithms”). Identity of related peptides can be readily calculated by known methods. Such methods include, but are not limited to, those described in Computational Molecular Biology, Lesk, A. M., ed., Oxford University Press, New York, 1988; Biocomputing: Informatics and Genome Projects, Smith, D. W., ed., Academic Press, New York, 1993; Computer Analysis of Sequence Data, Part 1, Griffin, A. M., and Griffin, H. G., eds., Humana Press, New Jersey, 1994; Sequence Analysis in Molecular Biology, von Heinje, G., Academic Press, 1987; Sequence Analysis Primer, Gribskov, M. and Devereux, J., eds., M. Stockton Press, New York, 1991; and Carillo et al., SIAM J. Applied Math. 48, 1073 (1988).

[0090] In some embodiments, the polypeptide variant may have the same or a similar activity as the reference oncology-related polypeptide. Alternatively, the variant may have an altered activity (e.g., increased or decreased) relative to a reference oncology-related polypeptide. Generally, variants of a particular oncology-related polynucleotide or oncology-related polypeptide of the invention will have at least about 40%, 45%, 50%, 55%, 60%, 65%, 70%, 75%, 80%, 85%, 90%, 91%, 92%, 93%, 94%, 95%, 96%, 97%, 98%, 99% but less than 100% sequence identity to that particular reference oncology-related polynucleotide or oncology-related polypeptide as determined by sequence alignment programs and parameters described herein and known to those skilled in the art. Such tools for alignment include those of the BLAST suite (Stephen F. Altschul, Thomas L. Madden, Alejandro A. Schaffer, Jinghui Zhang, Zheng Zhang, Webb Miller, and David J. Lipman (1997), “Gapped BLAST and PSI-BLAST: a new generation of protein database search programs”, Nucleic Acids Res. 25:3389-3402.) Other tools are described herein, specifically in the definition of “identity.”

[0091] Default parameters in the BLAST algorithm include, for example, an expect threshold of 10, Word size of 28, Match/Mismatch Scores 1, −2, Gap costs Linear. Any filter can be applied as well as a selection for species specific repeats, e.g., Homo sapiens.

[0092] In one embodiment, the oncology-related polynucleotides, oncology-related primary constructs and/or oncology-related mmRNA may be used to treat a disease, disorder and/or condition in a subject.

[0093] In one embodiment, the oncology-related polynucleotides, oncology-related primary constructs and/or oncology-related mmRNA may be used to reduce, eliminate or prevent tumor growth in a subject.

[0094] In one embodiment, the oncology-related polynucleotides, oncology-related primary constructs and/or oncology-related mmRNA may be used to recude and/or ameliorate at least one symptom of cancer in a subject. A symptom of cancer may include, but is not limited to, weakness, aches and pains, fever, fatigue, weight loss, blood clots, increased blood calcium levels, low white blood cell count, short of breath, dizziness, headaches, hyperpigmentation, jaundice, erthema, pruritis, excessive hair growth, change in bowel habits, change in bladder function, long-lasting sores, white patches inside the mouth, white spots on the tongue, unusual bleeding or discharge, thickening or lump on parts of the body, indigestion, trouble swallowing, changes in warts or moles, change in new skin and nagging cough or hoarseness. Further, the oncology-related polynucleotides, oncology-related primary constructs and/or oncology-related mmRNA may reduce a side-effect associated with cancer such as, but not limited to, chemo brain, peripheral neuropathy, fatigue, depression, nausea, vomiting, pain, anemia, lymphedema, infections, sexual side effects, reduced fertility or infertility, ostomics, insomnia and hair loss.

### Oncology-Related Proteins or Oncology-Related Peptides

[0095] The oncology-related primary constructs or oncology-related mmRNA disclosed herein, may encode one or more validated or “in testing” oncology-related proteins or oncology-related peptides.

[0096] According to the present invention, one or more oncology-related proteins or oncology-related peptides currently being marketed or in development may be encoded by the oncology-related polynucleotides, oncology-related primary constructs or oncology-related mmRNA of the present invention. While not wishing to be bound by theory, it is believed that incorporation into the oncology-related primary constructs or oncology-related mmRNA of the invention will result in improved therapeutic efficacy due at least in part to the specificity, purity and selectivity of the construct designs.

[0097] The oncology-related polynucleotides, oncology-related primary constructs and/or oncology-related mmRNA may alter a biological and/or physiolocial process and/or compound such as, but not limited to, the cell cycle, the DNA damage response (e.g., DNA damage repair), apoptosis, angiogenesis, cell motility, the epithelial to mesenchymal transition in epithelial cells, the phosphatidyl inositol 3 (PI3) kinase/Akt cellular signaling pathway, telomerase activity and/or expression, tumor metastasis, tumorigenesis, cathepsins, cell senescence, receptor tyrosine kinase signaling, metabolism and drug metabolism, G protein signaling, growth factors and receptors, heat shock proteins, histone deacetylases, hormone receptors, hypoxia, poly ADP-ribose polymerases, protein kinases, RAS signaling, topisomerases, transcription factors and tumor suppressor activity in cancerous, precancerous and/or other cells.

[0098] In one embodiment, the polynucleotides, oncology-related primary constructs and/or oncology-related mmRNA may used to express a polypeptide in cells or tissues for the purpose of replacing the protein produced from a deleted or mutated gene.

[0099] Further, the oncology-related polynucleotides, oncology-related primary constructs or oncology-related mmRNA of the invention may be used to treat cancer which has been caused by carcinogens of natural and/or synthetic origin. In another embodiment, the use of the oncology-related polynucleotides, oncology-related primary constructs and/or oncology-related mmRNA may be used to treat cancer caused by other organisms and/or cancers caused by viral infection.

### Flanking Regions: Untranslated Regions (UTRs)

[0100] Untranslated regions (UTRs) of a gene are transcribed but not translated. The 5′UTR starts at the transcription start site and continues to the start codon but does not include the start codon; whereas, the 3′UTR starts immediately following the stop codon and continues until the transcriptional termination signal. There is growing body of evidence about the regulatory roles played by the UTRs in terms of stability of the nucleic acid molecule and translation. The regulatory features of a UTR can be incorporated into the oncology-related polynucleotides, oncology-related primary constructs and/or oncology-related mmRNA of the present invention to enhance the stability of the molecule. The specific features can also be incorporated to ensure controlled down-regulation of the transcript in case they are misdirected to undesired organs sites.

### 5′ UTR and Translation Initiation

[0101] Natural 5′UTRs bear features which play roles in for translation initiation. They harbor signatures like Kozak sequences which are commonly known to be involved in the process by which the ribosome initiates translation of many genes. Kozak sequences have the consensus CCR(A/G)CCAUGG, where R is a purine (adenine or guanine) three bases upstream of the start codon (AUG), which is followed by another ‘G’. 5′UTR also have been known to form secondary structures which are involved in elongation factor binding.

[0102] By engineering the features typically found in abundantly expressed genes of specific target organs, one can enhance the stability and oncology-related protein production of the oncology-related polynucleotides, oncology-related primary constructs or oncology-related mmRNA of the invention. For example, introduction of 5′ UTR of liver-expressed mRNA, such as albumin, serum amyloid A, Apolipoprotein A/B/E, transferrin, alpha fetoprotein, erythropoietin, or Factor VIII, could be used to enhance expression of a nucleic acid molecule, such as a mmRNA, in hepatic cell lines or liver. Likewise, use of 5′ UTR from other tissue-specific mRNA to improve expression in that tissue is possible—for muscle (MyoD, Myosin, Myoglobin, Myogenin, Herculin), for endothelial cells (Tie-1, CD36), for myeloid cells (C/EBP, AML1, G-CSF, GM-CSF, CD11b, MSR, Fr-1, i-NOS), for leukocytes (CD45, CD18), for adipose tissue (CD36, GLUT4, ACRP30, adiponectin) and for lung epithelial cells (SP-A/B/C/D).

[0103] Other non-UTR sequences may be incorporated into the 5′ (or 3′ UTR) UTRs. For example, introns or portions of introns sequences may be incorporated into the flanking regions of the oncology-related polynucleotides, oncology-related primary constructs or oncology-related mmRNA of the invention. Incorporation of intronic sequences may increase protein production as well as mRNA levels.

### 3′ UTR and the AU Rich Elements

[0104] 3′UTRs are known to have stretches of Adenosines and Uridines embedded in them. These AU rich signatures are particularly prevalent in genes with high rates of turnover. Based on their sequence features and functional properties, the AU rich elements (AREs) can be separated into three classes (Chen et al, 1995): Class I AREs contain several dispersed copies of an AUUUA motif within U-rich regions. C-Myc and MyoD contain class I AREs. Class II AREs possess two or more overlapping UUAUUUA(U/A)(U/A) nonamers. Molecules containing this type of AREs include GM-CSF and TNF-a. Class III ARES are less well defined. These U rich regions do not contain an AUUUA motif. c-Jun and Myogenin are two well-studied examples of this class. Most proteins binding to the AREs are known to destabilize the messenger, whereas members of the ELAV family, most notably HuR, have been documented to increase the stability of mRNA. HuR binds to AREs of all the three classes. Engineering the HuR specific binding sites into the 3′ UTR of nucleic acid molecules will lead to HuR binding and thus, stabilization of the message in vivo.

[0105] Introduction, removal or modification of 3′ UTR AU rich elements (AREs) can be used to modulate the stability of oncology-related polynucleotides, oncology-related primary constructs or oncology-related mmRNA of the invention. When engineering specific oncology-related polynucleotides, oncology-related primary constructs or oncology-related mmRNA, one or more copies of an ARE can be introduced to make oncology-related polynucleotides, oncology-related primary constructs or oncology-related mmRNA of the invention less stable and thereby curtail translation and decrease production of the resultant protein. Likewise, AREs can be identified and removed or mutated to increase the intracellular stability and thus increase translation and production of the resultant protein. Transfection experiments can be conducted in relevant cell lines, using oncology-related polynucleotides, oncology-related primary constructs or oncology-related mmRNA of the invention and protein production can be assayed at various time points post-transfection. For example, cells can be transfected with different ARE-engineering molecules and by using an ELISA kit to the relevant protein and assaying protein produced at 6 hour, 12 hour, 24 hour, 48 hour, and 7 days post-transfection.

Incorporating microRNA Binding Sites

[0106] microRNAs (or miRNA) are 19-25 nucleotide long noncoding RNAs that bind to the 3′UTR of nucleic acid molecules and down-regulate gene expression either by reducing nucleic acid molecule stability or by inhibiting translation. The oncology-related polynucleotides, oncology-related primary constructs or oncology-related mmRNA of the invention may comprise one or more microRNA target sequences, microRNA sequences, or microRNA seeds. Such sequences may correspond to any known microRNA such as those taught in US Publication US2005/0261218 and US Publication US2005/0059005, the contents of which are incorporated herein by reference in their entirety.

[0107] A microRNA sequence comprises a “seed” region, i.e., a sequence in the region of positions 2-8 of the mature microRNA, which sequence has perfect Watson-Crick complementarity to the miRNA target sequence. A microRNA seed may comprise positions 2-8 or 2-7 of the mature microRNA. In some embodiments, a microRNA seed may comprise 7 nucleotides (e.g., nucleotides 2-8 of the mature microRNA), wherein the seed-complementary site in the corresponding miRNA target is flanked by an adenine (A) opposed to microRNA position 1. In some embodiments, a microRNA seed may comprise 6 nucleotides (e.g., nucleotides 2-7 of the mature microRNA), wherein the seed-complementary site in the corresponding miRNA target is flanked byan adenine (A) opposed to microRNA position 1. See for example, Grimson A, Farh K K, Johnston W K, Garrett-Engele P, Lim L P, Bartel D P; Mol Cell. 2007 Jul. 6; 27(1):91-105; each of which is herein incorporated by reference in their entirety. The bases of the microRNA seed have complete complementarity with the target sequence. By engineering microRNA target sequences into the 3′UTR of oncology-related polynucleotides, oncology-related primary constructs or oncology-related mmRNA of the invention one can target the molecule for degradation or reduced translation, provided the microRNA in question is available. This process will reduce the hazard of off target effects upon nucleic acid molecule delivery. Identification of microRNA, microRNA target regions, and their expression patterns and role in biology have been reported (Bonauer et al., Curr Drug Targets 2010 11:943-949; Anand and Cheresh Curr Opin Hematol 2011 18:171-176; Contreras and Rao Leukemia 2012 26:404-413 (2011 Dec. 20. doi: 10.1038/leu.2011.356); Bartel Cell 2009 136:215-233; Landgraf et al, Cell, 2007 129:1401-1414; each of which is herein incorporated by reference in their entirety).

[0108] For example, if the nucleic acid molecule is an mRNA and is not intended to be delivered to the liver but ends up there, then miR-122, a microRNA abundant in liver, can inhibit the expression of the gene of interest if one or multiple target sites of miR-122 are engineered into the 3′UTR of the oncology-related polynucleotides, oncology-related primary constructs or oncology-related mmRNA. Introduction of one or multiple binding sites for different microRNA can be engineered to further decrease the longevity, stability, and protein translation of oncology-related polynucleotides, oncology-related primary constructs or oncology-related mmRNA. As used herein, the term “microRNA site” refers to a microRNA target site or a microRNA recognition site, or any nucleotide sequence to which a microRNA binds or associates. It should be understood that “binding” may follow traditional Watson-Crick hybridization rules or may reflect any stable association of the microRNA with the target sequence at or adjacent to the microRNA site.

[0109] Conversely, for the purposes of the oncology-related polynucleotides, oncology-related primary constructs or oncology-related mmRNA of the present invention, microRNA binding sites can be engineered out of (i.e. removed from) sequences in which they naturally occur in order to increase protein expression in specific tissues. For example, miR-122 binding sites may be removed to improve protein expression in the liver. Regulation of expression in multiple tissues can be accomplished through introduction or removal or one or several microRNA binding sites.

[0110] Examples of tissues where microRNA are known to regulate mRNA, and thereby protein expression, include, but are not limited to, liver (miR-122), muscle (miR-133, miR-206, miR-208), endothelial cells (miR-17-92, miR-126), myeloid cells (miR-142-3p, miR-142-5p, miR-16, miR-21, miR-223, miR-24, miR-27), adipose tissue (let-7, miR-30c), heart (miR-1d, miR-149), kidney (miR-192, miR-194, miR-204), and lung epithelial cells (let-7, miR-133, miR-126). MicroRNA can also regulate complex biological processes such as angiogenesis (miR-132) (Anand and Cheresh Curr Opin Hematol 2011 18:171-176; herein incorporated by reference in its entirety). In the oncology-related polynucleotides, oncology-related primary constructs or oncology-related mmRNA of the present invention, binding sites for microRNAs that are involved in such processes may be removed or introduced, in order to tailor the expression of the oncology-related polynucleotides, oncology-related primary constructs or oncology-related mmRNA expression to biologically relevant cell types or to the context of relevant biological processes. A listing of MicroRNA, miR sequences and miR binding sites is listed in Table 9 of U.S. Provisional Application No. 61/753,661 filed Jan. 17, 2013, in Table 9 of U.S. Provisional Application No. 61/754,159 filed Jan. 18, 2013, and in Table 7 of U.S. Provisional Application No. 61/758,921 filed Jan. 31, 2013, each of which are herein incorporated by reference in their entireties.

[0111] Lastly, through an understanding of the expression patterns of microRNA in different oncology-related cell types, oncology-related polynucleotides, oncology-related primary constructs or oncology-related mmRNA can be engineered for more targeted expression in specific cell types or only under specific biological conditions. Through introduction of tissue-specific microRNA binding sites, oncology-related polynucleotides, oncology-related primary constructs or oncology-related mmRNA could be designed that would be optimal for oncology-related protein expression in a tissue or in the context of a biological condition. Examples of use of microRNA to drive tissue or disease-specific gene expression are listed (Getner and Naldini, Tissue Antigens. 2012, 80:393-403; herein incorporated by reference in its entirety). In addition, microRNA seed sites can be incorporated into mRNA to decrease expression in certain cells which results in a biological improvement. An example of this is incorporation of miR-142 sites into a UGT1A1-expressing lentiviral vector. The presence of miR-142 seed sites reduced expression in hematopoietic cells, and as a consequence reduced expression in antigen-presentating cells, leading to the absence of an immune response against the virally expressed UGT1A1 (Schmitt et al., Gastroenterology 2010; 139:999-1007; Gonzalez-Asequinolaza et al. Gastroenterology 2010, 139:726-729; each of which are herein incorporated by reference in their entirety). Incorporation of miR-142 sites into modified mRNA could not only reduce expression of the encoded protein in hematopoietic cells, but could also reduce or abolish immune responses to the mRNA-encoded protein. Incorporation of miR-142 seed sites (one or multiple) into mRNA would be important in the case of treatment of patients with complete protein deficiencies such as, but not limited to, UGT1A1 type I, LDLR-deficient patients abd CRIM-negative Pompe patients.

[0112] Transfection experiments can be conducted in relevant cell lines, using engineered oncology-related polynucleotides, oncology-related primary constructs or oncology-related mmRNA and protein production can be assayed at various time points post-transfection. For example, cells can be transfected with different microRNA binding site-engineering oncology-related polynucleotides, oncology-related primary constructs or oncology-related mmRNA and by using an ELISA kit to the relevant protein and assaying protein produced at 6 hour, 12 hour, 24 hour, 48 hour, 72 hour and 7 days post-transfection. In vivo experiments can also be conducted using microRNA-binding site-engineered molecules to examine changes in tissue-specific expression of formulated oncology-related polynucleotides, oncology-related primary constructs or oncology-related mmRNA.

### 5′ Capping

[0113] The 5′ cap structure of an mRNA is involved in nuclear export, increasing mRNA stability and binds the mRNA Cap Binding Protein (CBP), which is responsible for mRNA stability in the cell and translation competency through the association of CBP with poly(A) binding protein to form the mature cyclic mRNA species. The cap further assists the removal of 5′ proximal introns removal during mRNA splicing.

[0114] Endogenous mRNA molecules may be 5′-end capped generating a 5′-ppp-5′-triphosphate linkage between a terminal guanosine cap residue and the 5′-terminal transcribed sense nucleotide of the mRNA molecule. This 5′-guanylate cap may then be methylated to generate an N7-methyl-guanylate residue. The ribose sugars of the terminal and/or anteterminal transcribed nucleotides of the 5′ end of the mRNA may optionally also be 2′-O-methylated. 5′-decapping through hydrolysis and cleavage of the guanylate cap structure may target a nucleic acid molecule, such as an mRNA molecule, for degradation.

[0115] Modifications to the oncology-related polynucleotides, oncology-related primary constructs, and oncology-related mmRNA of the present invention may generate a non-hydrolyzable cap structure preventing decapping and thus increasing mRNA half-life. Because cap structure hydrolysis requires cleavage of 5′-ppp-5′ phosphorodiester linkages, modified nucleotides may be used during the capping reaction. For example, a Vaccinia Capping Enzyme from New England Biolabs (Ipswich, MA) may be used with α-thio-guanosine nucleotides according to the manufacturer's instructions to create a phosphorothioate linkage in the 5′-ppp-5′ cap. Additional modified guanosine nucleotides may be used such as α-methyl-phosphonate and seleno-phosphate nucleotides.

[0116] Additional modifications include, but are not limited to, 2′-O-methylation of the ribose sugars of 5′-terminal and/or 5′-anteterminal nucleotides of the mRNA (as mentioned above) on the 2′-hydroxyl group of the sugar ring. Multiple distinct 5′-cap structures can be used to generate the 5′-cap of a nucleic acid molecule, such as an mRNA molecule.

[0117] Cap analogs, which herein are also referred to as synthetic cap analogs, chemical caps, chemical cap analogs, or structural or functional cap analogs, differ from natural (i.e. endogenous, wild-type or physiological) 5′-caps in their chemical structure, while retaining cap function. Cap analogs may be chemically (i.e. non-enzymatically) or enzymatically synthesized and/or linked to a nucleic acid molecule.

[0118] For example, the Anti-Reverse Cap Analog (ARCA) cap contains two guanines linked by a 5′-5′-triphosphate group, wherein one guanine contains an N7 methyl group as well as a 3′-O-methyl group (i.e., N7,3′-O-dimethyl-guanosine-5′-triphosphate-5′-guanosine (m⁷G-3′mppp-G; which may equivalently be designated 3′ O-Me-m7G(5′)ppp(5′)G). The 3′-O atom of the other, unmodified, guanine becomes linked to the 5′-terminal nucleotide of the capped nucleic acid molecule (e.g. an mRNA or mmRNA). The N7- and 3′-O-methylated guanine provides the terminal moiety of the capped nucleic acid molecule (e.g. mRNA or mmRNA).

[0119] Another exemplary cap is mCAP, which is similar to ARCA but has a 2′-O-methyl group on guanosine (i.e., N7,2′-O-dimethyl-guanosine-5′-triphosphate-5′-guanosine, m⁷Gm-ppp-G).

[0120] While cap analogs allow for the concomitant capping of a nucleic acid molecule in an in vitro transcription reaction, up to 20% of transcripts can remain uncapped. This, as well as the structural differences of a cap analog from an endogenous 5′-cap structures of nucleic acids produced by the endogenous, cellular transcription machinery, may lead to reduced translational competency and reduced cellular stability.

[0121] Oncology-related polynucleotides, oncology-related primary constructs and oncology-related mmRNA of the invention may also be capped post-transcriptionally, using enzymes, in order to generate more authentic 5′-cap structures. As used herein, the phrase “more authentic” refers to a feature that closely mirrors or mimics, either structurally or functionally, an endogenous or wild type feature. That is, a “more authentic” feature is better representative of an endogenous, wild-type, natural or physiological cellular function and/or structure as compared to synthetic features or analogs, etc., of the prior art, or which outperforms the corresponding endogenous, wild-type, natural or physiological feature in one or more respects. Non-limiting examples of more authentic 5′cap structures of the present invention are those which, among other things, have enhanced binding of cap binding proteins, increased half life, reduced susceptibility to 5′ endonucleases and/or reduced 5′decapping, as compared to synthetic 5′cap structures known in the art (or to a wild-type, natural or physiological 5′cap structure). For example, recombinant Vaccinia Virus Capping Enzyme and recombinant 2′-O-methyltransferase enzyme can create a canonical 5′-5′-triphosphate linkage between the 5′-terminal nucleotide of an mRNA and a guanine cap nucleotide wherein the cap guanine contains an N7 methylation and the 5′-terminal nucleotide of the mRNA contains a 2′-O-methyl. Such a structure is termed the Cap1 structure. This cap results in a higher translational-competency and cellular stability and a reduced activation of cellular pro-inflammatory cytokines, as compared, e.g., to other 5′cap analog structures known in the art. Cap structures include, but are not limited to, 7mG(5′)ppp(5′)N,pN2p (cap 0), 7mG(5′)ppp(5′)NlmpNp (cap 1), and 7mG(5′)-ppp(5′)NlmpN2mp (cap 2).

[0122] Because the oncology-related polynucleotides, oncology-related primary constructs or oncology-related mmRNA may be capped post-transcriptionally, and because this process is more efficient, nearly 100% of the oncology-related polynucleotides, oncology-related primary constructs or oncology-related mmRNA may be capped. This is in contrast to ˜80% when a cap analog is linked to an mRNA in the course of an in vitro transcription reaction.

[0123] According to the present invention, 5′ terminal caps may include endogenous caps or cap analogs. According to the present invention, a 5′ terminal cap may comprise a guanine analog. Useful guanine analogs include, but are not limited to, inosine, N1-methyl-guanosine, 2′fluoro-guanosine, 7-deaza-guanosine, 8-oxo-guanosine, 2-amino-guanosine, LNA-guanosine, and 2-azido-guanosine.

### Viral Sequences

[0124] Additional viral sequences such as, but not limited to, the translation enhancer sequence of the barley yellow dwarf virus (BYDV-PAV), the Jaagsiekte sheep retrovirus (JSRV) and/or the Enzootic nasal tumor virus (See e.g., International Pub. No. WO2012129648; herein incorporated by reference in its entirety) can be engineered and inserted in the 3′ UTR of the oncology-related polynucleotides, oncology-related primary constructs or oncology-related mmRNA of the invention and can stimulate the translation of the construct in vitro and in vivo. Transfection experiments can be conducted in relevant cell lines at and protein production can be assayed by ELISA at 12 hr, 24 hr, 48 hr, 72 hr and day 7 post-transfection.

### IRES Sequences

[0125] Further, provided are oncology-related polynucleotides, oncology-related primary constructs or oncology-related mmRNA which may contain an internal ribosome entry site (IRES). First identified as a feature Picorna virus RNA, IRES plays an important role in initiating protein synthesis in absence of the 5′ cap structure. An IRES may act as the sole ribosome binding site, or may serve as one of multiple ribosome binding sites of an mRNA. Oncology-related polynucleotides, oncology-related primary constructs or oncology-related mmRNA containing more than one functional ribosome binding site may encode several oncology-related peptides or oncology-related polypeptides that are translated independently by the ribosomes (“multicistronic nucleic acid molecules”). When oncology-related polynucleotides, oncology-related primary constructs or oncology-related mmRNA are provided with an IRES, further optionally provided is a second translatable region. Examples of IRES sequences that can be used according to the invention include without limitation, those from picornaviruses (e.g. FMDV), pest viruses (CFFV), polio viruses (PV), encephalomyocarditis viruses (ECMV), foot-and-mouth disease viruses (FMDV), hepatitis C viruses (HCV), classical swine fever viruses (CSFV), murine leukemia virus (MLV), simian immune deficiency viruses (SIV) or cricket paralysis viruses (CrPV).

### Poly-A Tails

[0126] During RNA processing, a long chain of adenine nucleotides (poly-A tail) may be added to a polynucleotide such as an mRNA molecule in order to increase stability. Immediately after transcription, the 3′ end of the transcript may be cleaved to free a 3′ hydroxyl. Then poly-A polymerase adds a chain of adenine nucleotides to the RNA. The process, called polyadenylation, adds a poly-A tail that can be between, for example, approximately 100 and 250 residues long.

[0127] It has been discovered that unique poly-A tail lengths provide certain advantages to the oncology-related polynucleotides, oncology-related primary constructs or oncology-related mmRNA of the present invention.

[0128] Generally, the length of a poly-A tail of the present invention is greater than 30 nucleotides in length. In another embodiment, the poly-A tail is greater than 35 nucleotides in length (e.g., at least or greater than about 35, 40, 45, 50, 55, 60, 70, 80, 90, 100, 120, 140, 160, 180, 200, 250, 300, 350, 400, 450, 500, 600, 700, 800, 900, 1,000, 1,100, 1,200, 1,300, 1,400, 1,500, 1,600, 1,700, 1,800, 1,900, 2,000, 2,500, and 3,000 nucleotides). In some embodiments, the oncology-related polynucleotide, oncology-related primary construct, or oncology-related mmRNA includes from about 30 to about 3,000 nucleotides (e.g., from 30 to 50, from 30 to 100, from 30 to 250, from 30 to 500, from 30 to 750, from 30 to 1,000, from 30 to 1,500, from 30 to 2,000, from 30 to 2,500, from 50 to 100, from 50 to 250, from 50 to 500, from 50 to 750, from 50 to 1,000, from 50 to 1,500, from 50 to 2,000, from 50 to 2,500, from 50 to 3,000, from 100 to 500, from 100 to 750, from 100 to 1,000, from 100 to 1,500, from 100 to 2,000, from 100 to 2,500, from 100 to 3,000, from 500 to 750, from 500 to 1,000, from 500 to 1,500, from 500 to 2,000, from 500 to 2,500, from 500 to 3,000, from 1,000 to 1,500, from 1,000 to 2,000, from 1,000 to 2,500, from 1,000 to 3,000, from 1,500 to 2,000, from 1,500 to 2,500, from 1,500 to 3,000, from 2,000 to 3,000, from 2,000 to 2,500, and from 2,500 to 3,000).

[0129] In one embodiment, the poly-A tail is designed relative to the length of the overall oncology-related polynucleotides, oncology-related primary constructs or oncology-related mmRNA. This design may be based on the length of the coding region, the length of a particular feature or region (such as the first or flanking regions), or based on the length of the ultimate product expressed from the oncology-related polynucleotides, oncology-related primary constructs or oncology-related mmRNA.

[0130] In this context the poly-A tail may be 10, 20, 30, 40, 50, 60, 70, 80, 90, or 100% greater in length than the oncology-related polynucleotides, oncology-related primary constructs or oncology-related mmRNA or feature thereof. The poly-A tail may also be designed as a fraction of oncology-related polynucleotides, oncology-related primary constructs or oncology-related mmRNA to which it belongs. In this context, the poly-A tail may be 10, 20, 30, 40, 50, 60, 70, 80, or 90% or more of the total length of the construct or the total length of the construct minus the poly-A tail. Further, engineered binding sites and conjugation of oncology-related polynucleotides, oncology-related primary constructs or oncology-related mmRNA for Poly-A binding protein may enhance expression.

[0131] Additionally, multiple distinct oncology-related polynucleotides, oncology-related primary constructs or oncology-related mmRNA may be linked together to the PABP (Poly-A binding protein) through the 3′-end using modified nucleotides at the 3′-terminus of the poly-A tail. Transfection experiments can be conducted in relevant cell lines and oncology-related protein production can be assayed by ELISA at 12 hr, 24 hr, 48 hr, 72 hr and day 7 post-transfection.

[0132] In one embodiment, the oncology-related polynucleotide and oncology-related primary constructs of the present invention are designed to include a polyA-G Quartet. The G-quartet is a cyclic hydrogen bonded array of four guanine nucleotides that can be formed by G-rich sequences in both DNA and RNA. In this embodiment, the G-quartet is incorporated at the end of the poly-A tail. The resultant oncology-related mmRNA construct is assayed for stability, protein production and other parameters including half-life at various time points. It has been discovered that the polyA-G quartet results in protein production equivalent to at least 75% of that seen using a poly-A tail of 120 nucleotides alone.

### Quantification

[0133] In one embodiment, the oncology-related polynucleotides, oncology-related primary constructs or oncology-related mmRNA of the present invention may be quantified in exosomes derived from one or more bodily fluid. As used herein “bodily fluids” include peripheral blood, serum, plasma, ascites, urine, cerebrospinal fluid (CSF), sputum, saliva, bone marrow, synovial fluid, aqueous humor, amniotic fluid, cerumen, breast milk, broncheoalveolar lavage fluid, semen, prostatic fluid, cowper's fluid or pre-ejaculatory fluid, sweat, fecal matter, hair, tears, cyst fluid, pleural and peritoneal fluid, pericardial fluid, lymph, chyme, chyle, bile, interstitial fluid, menses, pus, sebum, vomit, vaginal secretions, mucosal secretion, stool water, pancreatic juice, lavage fluids from sinus cavities, bronchopulmonary aspirates, blastocyl cavity fluid, and umbilical cord blood. Alternatively, exosomes may be retrieved from an organ selected from the group consisting of lung, heart, pancreas, stomach, intestine, bladder, kidney, ovary, testis, skin, colon, breast, prostate, brain, esophagus, liver, and placenta.

[0134] In the quantification method, a sample of not more than 2 mL is obtained from the subject and the exosomes isolated by size exclusion chromatography, density gradient centrifugation, differential centrifugation, nanomembrane ultrafiltration, immunoabsorbent capture, affinity purification, microfluidic separation, or combinations thereof. In the analysis, the level or concentration of an oncology-related polynucleotide, oncology-related primary construct or oncology-related mmRNA may be an expression level, presence, absence, truncation or alteration of the administered construct. It is advantageous to correlate the level with one or more clinical phenotypes or with an assay for a human disease biomarker. The assay may be performed using construct specific probes, cytometry, qRT-PCR, real-time PCR, PCR, flow cytometry, electrophoresis, mass spectrometry, or combinations thereof while the exosomes may be isolated using immunohistochemical methods such as enzyme linked immunosorbent assay (ELISA) methods. Exosomes may also be isolated by size exclusion chromatography, density gradient centrifugation, differential centrifugation, nanomembrane ultrafiltration, immunoabsorbent capture, affinity purification, microfluidic separation, or combinations thereof.

[0135] These methods afford the investigator the ability to monitor, in real time, the level of oncology-related polynucleotides, oncology-related primary constructs or oncology-related mmRNA remaining or delivered. This is possible because the oncology-related polynucleotides, oncology-related primary constructs or oncology-related mmRNA of the present invention differ from the endogenous forms due to the structural and/or chemical modifications.

### II. Design and Synthesis of mmRNA

[0136] Oncology-related polynucleotides, oncology-related primary constructs or oncology-related mmRNA for use in accordance with the invention may be prepared according to any available technique including, but not limited to chemical synthesis, enzymatic synthesis, which is generally termed in vitro transcription (IVT) or enzymatic or chemical cleavage of a longer precursor, etc. Methods of synthesizing RNAs are known in the art (see, e.g., Gait, M. J. (ed.) Oligonucleotide synthesis: a practical approach, Oxford [Oxfordshire], Washington, DC: TRL Press, 1984; and Herdewijn, P. (ed.) Oligonucleotide synthesis: methods and applications, Methods in Molecular Biology, v. 288 (Clifton, N.J.) Totowa, N.J.: Humana Press, 2005; both of which are incorporated herein by reference).

[0137] The process of design and synthesis of the oncology-related primary constructs of the invention generally includes the steps of gene construction, mRNA production (either with or without modifications) and purification. In the enzymatic synthesis method, a target oncology-related polynucleotide sequence encoding the oncology-related polypeptide of interest is first selected for incorporation into a vector which will be amplified to produce a cDNA template. Optionally, the target oncology-related polynucleotide sequence and/or any flanking sequences may be codon optimized. The cDNA template is then used to produce mRNA through in vitro transcription (IVT). After production, the mRNA may undergo purification and clean-up processes. The steps of which are provided in more detail below.

### Gene Construction

[0138] The step of gene construction may include, but is not limited to gene synthesis, vector amplification, plasmid purification, plasmid linearization and clean-up, and cDNA template synthesis and clean-up.

### Gene Synthesis

[0139] Once an oncology-related polypeptide of interest, or target, is selected for production, an oncology-related primary construct is designed. Within the oncology-related primary construct, a first region of linked nucleosides encoding the polypeptide of interest may be constructed using an open reading frame (ORF) of a selected nucleic acid (DNA or RNA) transcript. The ORF may comprise the wild type ORF, an isoform, variant or a fragment thereof. As used herein, an “open reading frame” or “ORF” is meant to refer to a nucleic acid sequence (DNA or RNA) which is capable of encoding an oncology-related polypeptide of interest. ORFs often begin with the start codon, ATG and end with a nonsense or termination codon or signal.

[0140] Further, the nucleotide sequence of the first region may be codon optimized. Codon optimization methods are known in the art and may be useful in efforts to achieve one or more of several goals. These goals include to match codon frequencies in target and host organisms to ensure proper folding, bias GC content to increase mRNA stability or reduce secondary structures, minimize tandem repeat codons or base runs that may impair gene construction or expression, customize transcriptional and translational control regions, insert or remove protein trafficking sequences, remove/add post translation modification sites in encoded protein (e.g. glycosylation sites), add, remove or shuffle protein domains, insert or delete restriction sites, modify ribosome binding sites and mRNA degradation sites, to adjust translational rates to allow the various domains of the protein to fold properly, or to reduce or eliminate problem secondary structures within the mRNA. Codon optimization tools, algorithms and services are known in the art, non-limiting examples include services from GeneArt (Life Technologies), DNA2. (Menlo Park CA) and/or proprietary methods. In one embodiment, the ORF sequence is optimized using optimization algorithms. Codon options for each amino acid are given in Table 1.

TABLE 1
Codon Options

| | Single | |
|---|---|---|
| | Letter | |
| Amino Acid | Code | Codon Options |
| Isoleucine | I | ATT, ATC, ATA |
| Leucine | L | CTT, CTC, CTA, CTG, TTA, TTG |
| Valine | V | GTT, GTC, GTA, GTG |
| Phenylalanine | F | TTT, TTC |
| Methionine | M | ATG |
| Cysteine | C | TGT, TGC |
| Alanine | A | GCT, GCC, GCA, GCG |
| Glycine | G | GGT, GGC, GGA, GGG |
| Proline | P | CCT, CCC, CCA, CCG |
| Threonine | T | ACT, ACC, ACA, ACG |
| Serine | S | TCT, TCC, TCA, TCG, AGT, AGC |
| Tyrosine | Y | TAT, TAC |
| Tryptophan | W | TGG |
| Glutamine | Q | CAA, CAG |
| Asparagine | N | AAT, AAC |
| Histidine | H | CAT, CAC |
| Glutamic acid | E | GAA, GAG |
| Aspartic acid | D | GAT, GAC |
| Lysine | K | AAA, AAG |
| Arginine | R | CGT, CGC, CGA, CGG, AGA, AGG |
| Seleno- | Sec | UGA in mRNA in presence of |
| cysteine | | Selenocystein insertion |
| | | element (SECIS) |
| Stop codons | Stop | TAA, TAG, TGA |

[0141] Features, which may be considered beneficial in some embodiments of the present invention, may be encoded by the oncology-related primary construct and may flank the ORF as a first or second flanking region. The flanking regions may be incorporated into the oncology-related primary construct before and/or after optimization of the ORF. It is not required that an oncology-related primary construct contain both a 5′ and 3′ flanking region. Examples of such features include, but are not limited to, untranslated regions (UTRs), Kozak sequences, an oligo(dT) sequence, and detectable tags and may include multiple cloning sites which may have XbaI recognition.

[0142] In some embodiments, a 5′ UTR and/or a 3′ UTR may be provided as flanking regions. Multiple 5′ or 3′ UTRs may be included in the flanking regions and may be the same or of different sequences. Any portion of the flanking regions, including none, may be codon optimized and any may independently contain one or more different structural or chemical modifications, before and/or after codon optimization. Combinations of features may be included in the first and second flanking regions and may be contained within other features. For example, the ORF may be flanked by a 5′ UTR which may contain a strong Kozak translational initiation signal and/or a 3′ UTR which may include an oligo(dT) sequence for templated addition of a poly-A tail. The 5′UTR may comprise a first polynucleotide fragment and a second polynucleotide fragment from the same and/or different genes such as the 5′UTRs described in US Patent Application Publication No. 20100293625, herein incorporated by reference in its entirety.

[0143] Tables 2 and 3 provide a listing of exemplary UTRs which may be utilized in the oncology-related primary construct of the present invention as flanking regions. Shown in Table 2 is a listing of a 5′-untranslated region of the invention. Variants of 5′ UTRs may be utilized wherein one or more nucleotides are added or removed to the termini, including A, T, C or G.

TABLE 2
5′-Untranslated Regions

| 5′ | | | |
|---|---|---|---|
| UTR | | | SEQ |
| Identi- | Name/ | | ID |
| fier | Description | Sequence | NO. |
| 5UTR- | Upstream UTR | GGGAAATAAGAGAGAAAAGAAGAG | 1 |
| 001 | | TAAGAAGAAATATAAGAGCCACC | |
| 5UTR- | Upstream UTR | GGGAGATCAGAGAGAAAAGAAGAG | 2 |
| 002 | | TAAGAAGAAATATAAGAGCCACC | |
| 5UTR- | Upstream UTR | GGAATAAAAGTCTCAACACAACAT | 3 |
| 003 | | ATACAAAACAAACGAATCTCAAGC | |
| | | AATCAAGCATTCTACTTCTATTGC | |
| | | AGCAATTTAAATCATTTCTTTTAA | |
| | | AGCAAAAGCAATTTTCTGAAAATT | |
| | | TTCACCATTTACGAACGATAGCAA | |
| | | C | |
| 5UTR- | Upstream UTR | GGGAGACAAGCUUGGCAUUCCGGU | 4 |
| 004 | | ACUGUUGGUAAAGCCACC | |

[0144] Shown in Table 3 is a representative listing of Y-untranslated regions of the invention. Variants of 3′ UTRs may be utilized wherein one or more nucleotides are added or removed to the termini, including A, T, C or G.

TABLE 3
3′-Untranslated Regions

| 3′ UTR | | | SEQ |
|---|---|---|---|
| Identi- | Name/ | | ID |
| fier | Description | Sequence | NO. |
| 3UTR- | Creatine | GCGCCTGCCCACCTGCCACCGACTGCTGGAA | 5 |
| 001 | Kinase | CCCAGCCAGTGGGAGGGCCTGGCCCACCAGA | |
| | | GTCCTGCTCCCTCACTCCTCGCCCCGCCCCCT | |
| | | GTCCCAGAGTCCCACCTGGGGGCTCTCTCCA | |
| | | CCCTTCTCAGAGTTCCAGTTTCAACCAGAGTT | |
| | | CCAACCAATGGGCTCCATCCTCTGGATTCTG | |
| | | GCCAATGAAATATCTCCCTGGCAGGGTCCTC | |
| | | TTCTTTTCCCAGAGCTCCACCCCAACCAGGA | |
| | | GCTCTAGTTAATGGAGAGCTCCCAGCACACT | |
| | | CGGAGCTTGTGCTTTGTCTCCACGCAAAGCG | |
| | | ATAAATAAAAGCATTGGTGGCCTTTGGTCTT | |
| | | TGAATAAAGCCTGAGTAGGAAGTCTAGA | |
| 3UTR- | Myoglobin | GCCCCTGCCGCTCCCACCCCCACCCATCTGG | 6 |
| 002 | | GCCCCGGGTTCAAGAGAGAGCGGGGTCTGAT | |
| | | CTCGTGTAGCCATATAGAGTTTGCTTCTGAGT | |
| | | GTCTGCTTTGTTTAGTAGAGGTGGGCAGGAG | |
| | | GAGCTGAGGGGCTGGGGCTGGGGTGTTGAA | |
| | | GTTGGCTTTGCATGCCCAGCGATGCGCCTCC | |
| | | CTGTGGGATGTCATCACCCTGGGAACCGGGA | |
| | | GTGGCCCTTGGCTCACTGTGTTCTGCATGGTT | |
| | | TGGATCTGAATTAATTGTCCTTTCTTCTAAAT | |
| | | CCCAACCGAACTTCTTCCAACCTCCAAACTG | |
| | | GCTGTAACCCCAAATCCAAGCCATTAACTAC | |
| | | ACCTGACAGTAGCAATTGTCTGATTAATCAC | |
| | | TGGCCCCTTGAAGACAGCAGAATGTCCCTTT | |
| | | GCAATGAGGAGGAGATCTGGGCTGGGCGGG | |
| | | CCAGCTGGGGAAGCATTTGACTATCTGGAAC | |
| | | TTGTGTGTGCCTCCTCAGGTATGGCAGTGACT | |
| | | CACCTGGTTTTAATAAAACAACCTGCAACAT | |
| | | CTCATGGTCTTTGAATAAAGCCTGAGTAGGA | |
| | | AGTCTAGA | |
| 3UTR- | α-actin | ACACACTCCACCTCCAGCACGCGACTTCTCA | 7 |
| 003 | | GGACGACGAATCTTCTCAATGGGGGGGCGGC | |
| | | TGAGCTCCAGCCACCCCGCAGTCACTTTCTTT | |
| | | GTAACAACTTCCGTTGCTGCCATCGTAAACT | |
| | | GACACAGTGTTTATAACGTGTACATACATTA | |
| | | ACTTATTACCTCATTTTGTTATTTTTCGAAAC | |
| | | AAAGCCCTGTGGAAGAAAATGGAAAACTTG | |
| | | AAGAAGCATTAAAGTCATTCTGTTAAGCTGC | |
| | | GTAAATGGTCTTTGAATAAAGCCTGAGTAGG | |
| | | AAGTCTAGA | |
| 3UTR- | Albumin | CATCACATTTAAAAGCATCTCAGCCTACCAT | 8 |
| 004 | | GAGAATAAGAGAAAGAAAATGAAGATCAAA | |
| | | AGCTTATTCATCTGTTTTTCTTTTTCGTTGGTG | |
| | | TAAAGCCAACACCCTGTCTAAAAAACATAAA | |
| | | TTTCTTTAATCATTTTGCCTCTTTTCTCTGTGC | |
| | | TTCAATTAATAAAAAATGGAAAGAATCTAAT | |
| | | AGAGTGGTACAGCACTGTTATTTTTCAAAGA | |
| | | TGTGTTGCTATCCTGAAAATTCTGTAGGTTCT | |
| | | GTGGAAGTTCCAGTGTTCTCTCTTATTCCACT | |
| | | TCGGTAGAGGATTTCTAGTTTCTTGTGGGCTA | |
| | | ATTAAATAAATCATTAATACTCTTCTAATGGT | |
| | | CTTTGAATAAAGCCTGAGTAGGAAGTCTAGA | |
| 3UTR- | α-globin | GCTGCCTTCTGCGGGGCTTGCCTTCTGGCCAT | 9 |
| 005 | | GCCCTTCTTCTCTCCCTTGCACCTGTACCTCT | |
| | | TGGTCTTTGAATAAAGCCTGAGTAGGAAGGC | |
| | | GGCCGCTCGAGCATGCATCTAGA | |
| 3UTR- | G-CSF | GCCAAGCCCTCCCCATCCCATGTATTTATCTC | 10 |
| 006 | | TATTTAATATTTATGTCTATTTAAGCCTCATA | |
| | | TTTAAAGACAGGGAAGAGCAGAACGGAGCC | |
| | | CCAGGCCTCTGTGTCCTTCCCTGCATTTCTGA | |
| | | GTTTCATTCTCCTGCCTGTAGCAGTGAGAAA | |
| | | AAGCTCCTGTCCTCCCATCCCCTGGACTGGG | |
| | | AGGTAGATAGGTAAATACCAAGTATTTATTA | |
| | | CTATGACTGCTCCCCAGCCCTGGCTCTGCAAT | |
| | | GGGCACTGGGATGAGCCGCTGTGAGCCCCTG | |
| | | GTCCTGAGGGTCCCCACCTGGGACCCTTGAG | |
| | | AGTATCAGGTCTCCCACGTGGGAGACAAGAA | |
| | | ATCCCTGTTTAATATTTAAACAGCAGTGTTCC | |
| | | CCATCTGGGTCCTTGCACCCCTCACTCTGGCC | |
| | | TCAGCCGACTGCACAGCGGCCCCTGCATCCC | |
| | | CTTGGCTGTGAGGCCCCTGGACAAGCAGAGG | |
| | | TGGCCAGAGCTGGGAGGCATGGCCCTGGGGT | |
| | | CCCACGAATTTGCTGGGGAATCTCGTTTTTCT | |
| | | TCTTAAGACTTTTGGGACATGGTTTGACTCCC | |
| | | GAACATCACCGACGCGTCTCCTGTTTTTCTGG | |
| | | GTGGCCTCGGGACACCTGCCCTGCCCCCACG | |
| | | AGGGTCAGGACTGTGACTCTTTTTAGGGCCA | |
| | | GGCAGGTGCCTGGACATTTGCCTTGCTGGAC | |
| | | GGGGACTGGGGATGTGGGAGGGAGCAGACA | |
| | | GGAGGAATCATGTCAGGCCTGTGTGTGAAAG | |
| | | GAAGCTCCACTGTCACCCTCCACCTCTTCACC | |
| | | CCCCACTCACCAGTGTCCCCTCCACTGTCACA | |
| | | TTGTAACTGAACTTCAGGATAATAAAGTGTT | |
| | | TGCCTCCATGGTCTTTGAATAAAGCCTGAGT | |
| | | AGGAAGGCGGCCGCTCGAGCATGCATCTAGA | |
| 3UTR- | Col1a2; | ACTCAATCTAAATTAAAAAAGAAAGAAATTT | 11 |
| 007 | collagen, type | GAAAAAACTTTCTCTTTGCCATTTCTTCTTCT | |
| | I, alpha 2 | TCTTTTTTAACTGAAAGCTGAATCCTTCCATT | |
| | | TCTTCTGCACATCTACTTGCTTAAATTGTGGG | |
| | | CAAAAGAGAAAAAGAAGGATTGATCAGAGC | |
| | | ATTGTGCAATACAGTTTCATTAACTCCTTCCC | |
| | | CCGCTCCCCCAAAAATTTGAATTTTTTTTTCA | |
| | | ACACTCTTACACCTGTTATGGAAAATGTCAA | |
| | | CCTTTGTAAGAAAACCAAAATAAAAATTGAA | |
| | | AAATAAAAACCATAAACATTTGCACCACTTG | |
| | | TGGCTTTTGAATATCTTCCACAGAGGGAAGT | |
| | | TTAAAACCCAAACTTCCAAAGGTTTAAACTA | |
| | | CCTCAAAACACTTTCCCATGAGTGTGATCCA | |
| | | CATTGTTAGGTGCTGACCTAGACAGAGATGA | |
| | | ACTGAGGTCCTTGTTTTGTTTTGTTCATAATA | |
| | | CAAAGGTGCTAATTAATAGTATTTCAGATAC | |
| | | TTGAAGAATGTTGATGGTGCTAGAAGAATTT | |
| | | GAGAAGAAATACTCCTGTATTGAGTTGTATC | |
| | | GTGTGGTGTATTTTTTAAAAAATTTGATTTAG | |
| | | CATTCATATTTTCCATCTTATTCCCAATTAAA | |
| | | AGTATGCAGATTATTTGCCCAAATCTTCTTCA | |
| | | GATTCAGCATTTGTTCTTTGCCAGTCTCATTT | |
| | | TCATCTTCTTCCATGGTTCCACAGAAGCTTTG | |
| | | TTTCTTGGGCAAGCAGAAAAATTAAATTGTA | |
| | | CCTATTTTGTATATGTGAGATGTTTAAATAAA | |
| | | TTGTGAAAAAAATGAAATAAAGCATGTTTGG | |
| | | TTTTCCAAAAGAACATAT | |
| 3UTR- | Col6a2; | CGCCGCCGCCCGGGCCCCGCAGTCGAGGGTC | 12 |
| 008 | collagen, type | GTGAGCCCACCCCGTCCATGGTGCTAAGCGG | |
| | VI, alpha 2 | GCCCGGGTCCCACACGGCCAGCACCGCTGCT | |
| | | CACTCGGACGACGCCCTGGGCCTGCACCTCT | |
| | | CCAGCTCCTCCCACGGGGTCCCCGTAGCCCC | |
| | | GGCCCCCGCCCAGCCCCAGGTCTCCCCAGGC | |
| | | CCTCCGCAGGCTGCCCGGCCTCCCTCCCCCTG | |
| | | CAGCCATCCCAAGGCTCCTGACCTACCTGGC | |
| | | CCCTGAGCTCTGGAGCAAGCCCTGACCCAAT | |
| | | AAAGGCTTTGAACCCAT | |
| 3UTR- | RPN1; | GGGGCTAGAGCCCTCTCCGCACAGCGTGGAG | 13 |
| 009 | ribophorin I | ACGGGGCAAGGAGGGGGGTTATTAGGATTG | |
| | | GTGGTTTTGTTTTGCTTTGTTTAAAGCCGTGG | |
| | | GAAAATGGCACAACTTTACCTCTGTGGGAGA | |
| | | TGCAACACTGAGAGCCAAGGGGTGGGAGTT | |
| | | GGGATAATTTTTATATAAAAGAAGTTTTTCC | |
| | | ACTTTGAATTGCTAAAAGTGGCATTTTTCCTA | |
| | | TGTGCAGTCACTCCTCTCATTTCTAAAATAGG | |
| | | GACGTGGCCAGGCACGGTGGCTCATGCCTGT | |
| | | AATCCCAGCACTTTGGGAGGCCGAGGCAGGC | |
| | | GGCTCACGAGGTCAGGAGATCGAGACTATCC | |
| | | TGGCTAACACGGTAAAACCCTGTCTCTACTA | |
| | | AAAGTACAAAAAATTAGCTGGGCGTGGTGGT | |
| | | GGGCACCTGTAGTCCCAGCTACTCGGGAGGC | |
| | | TGAGGCAGGAGAAAGGCATGAATCCAAGAG | |
| | | GCAGAGCTTGCAGTGAGCTGAGATCACGCCA | |
| | | TTGCACTCCAGCCTGGGCAACAGTGTTAAGA | |
| | | CTCTGTCTCAAATATAAATAAATAAATAAAT | |
| | | AAATAAATAAATAAATAAAAATAAAGCGAG | |
| | | ATGTTGCCCTCAAA | |
| 3UTR- | LRP1; low | GGCCCTGCCCCGTCGGACTGCCCCCAGAAAG | 14 |
| 010 | density | CCTCCTGCCCCCTGCCAGTGAAGTCCTTCAGT | |
| | lipoprotein | GAGCCCCTCCCCAGCCAGCCCTTCCCTGGCC | |
| | receptor- | CCGCCGGATGTATAAATGTAAAAATGAAGGA | |
| | related | ATTACATTTTATATGTGAGCGAGCAAGCCGG | |
| | protein 1 | CAAGCGAGCACAGTATTATTTCTCCATCCCCT | |
| | | CCCTGCCTGCTCCTTGGCACCCCCATGCTGCC | |
| | | TTCAGGGAGACAGGCAGGGAGGGCTTGGGG | |
| | | CTGCACCTCCTACCCTCCCACCAGAACGCAC | |
| | | CCCACTGGGAGAGCTGGTGGTGCAGCCTTCC | |
| | | CCTCCCTGTATAAGACACTTTGCCAAGGCTCT | |
| | | CCCCTCTCGCCCCATCCCTGCTTGCCCGCTCC | |
| | | CACAGCTTCCTGAGGGCTAATTCTGGGAAGG | |
| | | GAGAGTTCTTTGCTGCCCCTGTCTGGAAGAC | |
| | | GTGGCTCTGGGTGAGGTAGGCGGGAAAGGA | |
| | | TGGAGTGTTTTAGTTCTTGGGGGAGGCCACC | |
| | | CCAAACCCCAGCCCCAACTCCAGGGGCACCT | |
| | | ATGAGATGGCCATGCTCAACCCCCCTCCCAG | |
| | | ACAGGCCCTCCCTGTCTCCAGGGCCCCCACC | |
| | | GAGGTTCCCAGGGCTGGAGACTTCCTCTGGT | |
| | | AAACATTCCTCCAGCCTCCCCTCCCCTGGGG | |
| | | ACGCCAAGGAGGTGGGCCACACCCAGGAAG | |
| | | GGAAAGCGGGCAGCCCCGTTTTGGGGACGTG | |
| | | AACGTTTTAATAATTTTTGCTGAATTCCTTTA | |
| | | CAACTAAATAACACAGATATTGTTATAAATA | |
| | | AAATTGT | |
| 3UTR- | Nnt1; | ATATTAAGGATCAAGCTGTTAGCTAATAATG | 15 |
| 011 | cardiotrophin- | CCACCTCTGCAGTTTTGGGAACAGGCAAATA | |
| | like cytokine | AAGTATCAGTATACATGGTGATGTACATCTG | |
| | factor 1 | TAGCAAAGCTCTTGGAGAAAATGAAGACTGA | |
| | | AGAAAGCAAAGCAAAAACTGTATAGAGAGA | |
| | | TTTTTCAAAAGCAGTAATCCCTCAATTTTAAA | |
| | | AAAGGATTGAAAATTCTAAATGTCTTTCTGT | |
| | | GCATATTTTTTGTGTTAGGAATCAAAAGTATT | |
| | | TTATAAAAGGAGAAAGAACAGCCTCATTTTA | |
| | | GATGTAGTCCTGTTGGATTTTTTATGCCTCCT | |
| | | CAGTAACCAGAAATGTTTTAAAAAACTAAGT | |
| | | GTTTAGGATTTCAAGACAACATTATACATGG | |
| | | CTCTGAAATATCTGACACAATGTAAACATTG | |
| | | CAGGCACCTGCATTTTATGTTTTTTTTTTCAA | |
| | | CAAATGTGACTAATTTGAAACTTTTATGAAC | |
| | | TTCTGAGCTGTCCCCTTGCAATTCAACCGCAG | |
| | | TTTGAATTAATCATATCAAATCAGTTTTAATT | |
| | | TTTTAAATTGTACTTCAGAGTCTATATTTCAA | |
| | | GGGCACATTTTCTCACTACTATTTTAATACAT | |
| | | TAAAGGACTAAATAATCTTTCAGAGATGCTG | |
| | | GAAACAAATCATTTGCTTTATATGTTTCATTA | |
| | | GAATACCAATGAAACATACAACTTGAAAATT | |
| | | AGTAATAGTATTTTTGAAGATCCCATTTCTAA | |
| | | TTGGAGATCTCTTTAATTTCGATCAACTTATA | |
| | | ATGTGTAGTACTATATTAAGTGCACTTGAGT | |
| | | GGAATTCAACATTTGACTAATAAAATGAGTT | |
| | | CATCATGTTGGCAAGTGATGTGGCAATTATC | |
| | | TCTGGTGACAAAAGAGTAAAATCAAATATTT | |
| | | CTGCCTGTTACAAATATCAAGGAAGACCTGC | |
| | | TACTATGAAATAGATGACATTAATCTGTCTTC | |
| | | ACTGTTTATAATACGGATGGATTTTTTTTCAA | |
| | | ATCAGTGTGTGTTTTGAGGTCTTATGTAATTG | |
| | | ATGACATTTGAGAGAAATGGTGGCTTTTTTT | |
| | | AGCTACCTCTTTGTTCATTTAAGCACCAGTAA | |
| | | AGATCATGTCTTTTTATAGAAGTGTAGATTTT | |
| | | CTTTGTGACTTTGCTATCGTGCCTAAAGCTCT | |
| | | AAATATAGGTGAATGTGTGATGAATACTCAG | |
| | | ATTATTTGTCTCTCTATATAATTAGTTTGGTA | |
| | | CTAAGTTTCTCAAAAAATTATTAACACATGA | |
| | | AAGACAATCTCTAAACCAGAAAAAGAAGTA | |
| | | GTACAAATTTTGTTACTGTAATGCTCGCGTTT | |
| | | AGTGAGTTTAAAACACACAGTATCTTTTGGT | |
| | | TTTATAATCAGTTTCTATTTTGCTGTGCCTGA | |
| | | GATTAAGATCTGTGTATGTGTGTGTGTGTGTG | |
| | | TGTGCGTTTGTGTGTTAAAGCAGAAAAGACT | |
| | | TTTTTAAAAGTTTTAAGTGATAAATGCAATTT | |
| | | GTTAATTGATCTTAGATCACTAGTAAACTCA | |
| | | GGGCTGAATTATACCATGTATATTCTATTAG | |
| | | AAGAAAGTAAACACCATCTTTATTCCTGCCC | |
| | | TTTTTCTTCTCTCAAAGTAGTTGTAGTTATAT | |
| | | CTAGAAAGAAGCAATTTTGATTTCTTGAAAA | |
| | | GGTAGTTCCTGCACTCAGTTTAAACTAAAAA | |
| | | TAATCATACTTGGATTTTATTTATTTTTGTCA | |
| | | TAGTAAAAATTTTAATTTATATATATTTTTAT | |
| | | TTAGTATTATCTTATTCTTTGCTATTTGCCAA | |
| | | TCCTTTGTCATCAATTGTGTTAAATGAATTGA | |
| | | AAATTCATGCCCTGTTCATTTTATTTTACTTT | |
| | | ATTGGTTAGGATATTTAAAGGATTTTTGTATA | |
| | | TATAATTTCTTAAATTAATATTCCAAAAGGTT | |
| | | AGTGGACTTAGATTATAAATTATGGCAAAAA | |
| | | TCTAAAAACAACAAAAATGATTTTTATACAT | |
| | | TCTATTTCATTATTCCTCTTTTTCCAATAAGTC | |
| | | ATACAATTGGTAGATATGACTTATTTTATTTT | |
| | | TGTATTATTCACTATATCTTTATGATATTTAA | |
| | | GTATAAATAATTAAAAAAATTTATTGTACCT | |
| | | TATAGTCTGTCACCAAAAAAAAAAAATTATC | |
| | | TGTAGGTAGTGAAATGCTAATGTTGATTTGT | |
| | | CTTTAAGGGCTTGTTAACTATCCTTTATTTTC | |
| | | TCATTTGTCTTAAATTAGGAGTTTGTGTTTAA | |
| | | ATTACTCATCTAAGCAAAAAATGTATATAAA | |
| | | TCCCATTACTGGGTATATACCCAAAGGATTA | |
| | | TAAATCATGCTGCTATAAAGACACATGCACA | |
| | | CGTATGTTTATTGCAGCACTATTCACAATAGC | |
| | | AAAGACTTGGAACCAACCCAAATGTCCATCA | |
| | | ATGATAGACTTGATTAAGAAAATGTGCACAT | |
| | | ATACACCATGGAATACTATGCAGCCATAAAA | |
| | | AAGGATGAGTTCATGTCCTTTGTAGGGACAT | |
| | | GGATAAAGCTGGAAACCATCATTCTGAGCAA | |
| | | ACTATTGCAAGGACAGAAAACCAAACACTGC | |
| | | ATGTTCTCACTCATAGGTGGGAATTGAACAA | |
| | | TGAGAACACTTGGACACAAGGTGGGGAACA | |
| | | CCACACACCAGGGCCTGTCATGGGGTGGGGG | |
| | | GAGTGGGGAGGGATAGCATTAGGAGATATA | |
| | | CCTAATGTAAATGATGAGTTAATGGGTGCAG | |
| | | CACACCAACATGGCACATGTATACATATGTA | |
| | | GCAAACCTGCACGTTGTGCACATGTACCCTA | |
| | | GAACTTAAAGTATAATTAAAAAAAAAAAGA | |
| | | AAACAGAAGCTATTTATAAAGAAGTTATTTG | |
| | | CTGAAATAAATGTGATCTTTCCCATTAAAAA | |
| | | AATAAAGAAATTTTGGGGTAAAAAAACACA | |
| | | ATATATTGTATTCTTGAAAAATTCTAAGAGA | |
| | | GTGGATGTGAAGTGTTCTCACCACAAAAGTG | |
| | | ATAACTAATTGAGGTAATGCACATATTAATT | |
| | | AGAAAGATTTTGTCATTCCACAATGTATATA | |
| | | TACTTAAAAATATGTTATACACAATAAATAC | |
| | | ATACATTAAAAAATAAGTAAATGTA | |
| 3UTR- | Col6a1; | CCCACCCTGCACGCCGGCACCAAACCCTGTC | 16 |
| 012 | collagen, type | CTCCCACCCCTCCCCACTCATCACTAAACAG | |
| | VI, alpha 1 | AGTAAAATGTGATGCGAATTTTCCCGACCAA | |
| | | CCTGATTCGCTAGATTTTTTTTAAGGAAAAGC | |
| | | TTGGAAAGCCAGGACACAACGCTGCTGCCTG | |
| | | CTTTGTGCAGGGTCCTCCGGGGCTCAGCCCT | |
| | | GAGTTGGCATCACCTGCGCAGGGCCCTCTGG | |
| | | GGCTCAGCCCTGAGCTAGTGTCACCTGCACA | |
| | | GGGCCCTCTGAGGCTCAGCCCTGAGCTGGCG | |
| | | TCACCTGTGCAGGGCCCTCTGGGGCTCAGCC | |
| | | CTGAGCTGGCCTCACCTGGGTTCCCCACCCC | |
| | | GGGCTCTCCTGCCCTGCCCTCCTGCCCGCCCT | |
| | | CCCTCCTGCCTGCGCAGCTCCTTCCCTAGGCA | |
| | | CCTCTGTGCTGCATCCCACCAGCCTGAGCAA | |
| | | GACGCCCTCTCGGGGCCTGTGCCGCACTAGC | |
| | | CTCCCTCTCCTCTGTCCCCATAGCTGGTTTTT | |
| | | CCCACCAATCCTCACCTAACAGTTACTTTACA | |
| | | ATTAAACTCAAAGCAAGCTCTTCTCCTCAGC | |
| | | TTGGGGCAGCCATTGGCCTCTGTCTCGTTTTG | |
| | | GGAAACCAAGGTCAGGAGGCCGTTGCAGAC | |
| | | ATAAATCTCGGCGACTCGGCCCCGTCTCCTG | |
| | | AGGGTCCTGCTGGTGACCGGCCTGGACCTTG | |
| | | GCCCTACAGCCCTGGAGGCCGCTGCTGACCA | |
| | | GCACTGACCCCGACCTCAGAGAGTACTCGCA | |
| | | GGGGCGCTGGCTGCACTCAAGACCCTCGAGA | |
| | | TTAACGGTGCTAACCCCGTCTGCTCCTCCCTC | |
| | | CCGCAGAGACTGGGGCCTGGACTGGACATGA | |
| | | GAGCCCCTTGGTGCCACAGAGGGCTGTGTCT | |
| | | TACTAGAAACAACGCAAACCTCTCCTTCCTC | |
| | | AGAATAGTGATGTGTTCGACGTTTTATCAAA | |
| | | GGCCCCCTTTCTATGTTCATGTTAGTTTTGCT | |
| | | CCTTCTGTGTTTTTTTCTGAACCATATCCATG | |
| | | TTGCTGACTTTTCCAAATAAAGGTTTTCACTC | |
| | | CTCTC | |
| 3UTR- | Calr; | AGAGGCCTGCCTCCAGGGCTGGACTGAGGCC | 17 |
| 013 | calreticulin | TGAGCGCTCCTGCCGCAGAGCTGGCCGCGCC | |
| | | AAATAATGTCTCTGTGAGACTCGAGAACTTT | |
| | | CATTTTTTTCCAGGCTGGTTCGGATTTGGGGT | |
| | | GGATTTTGGTTTTGTTCCCCTCCTCCACTCTC | |
| | | CCCCACCCCCTCCCCGCCCTTTTTTTTTTTTTT | |
| | | TTTTAAACTGGTATTTTATCTTTGATTCTCCTT | |
| | | CAGCCCTCACCCCTGGTTCTCATCTTTCTTGA | |
| | | TCAACATCTTTTCTTGCCTCTGTCCCCTTCTCT | |
| | | CATCTCTTAGCTCCCCTCCAACCTGGGGGGC | |
| | | AGTGGTGTGGAGAAGCCACAGGCCTGAGATT | |
| | | TCATCTGCTCTCCTTCCTGGAGCCCAGAGGA | |
| | | GGGCAGCAGAAGGGGGTGGTGTCTCCAACCC | |
| | | CCCAGCACTGAGGAAGAACGGGGCTCTTCTC | |
| | | ATTTCACCCCTCCCTTTCTCCCCTGCCCCCAG | |
| | | GACTGGGCCACTTCTGGGTGGGGCAGTGGGT | |
| | | CCCAGATTGGCTCACACTGAGAATGTAAGAA | |
| | | CTACAAACAAAATTTCTATTAAATTAAATTTT | |
| | | GTGTCTCC | |
| 3UTR- | Col1a1; | CTCCCTCCATCCCAACCTGGCTCCCTCCCACC | 18 |
| 014 | collagen, type | CAACCAACTTTCCCCCCAACCCGGAAACAGA | |
| | I, alpha 1 | CAAGCAACCCAAACTGAACCCCCTCAAAAGC | |
| | | CAAAAAATGGGAGACAATTTCACATGGACTT | |
| | | TGGAAAATATTTTTTTCCTTTGCATTCATCTC | |
| | | TCAAACTTAGTTTTTATCTTTGACCAACCGAA | |
| | | CATGACCAAAAACCAAAAGTGCATTCAACCT | |
| | | TACCAAAAAAAAAAAAAAAAAAAGAATAAA | |
| | | TAAATAACTTTTTAAAAAAGGAAGCTTGGTC | |
| | | CACTTGCTTGAAGACCCATGCGGGGGTAAGT | |
| | | CCCTTTCTGCCCGTTGGGCTTATGAAACCCCA | |
| | | ATGCTGCCCTTTCTGCTCCTTTCTCCACACCC | |
| | | CCCTTGGGGCCTCCCCTCCACTCCTTCCCAAA | |
| | | TCTGTCTCCCCAGAAGACACAGGAAACAATG | |
| | | TATTGTCTGCCCAGCAATCAAAGGCAATGCT | |
| | | CAAACACCCAAGTGGCCCCCACCCTCAGCCC | |
| | | GCTCCTGCCCGCCCAGCACCCCCAGGCCCTG | |
| | | GGGGACCTGGGGTTCTCAGACTGCCAAAGAA | |
| | | GCCTTGCCATCTGGCGCTCCCATGGCTCTTGC | |
| | | AACATCTCCCCTTCGTTTTTGAGGGGGTCATG | |
| | | CCGGGGGAGCCACCAGCCCCTCACTGGGTTC | |
| | | GGAGGAGAGTCAGGAAGGGCCACGACAAAG | |
| | | CAGAAACATCGGATTTGGGGAACGCGTGTCA | |
| | | ATCCCTTGTGCCGCAGGGCTGGGCGGGAGAG | |
| | | ACTGTTCTGTTCCTTGTGTAACTGTGTTGCTG | |
| | | AAAGACTACCTCGTTCTTGTCTTGATGTGTCA | |
| | | CCGGGGCAACTGCCTGGGGGCGGGGATGGG | |
| | | GGCAGGGTGGAAGCGGCTCCCCATTTTATAC | |
| | | CAAAGGTGCTACATCTATGTGATGGGTGGGG | |
| | | TGGGGAGGGAATCACTGGTGCTATAGAAATT | |
| | | GAGATGCCCCCCCAGGCCAGCAAATGTTCCT | |
| | | TTTTGTTCAAAGTCTATTTTTATTCCTTGATAT | |
| | | TTTTCTTTTTTTTTTTTTTTTTTTGTGGATGGG | |
| | | GACTTGTGAATTTTTCTAAAGGTGCTATTTAA | |
| | | CATGGGAGGAGAGCGTGTGCGGCTCCAGCCC | |
| | | AGCCCGCTGCTCACTTTCCACCCTCTCTCCAC | |
| | | CTGCCTCTGGCTTCTCAGGCCTCTGCTCTCCG | |
| | | ACCTCTCTCCTCTGAAACCCTCCTCCACAGCT | |
| | | GCAGCCCATCCTCCCGGCTCCCTCCTAGTCTG | |
| | | TCCTGCGTCCTCTGTCCCCGGGTTTCAGAGAC | |
| | | AACTTCCCAAAGCACAAAGCAGTTTTTCCCC | |
| | | CTAGGGGTGGGAGGAAGCAAAAGACTCTGT | |
| | | ACCTATTTTGTATGTGTATAATAATTTGAGAT | |
| | | GTTTTTAATTATTTTGATTGCTGGAATAAAGC | |
| | | ATGTGGAAATGACCCAAACATAATCCGCAGT | |
| | | GGCCTCCTAATTTCCTTCTTTGGAGTTGGGGG | |
| | | AGGGGTAGACATGGGGAAGGGGCTTTGGGG | |
| | | TGATGGGCTTGCCTTCCATTCCTGCCCTTTCC | |
| | | CTCCCCACTATTCTCTTCTAGATCCCTCCATA | |
| | | ACCCCACTCCCCTTTCTCTCACCCTTCTTATA | |
| | | CCGCAAACCTTTCTACTTCCTCTTTCATTTTCT | |
| | | ATTCTTGCAATTTCCTTGCACCTTTTCCAAAT | |
| | | CCTCTTCTCCCCTGCAATACCATACAGGCAAT | |
| | | CCACGTGCACAACACACACACACACTCTTCA | |
| | | CATCTGGGGTTGTCCAAACCTCATACCCACT | |
| | | CCCCTTCAAGCCCATCCACTCTCCACCCCCTG | |
| | | GATGCCCTGCACTTGGTGGCGGTGGGATGCT | |
| | | CATGGATACTGGGAGGGTGAGGGGAGTGGA | |
| | | ACCCGTGAGGAGGACCTGGGGGCCTCTCCTT | |
| | | GAACTGACATGAAGGGTCATCTGGCCTCTGC | |
| | | TCCCTTCTCACCCACGCTGACCTCCTGCCGAA | |
| | | GGAGCAACGCAACAGGAGAGGGGTCTGCTG | |
| | | AGCCTGGCGAGGGTCTGGGAGGGACCAGGA | |
| | | GGAAGGCGTGCTCCCTGCTCGCTGTCCTGGC | |
| | | CCTGGGGGAGTGAGGGAGACAGACACCTGG | |
| | | GAGAGCTGTGGGGAAGGCACTCGCACCGTGC | |
| | | TCTTGGGAAGGAAGGAGACCTGGCCCTGCTC | |
| | | ACCACGGACTGGGTGCCTCGACCTCCTGAAT | |
| | | CCCCAGAACACAACCCCCCTGGGCTGGGGTG | |
| | | GTCTGGGGAACCATCGTGCCCCCGCCTCCCG | |
| | | CCTACTCCTTTTTAAGCTT | |
| 3UTR- | Plod1; | TTGGCCAGGCCTGACCCTCTTGGACCTTTCTT | 19 |
| 015 | procollagen- | CTTTGCCGACAACCACTGCCCAGCAGCCTCT | |
| | lysine, 2- | GGGACCTCGGGGTCCCAGGGAACCCAGTCCA | |
| | oxoglutarate 5- | GCCTCCTGGCTGTTGACTTCCCATTGCTCTTG | |
| | dioxygenase 1 | GAGCCACCAATCAAAGAGATTCAAAGAGATT | |
| | | CCTGCAGGCCAGAGGCGGAACACACCTTTAT | |
| | | GGCTGGGGCTCTCCGTGGTGTTCTGGACCCA | |
| | | GCCCCTGGAGACACCATTCACTTTTACTGCTT | |
| | | TGTAGTGACTCGTGCTCTCCAACCTGTCTTCC | |
| | | TGAAAAACCAAGGCCCCCTTCCCCCACCTCT | |
| | | TCCATGGGGTGAGACTTGAGCAGAACAGGG | |
| | | GCTTCCCCAAGTTGCCCAGAAAGACTGTCTG | |
| | | GGTGAGAAGCCATGGCCAGAGCTTCTCCCAG | |
| | | GCACAGGTGTTGCACCAGGGACTTCTGCTTC | |
| | | AAGTTTTGGGGTAAAGACACCTGGATCAGAC | |
| | | TCCAAGGGCTGCCCTGAGTCTGGGACTTCTG | |
| | | CCTCCATGGCTGGTCATGAGAGCAAACCGTA | |
| | | GTCCCCTGGAGACAGCGACTCCAGAGAACCT | |
| | | CTTGGGAGACAGAAGAGGCATCTGTGCACAG | |
| | | CTCGATCTTCTACTTGCCTGTGGGGAGGGGA | |
| | | GTGACAGGTCCACACACCACACTGGGTCACC | |
| | | CTGTCCTGGATGCCTCTGAAGAGAGGGACAG | |
| | | ACCGTCAGAAACTGGAGAGTTTCTATTAAAG | |
| | | GTCATTTAAACCA | |
| 3UTR- | Nucb1; | TCCTCCGGGACCCCAGCCCTCAGGATTCCTG | 20 |
| 016 | nucleobindin 1 | ATGCTCCAAGGCGACTGATGGGCGCTGGATG | |
| | | AAGTGGCACAGTCAGCTTCCCTGGGGGCTGG | |
| | | TGTCATGTTGGGCTCCTGGGGCGGGGGCACG | |
| | | GCCTGGCATTTCACGCATTGCTGCCACCCCA | |
| | | GGTCCACCTGTCTCCACTTTCACAGCCTCCAA | |
| | | GTCTGTGGCTCTTCCCTTCTGTCCTCCGAGGG | |
| | | GCTTGCCTTCTCTCGTGTCCAGTGAGGTGCTC | |
| | | AGTGATCGGCTTAACTTAGAGAAGCCCGCCC | |
| | | CCTCCCCTTCTCCGTCTGTCCCAAGAGGGTCT | |
| | | GCTCTGAGCCTGCGTTCCTAGGTGGCTCGGC | |
| | | CTCAGCTGCCTGGGTTGTGGCCGCCCTAGCA | |
| | | TCCTGTATGCCCACAGCTACTGGAATCCCCG | |
| | | CTGCTGCTCCGGGCCAAGCTTCTGGTTGATTA | |
| | | ATGAGGGCATGGGGTGGTCCCTCAAGACCTT | |
| | | CCCCTACCTTTTGTGGAACCAGTGATGCCTCA | |
| | | AAGACAGTGTCCCCTCCACAGCTGGGTGCCA | |
| | | GGGGCAGGGGATCCTCAGTATAGCCGGTGAA | |
| | | CCCTGATACCAGGAGCCTGGGCCTCCCTGAA | |
| | | CCCCTGGCTTCCAGCCATCTCATCGCCAGCCT | |
| | | CCTCCTGGACCTCTTGGCCCCCAGCCCCTTCC | |
| | | CCACACAGCCCCAGAAGGGTCCCAGAGCTGA | |
| | | CCCCACTCCAGGACCTAGGCCCAGCCCCTCA | |
| | | GCCTCATCTGGAGCCCCTGAAGACCAGTCCC | |
| | | ACCCACCTTTCTGGCCTCATCTGACACTGCTC | |
| | | CGCATCCTGCTGTGTGTCCTGTTCCATGTTCC | |
| | | GGTTCCATCCAAATACACTTTCTGGAACAAA | |
| 3UTR- | α-globin | GCTGGAGCCTCGGTGGCCATGCTTCTTGCCC | 21 |
| 017 | | CTTGGGCCTCCCCCCAGCCCCTCCTCCCCTTC | |
| | | CTGCACCCGTACCCCCGTGGTCTTTGAATAA | |
| | | AGTCTGAGTGGGCGGC | |

[0145] It should be understood that those listed in the previous tables are examples and that any UTR from any gene may be incorporated into the respective first or second flanking region of the primary construct. Furthermore, multiple wild-type UTRs of any known gene may be utilized. It is also within the scope of the present invention to provide artificial UTRs which are not variants of wild type genes. These UTRs or portions thereof may be placed in the same orientation as in the transcript from which they were selected or may be altered in orientation or location. Hence a 5′ or 3′ UTR may be inverted, shortened, lengthened, made chimeric with one or more other 5′ UTRs or 3′ UTRs. As used herein, the term “altered” as it relates to a UTR sequence, means that the UTR has been changed in some way in relation to a reference sequence. For example, a 3′ or 5′ UTR may be altered relative to a wild type or native UTR by the change in orientation or location as taught above or may be altered by the inclusion of additional nucleotides, deletion of nucleotides, swapping or transposition of nucleotides. Any of these changes producing an “altered” UTR (whether 3′ or 5′) comprise a variant UTR.

[0146] In one embodiment, a double, triple or quadruple UTR such as a 5′ or 3′ UTR may be used. As used herein, a “double” UTR is one in which two copies of the same UTR are encoded either in series or substantially in series. For example, a double beta-globin 3′ UTR may be used as described in US Patent publication 20100129877, the contents of which are incorporated herein by reference in its entirety.

[0147] It is also within the scope of the present invention to have patterned UTRs. As used herein “patterned UTRs” are those UTRs which reflect a repeating or alternating pattern, such as ABABAB or AABBAABBAABB or ABCABCABC or variants thereof repeated once, twice, or more than 3 times. In these patterns, each letter, A, B, or C represent a different UTR at the nucleotide level.

[0148] In one embodiment, flanking regions are selected from a family of transcripts whose proteins share a common function, structure, feature of property. For example, oncology-related polypeptides of interest may belong to a family of proteins which are expressed in a particular cell, tissue or at some time during development. The UTRs from any of these genes may be swapped for any other UTR of the same or different family of proteins to create a new chimeric primary transcript. As used herein, a “family of proteins” is used in the broadest sense to refer to a group of two or more oncology-related polypeptides of interest which share at least one function, structure, feature, localization, origin, or expression pattern.

[0149] After optimization (if desired), the oncology-related primary construct components are reconstituted and transformed into a vector such as, but not limited to, plasmids, viruses, cosmids, and artificial chromosomes. For example, the optimized construct may be reconstituted and transformed into chemically competent E. coli, yeast, neurospora, maize, drosophila, etc. where high copy plasmid-like or chromosome structures occur by methods described herein.

[0150] The untranslated region may also include translation enhancer elements (TEE). As a non-limiting example, the TEE may include those described in US Application No. 20090226470, herein incorporated by reference in its entirety, and those known in the art.

### Stop Codons

[0151] In one embodiment, the oncology-related primary constructs of the present invention may include at least two stop codons before the 3′ untranslated region (UTR). The stop codon may be selected from TGA, TAA and TAG. In one embodiment, the oncology-related primary constructs of the present invention include the stop codon TGA and one additional stop codon. In a further embodiment the addition stop codon may be TAA. In another embodiment, the primary constructs of the present invention include three stop codons.

### Vector Amplification

[0152] The vector containing the oncology-related primary construct is then amplified and the plasmid isolated and purified using methods known in the art such as, but not limited to, a maxi prep using the Invitrogen PURELINK™ HiPure Maxiprep Kit (Carlsbad, CA).

### Plasmid Linearization

[0153] The plasmid may then be linearized using methods known in the art such as, but not limited to, the use of restriction enzymes and buffers. The linearization reaction may be purified using methods including, for example Invitrogen's PURELINK™ PCR Micro Kit (Carlsbad, CA), and HPLC based purification methods such as, but not limited to, strong anion exchange HPLC, weak anion exchange HPLC, reverse phase HPLC (RP-HPLC), and hydrophobic interaction HPLC (HIC-HPLC) and Invitrogen's standard PURELINK™ PCR Kit (Carlsbad, CA). The purification method may be modified depending on the size of the linearization reaction which was conducted. The linearized plasmid is then used to generate cDNA for in vitro transcription (IVT) reactions. cDNA Template Synthesis

[0154] A cDNA template may be synthesized by having a linearized plasmid undergo polymerase chain reaction (PCR). Table 4 is a listing of primers and probes that may be useful in the PCR reactions of the present invention. It should be understood that the listing is not exhaustive and that primer-probe design for any amplification is within the skill of those in the art. Probes may also contain chemically modified bases to increase base-pairing fidelity to the target molecule and base-pairing strength. Such modifications may include 5-methyl-Cytidine, 2, 6-di-amino-purine, 2′-fluoro, phosphoro-thioate, or locked nucleic acids.

TABLE 4
Primers and Probes

| Primer/ | | | |
|---|---|---|---|
| Probe | | Hybridi- | SEQ |
| Identi- | | zation | ID |
| fier | Sequence (5′-3′) | target | NO. |
| UFP | TTGGACCCTCGTACAGAAGCTAA | cDNA | 22 |
| | TACG | Template | |
| URP | Tₓ₁₆₀CTTCCTACTCAGGCTTTATT | cDNA | 23 |
| | CAAAGACCA | Template | |
| GBA1 | CCTTGACCTTCTGGAACTTC | Acid | 24 |
| | | glucocere- | |
| | | brosidase | |
| GBA2 | CCAAGCACTGAAACGGATAT | Acid | 25 |
| | | glucocere- | |
| | | brosidase | |
| LUC1 | GATGAAAAGTGCTCCAAGGA | Luciferase | 26 |
| LUC2 | AACCGTGATGAAAAGGTACC | Luciferase | 27 |
| LUC3 | TCATGCAGATTGGAAAGGTC | Luciferase | 28 |
| GCSF1 | CTTCTTGGACTGTCCAGAGG | G-CSF | 29 |
| GCSF2 | GCAGTCCCTGATACAAGAAC | G-CSF | 30 |
| GCSF3 | GATTGAAGGTGGCTCGCTAC | G-CSF | 31 |

*UFP is universal forward primer; URP is universal reverse primer.

[0155] In one embodiment, the cDNA may be submitted for sequencing analysis before undergoing transcription.

mRNA Production

[0156] The process of mRNA or mmRNA production may include, but is not limited to, in vitro transcription, cDNA template removal and RNA clean-up, and mRNA capping and/or tailing reactions.

### In Vitro Transcription

[0157] The cDNA produced in the previous step may be transcribed using an in vitro transcription (IVT) system. The system typically comprises a transcription buffer, nucleotide triphosphates (NTPs), an RNase inhibitor and a polymerase. The NTPs may be manufactured in house, may be selected from a supplier, or may be synthesized as described herein. The NTPs may be selected from, but are not limited to, those described herein including natural and unnatural (modified) NTPs. The polymerase may be selected from, but is not limited to, T7 RNA polymerase, T3 RNA polymerase and mutant polymerases such as, but not limited to, polymerases able to be incorporated into modified nucleic acids.

### RNA Polymerases

[0158] Any number of RNA polymerases or variants may be used in the design of the oncology-related primary constructs of the present invention.

[0159] RNA polymerases may be modified by inserting or deleting amino acids of the RNA polymerase sequence. As a non-limiting example, the RNA polymerase may be modified to exhibit an increased ability to incorporate a 2′-modified nucleotide triphosphate compared to an unmodified RNA polymerase (see International Publication WO2008078180 and U.S. Pat. No. 8,101,385; herein incorporated by reference in their entireties).

[0160] Variants may be obtained by evolving an RNA polymerase, optimizing the RNA polymerase amino acid and/or nucleic acid sequence and/or by using other methods known in the art. As a non-limiting example, T7 RNA polymerase variants may be evolved using the continuous directed evolution system set out by Esvelt et al. (Nature (2011) 472(7344):499-503; herein incorporated by reference in its entirety) where clones of T7 RNA polymerase may encode at least one mutation such as, but not limited to, lysine at position 93 substituted for threonine (K93T), I4M, A7T, E63V, V64D, A65E, D66Y, T76N, C125R, S128R, A136T, N165S, G175R, H176L, Y178H, F182L, L196F, G198V, D208Y, E222K, S228A, Q239R, T243N, G259D, M267I, G280C, H300R, D351A, A354S, E356D, L360P, A383V, Y385C, D388Y, S397R, M401T, N410S, K450R, P451T, G452V, E484A, H523L, H524N, G542V, E565K, K577E, K577M, N601S, S684Y, L699I, K713E, N748D, Q754R, E775K, A827V, D851N or L864F. As another non-limiting example, T7 RNA polymerase variants may encode at least mutation as described in U.S. Pub. Nos. 20100120024 and 20070117112; herein incorporated by reference in their entireties. Variants of RNA polymerase may also include, but are not limited to, substitutional variants, conservative amino acid substitution, insertional variants, deletional variants and/or covalent derivatives.

[0161] In one embodiment, the oncology-related primary construct may be designed to be recognized by the wild type or variant RNA polymerases. In doing so, the oncology-related primary construct may be modified to contain sites or regions of sequence changes from the wild type or parent primary construct.

[0162] In one embodiment, the oncology-related primary construct may be designed to include at least one substitution and/or insertion upstream of an RNA polymerase binding or recognition site, downstream of the RNA polymerase binding or recognition site, upstream of the TATA box sequence, downstream of the TATA box sequence of the oncology-related primary construct but upstream of the coding region of the oncology-related primary construct, within the 5′UTR, before the 5′UTR and/or after the 5′UTR.

[0163] In one embodiment, the 5′UTR of the oncology-related primary construct may be replaced by the insertion of at least one region and/or string of nucleotides of the same base. The region and/or string of nucleotides may include, but is not limited to, at least 3, at least 4, at least 5, at least 6, at least 7 or at least 8 nucleotides and the nucleotides may be natural and/or unnatural. As a non-limiting example, the group of nucleotides may include 5-8 adenine, cytosine, thymine, a string of any of the other nucleotides disclosed herein and/or combinations thereof.

[0164] In one embodiment, the 5′UTR of the oncology-related primary construct may be replaced by the insertion of at least two regions and/or strings of nucleotides of two different bases such as, but not limited to, adenine, cytosine, thymine, any of the other nucleotides disclosed herein and/or combinations thereof. For example, the 5′UTR may be replaced by inserting 5-8 adenine bases followed by the insertion of 5-8 cytosine bases. In another example, the 5′UTR may be replaced by inserting 5-8 cytosine bases followed by the insertion of 5-8 adenine bases.

[0165] In one embodiment, the oncology-related primary construct may include at least one substitution and/or insertion downstream of the transcription start site which may be recognized by an RNA polymerase. As a non-limiting example, at least one substitution and/or insertion may occur downstream the transcription start site by substituting at least one nucleic acid in the region just downstream of the transcription start site (such as, but not limited to, +1 to +6). Changes to region of nucleotides just downstream of the transcription start site may affect initiation rates, increase apparent nucleotide triphosphate (NTP) reaction constant values, and increase the dissociation of short transcripts from the transcription complex curing initial transcription (Brieba et al, Biochemistry (2002) 41: 5144-5149; herein incorporated by reference in its entirety). The modification, substitution and/or insertion of at least one nucleic acid may cause a silent mutation of the nucleic acid sequence or may cause a mutation in the amino acid sequence.

[0166] In one embodiment, the oncology-related primary construct may include the substitution of at least 1, at least 2, at least 3, at least 4, at least 5, at least 6, at least 7, at least 8, at least 9, at least 10, at least 11, at least 12 or at least 13 guanine bases downstream of the transcription start site.

[0167] In one embodiment, the oncology-related primary construct may include the substitution of at least 1, at least 2, at least 3, at least 4, at least 5 or at least 6 guanine bases in the region just downstream of the transcription start site. As a non-limiting example, if the nucleotides in the region are GGGAGA the guanine bases may be substituted by at least 1, at least 2, at least 3 or at least 4 adenine nucleotides. In another non-limiting example, if the nucleotides in the region are GGGAGA the guanine bases may be substituted by at least 1, at least 2, at least 3 or at least 4 cytosine bases. In another non-limiting example, if the nucleotides in the region are GGGAGA the guanine bases may be substituted by at least 1, at least 2, at least 3 or at least 4 thymine, and/or any of the nucleotides described herein.

[0168] In one embodiment, the oncology-related primary construct may include at least one substitution and/or insertion upstream of the start codon. For the purpose of clarity, one of skill in the art would appreciate that the start codon is the first codon of the protein coding region whereas the transcription start site is the site where transcription begins. The oncology-related primary construct may include, but is not limited to, at least 1, at least 2, at least 3, at least 4, at least 5, at least 6, at least 7 or at least 8 substitutions and/or insertions of nucleotide bases. The nucleotide bases may be inserted or substituted at 1, at least 1, at least 2, at least 3, at least 4 or at least 5 locations upstream of the start codon. The nucleotides inserted and/or substituted may be the same base (e.g., all A or all C or all T or all G), two different bases (e.g., A and C, A and T, or C and T), three different bases (e.g., A, C and T or A, C and T) or at least four different bases. As a non-limiting example, the guanine base upstream of the coding region in the oncology-related primary construct may be substituted with adenine, cytosine, thymine, or any of the nucleotides described herein. In another non-limiting example the substitution of guanine bases in the oncology-related primary construct may be designed so as to leave one guanine base in the region downstream of the transcription start site and before the start codon (see Esvelt et al. Nature (2011) 472(7344):499-503; herein incorporated by reference in its entirety). As a non-limiting example, at least 5 nucleotides may be inserted at 1 location downstream of the transcription start site but upstream of the start codon and the at least 5 nucleotides may be the same base type. cDNA Template Removal and Clean-Up

[0169] The cDNA template may be removed using methods known in the art such as, but not limited to, treatment with Deoxyribonuclease I (DNase I). RNA clean-up may also include a purification method such as, but not limited to, AGENCOURT® CLEANSEQ® system from Beckman Coulter (Danvers, MA), HPLC based purification methods such as, but not limited to, strong anion exchange HPLC, weak anion exchange HPLC, reverse phase HPLC (RP-HPLC), and hydrophobic interaction HPLC (HIC-HPLC).

Capping and/or Tailing Reactions

[0170] The oncology-related primary construct or oncology-related mmRNA may also undergo capping and/or tailing reactions. A capping reaction may be performed by methods known in the art to add a 5′ cap to the 5′ end of the oncology-related primary construct. Methods for capping include, but are not limited to, using a Vaccinia Capping enzyme (New England Biolabs, Ipswich, MA).

[0171] A poly-A tailing reaction may be performed by methods known in the art, such as, but not limited to, 2′ O-methyltransferase and by methods as described herein. If the oncology-related primary construct generated from cDNA does not include a poly-T, it may be beneficial to perform the poly-A-tailing reaction before the oncology-related primary construct is cleaned. mRNA Purification

[0172] Primary construct or mmRNA purification may include, but is not limited to, mRNA or mmRNA clean-up, quality assurance and quality control. mRNA or mmRNA clean-up may be performed by methods known in the arts such as, but not limited to, AGENCOURT® beads (Beckman Coulter Genomics, Danvers, MA), poly-T beads, LNA™ oligo-T capture probes (EXIQON® Inc, Vedbaek, Denmark) or HPLC based purification methods such as, but not limited to, strong anion exchange HPLC, weak anion exchange HPLC, reverse phase HPLC (RP-HPLC), and hydrophobic interaction HPLC (HIC-HPLC). The term “purified” when used in relation to a polynucleotide such as a “purified mRNA or mmRNA” refers to one that is separated from at least one contaminant. As used herein, a “contaminant” is any substance which makes another unfit, impure or inferior. Thus, a purified oncology-related polynucleotide (e.g., DNA and RNA) is present in a form or setting different from that in which it is found in nature, or a form or setting different from that which existed prior to subjecting it to a treatment or purification method.

[0173] A quality assurance and/or quality control check may be conducted using methods such as, but not limited to, gel electrophoresis, UV absorbance, or analytical HPLC.

[0174] In another embodiment, the oncology-related mRNA or oncology-related mmRNA may be sequenced by methods including, but not limited to reverse-transcriptase-PCR.

[0175] In one embodiment, the oncology-related mRNA or oncology-related mmRNA may be quantified using methods such as, but not limited to, ultraviolet visible spectroscopy (UV/Vis). A non-limiting example of a UV/Vis spectrometer is a NANODROP® spectrometer (ThermoFisher, Waltham, MA). The quantified oncology-related mRNA or oncology-related mmRNA may be analyzed in order to determine if the oncology-related mRNA or oncology-related mmRNA may be of proper size, check that no degradation of the oncology-related mRNA or oncology-related mmRNA has occurred. Degradation of the oncology-related mRNA and/or oncology-related mmRNA may be checked by methods such as, but not limited to, agarose gel electrophoresis, HPLC based purification methods such as, but not limited to, strong anion exchange HPLC, weak anion exchange HPLC, reverse phase HPLC (RP-HPLC), and hydrophobic interaction HPLC (HIC-HPLC), liquid chromatography-mass spectrometry (LCMS), capillary electrophoresis (CE) and capillary gel electrophoresis (CGE).

### Signal Sequences

[0176] The oncology-related primary constructs or oncology-related mmRNA may also encode additional features which facilitate trafficking of the oncology-related polypeptides to therapeutically relevant sites. One such feature which aids in protein trafficking is the signal sequence. As used herein, a “signal sequence” or “signal peptide” is a polynucleotide or polypeptide, respectively, which is from about 9 to 200 nucleotides (3-60 amino acids) in length which is incorporated at the 5′ (or N-terminus) of the coding region or polypeptide encoded, respectively. Addition of these sequences result in trafficking of the encoded oncology-related polypeptide to the endoplasmic reticulum through one or more secretory pathways. Some signal peptides are cleaved from the protein by signal peptidase after the proteins are transported.

[0177] Table 5 is a representative listing of protein signal sequences which may be incorporated for encoding by the oncology-related polynucleotides, oncology-related primary constructs or oncology-related mmRNA of the invention.

TABLE 5
Signal Sequences

| | | NUCLEOTIDE | SEQ | | SEQ |
|---|---|---|---|---|---|
| | | SEQUENCE | ID | ENCODED | ID |
| ID | Description | (5′-3′) | NO. | PEPTIDE | NO. |
| SS- | α-1- | ATGATGCCATCCTCAGT | 32 | MMPSSVSWGIL | 94 |
| 001 | antitrypsin | CTCATGGGGTATTTTGC | | LAGLCCLVPVS | |
| | | TCTTGGCGGGTCTGTGC | | LA | |
| | | TGTCTCGTGCCGGTGTC | | | |
| | | GCTCGCA | | | |
| SS- | G-CSF | ATGGCCGGACCGGCGA | 33 | MAGPATQSPM | 95 |
| 002 | | CTCAGTCGCCCATGAAA | | KLMALQLLLW | |
| | | CTCATGGCCCTGCAGTT | | HSALWTVQEA | |
| | | GTTGCTTTGGCACTCAG | | | |
| | | CCCTCTGGACCGTCCAA | | | |
| | | GAGGCG | | | |
| SS- | Factor IX | ATGCAGAGAGTGAACA | 34 | MQRVNMIMAE | 96 |
| 003 | | TGATTATGGCCGAGTCC | | SPSLITICLLGYL | |
| | | CCATCGCTCATCACAAT | | LSAECTVFLDH | |
| | | CTGCCTGCTTGGTACCT | | ENANKILNRPK | |
| | | GCTTTCCGCCGAATGCA | | R | |
| | | CTGTCTTTCTGGATCAC | | | |
| | | GAGAATGCGAATAAGA | | | |
| | | TCTTGAACCGACCCAAA | | | |
| | | CGG | | | |
| SS- | Prolactin | ATGAAAGGATCATTGCT | 35 | MKGSLLLLLVS | 97 |
| 004 | | GTTGCTCCTCGTGTCGA | | NLLLCQSVAP | |
| | | ACCTTCTGCTTTGCCAG | | | |
| | | TCCGTAGCCCCC | | | |
| SS- | Albumin | ATGAAATGGGTGACGTT | 36 | MKWVTFISLLF | 98 |
| 005 | | CATCTCACTGTTGTTTTT | | LFSSAYSRG | |
| | | GTTCTCGTCCGCCTACT | | VFRR | |
| | | CCAGGGGAGTATTCCGC | | | |
| | | CGA | | | |
| SS- | HMMSP38 | ATGTGGTGGCGGCTCTG | 37 | MWWRLWWLL | 99 |
| 006 | | GTGGCTGCTCCTGTTGC | | LLLLLLPMWA | |
| | | TCCTCTTGCTGTGGCCC | | | |
| | | ATGGTGTGGGCA | | | |
| MLS- | ornithine | TGCTCTTTAACCTCCGC | 38 | MLFNLRILLNN | 100 |
| 001 | carbamoyl- | ATCCTGTTGAATAACGC | | AAFRNGHNFM | |
| | transferase | TGCGTTCCGAAATGGGC | | VRNFRCGQPLQ | |
| | | ATAACTTCATGGTACGC | | | |
| | | AACTTCAGATGCGGCCA | | | |
| | | GCCACTCCAG | | | |
| MLS- | Cytochrome | ATGTCCGTCTTGACACC | 39 | MSVLTPLLLRG | 101 |
| 002 | C Oxidase | CCTGCTCTTGAGAGGGC | | LTGSARRLPVP | |
| | subunit 8A | TGACGGGGTCCGCTAG | | RAKIHSL | |
| | | ACGCCTGCCGGTACCGC | | | |
| | | AGCGAAGATCCACTC | | | |
| | | CCTG | | | |
| MLS- | Cytochrome | ATGAGCGTGCTCACTCC | 40 | MSVLTPLLLRG | 102 |
| 003 | C Oxidase | GTTGCTTCTTCGAGGGC | | LTGSARRLPVP | |
| | subunit 8A | TTACGGGATCGGCTCGG | | RAKIHSL | |
| | | AGGTTGCCCGTCCCGAG | | | |
| | | AGCGAAGATCCATTCGT | | | |
| | | TG | | | |
| SS- | Type III, | TGACAAAAATAACTTTA | 41 | MVTKITLSPQN | 103 |
| 007 | bacterial | TCTCCCCAGAATTTTAG | | FRIQKQETTLLK | |
| | | AATCCAAAAACAGGAA | | EKSTEKNSLAK | |
| | | ACCACACTACTAAAAG | | SILAVKNHFIEL | |
| | | AAAAATCAACCGAGAA | | RSKLSERFISHK | |
| | | AAATTCTTTAGCAAAAA | | NT | |
| | | GTATTCTCGCAGTAAAA | | | |
| | | ATCACTTCATCGAATTA | | | |
| | | AGGTCAAAATTATCGG | | | |
| | | AACGTTTTATTTCGCAT | | | |
| | | AAGAACACT | | | |
| SS- | Viral | ATGCTGAGCTTTGTGGA | 42 | MLSFVDTRTLL | 104 |
| 008 | | TACCCGCACCCTGCTGC | | LLAVTSCLATC | |
| | | TGCTGGCGGTGACCAGC | | Q | |
| | | TGCCTGGCGACCTGCCA | | | |
| | | G | | | |
| SS- | viral | ATGGGCAGCAGCCAGG | 43 | MGSSQAPRMGS | 105 |
| 009 | | CGCCGCGCATGGGCAG | | VGGHGLMALL | |
| | | CGTGGGCGGCCATGGC | | MAGLILPGILA | |
| | | CTGATGGCGCTGCTGAT | | | |
| | | GGCGGGCCTGATTCTGC | | | |
| | | CGGGCATTCTGGCG | | | |
| SS- | Viral | ATGGCGGGCATTTTTTA | 44 | MAGIFYFLFSFL | 106 |
| 010 | | TTTTCTGTTTAGCTTTCT | | FGICD | |
| | | GTTTGGCATTTGCGAT | | | |
| SS- | Viral | ATGGAAAACCGCCTGCT | 45 | MENRLLRVFLV | 107 |
| 011 | | GCGCGTGTTTCTGGTGT | | WAALTMDGAS | |
| | | GGGCGGCGCTGACCAT | | A | |
| | | GGATGGCGCGAGCGCG | | | |
| SS- | Viral | ATGGCGCGCCAGGGCT | 46 | MARQGCFGSY | 108 |
| 012 | | GCTTTGGCAGCTATCAG | | QVISLFTFAIGV | |
| | | GTGATTAGCCTGTTTAC | | NLCLG | |
| | | CTTTGCGATTGGCGTGA | | | |
| | | ACCTGTGCCTGGGC | | | |
| SS- | Bacillus | ATGAGCCGCCTGCCGGT | 47 | MSRLPVLLLLQ | 109 |
| 013 | | GCTGCTGCTGCTGCAGC | | LLVRPGLQ | |
| | | TGCTGGTGCGCCCGGGC | | | |
| | | CTGCAG | | | |
| SS- | Bacillus | ATGAAACAGCAGAAAC | 48 | MKQQKRLYAR | 110 |
| 014 | | GCCTGTATGCGCGCCTG | | LLTLLFALIFLL | |
| | | CTGACCCTGCTGTTTGC | | PHSSASA | |
| | | GCTGATTTTTCTGCTGC | | | |
| | | CGCATAGCAGCGCGAG | | | |
| | | CGCG | | | |
| SS- | Secretion | ATGGCGACGCCGCTGCC | 49 | MATPLPPPSPRH | 111 |
| 015 | signal | TCCGCCCTCCCCGCGGC | | LRLLRLLLSG | |
| | | ACCTGCGGCTGCTGCGG | | | |
| | | CTGCTGCTCTCCGCCCT | | | |
| | | CGTCCTCGGC | | | |
| SS- | Secretion | ATGAAGGCTCCGGGTC | 50 | MKAPGRLVLIIL | 112 |
| 016 | signal | GGCTCGTGCTCATCATC | | CSVVFS | |
| | | CTGTGCTCCGTGGTCTT | | | |
| | | CTCT | | | |
| SS- | Secretion | ATGCTTCAGCTTTGGAA | 51 | MLQLWKLLCG | 113 |
| 017 | signal | ACTTGTTCTCCTGTGCG | | VLT | |
| | | GCGTGCTCACT | | | |
| SS- | Secretion | ATGCTTTATCTCCAGGG | 52 | MLYLQGWSMP | 114 |
| 018 | signal | TTGGAGCATGCCTGCTG | | AVA | |
| | | TGGCA | | | |
| SS- | Secretion | ATGGATAACGTGCAGC | 53 | MDNVQPKIKHR | 115 |
| 019 | signal | CGAAAATAAAACATCG | | PFCFSVKGHVK | |
| | | CCCCTTCTGCTTCAGTG | | MLRLDIINSLVT | |
| | | TGAAAGGCCACGTGAA | | TVFMLIVSVLA | |
| | | GATGCTGCGGCTGGATA | | LIP | |
| | | TTATCAACTCACTGGTA | | | |
| | | ACAACAGTATTCATGCT | | | |
| | | CATCGTATCTGTGTTGG | | | |
| | | CACTGATACCA | | | |
| SS- | Secretion | ATGCCCTGCCTAGACCA | 54 | MPCLDQQLTVH | 116 |
| 020 | signal | ACAGCTCACTGTTCATG | | ALPCPAQPSSLA | |
| | | CCCTACCCTGCCCTGCC | | FCQVGFLTA | |
| | | CAGCCCTCCTCTCTGGC | | | |
| | | CTTCTGCCAAGTGGGGT | | | |
| | | TCTTAACAGCA | | | |
| SS- | Secretion | ATGAAAACCTTGTTCAA | 55 | MKTLFNPAPAI | 117 |
| 021 | signal | TCCAGCCCCTGCCATTG | | ADLDPQFYTLS | |
| | | CTGACCTGGATCCCCAG | | DVFCCNESEAEI | |
| | | TTCTACACCCTCTCAGA | | LTGLTVGSAAD | |
| | | TGTGTTCTGCTGCAATG | | A | |
| | | AAAGTGAGGCTGAGAT | | | |
| | | TTTAACTGGCCTCACGG | | | |
| | | TGGGCAGCGCTGCAGA | | | |
| | | TGCT | | | |
| SS- | Secretion | ATGAAGCCTCTCCTTGT | 56 | MKPLLVVFVFL | 118 |
| 022 | signal | TGTGTTTGTCTTTCTTTT | | FLWDPVLA | |
| | | CCTTTGGGATCCAGTGC | | | |
| | | TGGCA | | | |
| SS- | Secretion | ATGTCCTGTTCCCTAAA | 57 | MSCSLKFTLIVI | 119 |
| 023 | signal | GTTTACTTTGATTGTAA | | FFTCTLSSS | |
| | | TTTTTTTTTACTGTTGGC | | | |
| | | TTTCATCCAGC | | | |
| SS- | Secretion | ATGGTTCTTACTAAACC | 58 | MVLTKPLQRNG | 120 |
| 024 | signal | TCTTCAAAGAAATGGCA | | SMMSFENVKEK | |
| | | GCATGATGAGCTTTGAA | | SREGGPHAHTP | |
| | | AATGTGAAAGAAAAGA | | EEELCFVVTHT | |
| | | GCAGAGAAGGAGGGCC | | PQVQTTLNLFF | |
| | | CCATGCACACACACCCG | | HIFKVLTQPLSL | |
| | | AAGAAGAATTGTGTTTC | | LWG | |
| | | GTGGTAACACACTACCC | | | |
| | | TCAGGTTCAGACCACAC | | | |
| | | TCAACCTGTTTTTCCAT | | | |
| | | ATATTCAAGGTTCTTAC | | | |
| | | TCAACCACTTTCCCTTC | | | |
| | | TGTGGGGT | | | |
| SS- | Secretion | ATGGCCACCCCGCCATT | 59 | MATPPFRLIRK | 121 |
| 025 | signal | CCGGCTGATAAGGAAG | | MFSFKVSRWM | |
| | | ATGTTTTCCTTCAAGGT | | GLACFRSLAAS | |
| | | GAGCAGATGGATGGGG | | | |
| | | CTTGCCTGCTTCCGGTC | | | |
| | | CCTGGCGGCATCC | | | |
| SS- | Secretion | ATGAGCTTTTTCCAACT | 60 | MSFFQLLMKRK | 122 |
| 026 | signal | CCTGATGAAAAGGAAG | | ELIPLVVFMTV | |
| | | GAACTCATTCCCTTGGT | | AAGGASS | |
| | | GGTGTTCATGACTGTGG | | | |
| | | CGGCGGGTGGAGCCTC | | | |
| | | ATCT | | | |
| SS- | Secretion | ATGGTCTCAGCTCTGCG | 61 | MVSALRGAPLI | 123 |
| 027 | signal | GGGAGCACCCCTGATC | | RVHSSPVSSPSV | |
| | | AGGGTGCACTCAAGCC | | SGPAALVSCLSS | |
| | | CTGTTTCTTCTCCTTCTG | | QSSALS | |
| | | TGAGTGGACCACGGAG | | | |
| | | GCTGGTGAGCTGCCTGT | | | |
| | | CATCCCAAAGCTCAGCT | | | |
| | | CTGAGC | | | |
| SS- | Secretion | ATGATGGGGTCCCCAGT | 62 | MMGSPVSHLLA | 124 |
| 028 | signal | GAGTCATCTGCTGGCCG | | GFCVWVVLG | |
| | | GCTTCTGTGTGTGGGTC | | | |
| | | GTCTTGGGC | | | |
| SS- | Secretion | ATGGCAAGCATGGCTG | 63 | MASMAAVLTW | 125 |
| 029 | signal | CCGTGCTCACCTGGGCT | | ALALLSAFSAT | |
| | | CTGGCTCTTCTTTCAGC | | QA | |
| | | GTTTTCGGCCACCCAGG | | | |
| | | CA | | | |
| SS- | Secretion | ATGGTGCTCATGTGGAC | 64 | MVLMWTSGDA | 126 |
| 030 | signal | CAGTGGTGACGCCTTCA | | FKTAYFLLKGA | |
| | | AGACGGCCTACTTCCTG | | PLQFSVCGLLQ | |
| | | CTGAAGGGTGCCCCTCT | | VLVDLAILGQA | |
| | | GCAGTTCTCCGTGTGCG | | TA | |
| | | GCCTGCTGCAGGTGCTG | | | |
| | | GTGGACCTGGCCATCCT | | | |
| | | GGGGCAGGCCTACGCC | | | |
| SS- | Secretion | ATGGATTTTGTCGCTGG | 65 | MDFVAGAIGGV | 127 |
| 031 | signal | AGCCATCGGAGGCGTCT | | CGVAVGYPLDT | |
| | | GCGGTGTTGCTGTGGGC | | VKVRIQTEPLY | |
| | | TACCCCCTGGACACGGT | | TGIWHCVRDTY | |
| | | GAAGGTCAGGATCCAG | | HRERVWGFYR | |
| | | ACGGAGCCAAAGTACA | | GLSLPVCTVSL | |
| | | CAGGCATCTGGCACTGC | | VSS | |
| | | GTCCGGGATACGTATCA | | | |
| | | CCGAGAGCGCGTGTGGG | | | |
| | | GCTTCTACCGGGGCCTC | | | |
| | | TCGCTGCCCGTGTGCAC | | | |
| | | GGTGTCCCTGGTATCTT | | | |
| | | CC | | | |
| SS- | Secretion | ATGGAGAAGCCCCTCTT | 66 | MEKPLFPLVPL | 128 |
| 032 | signal | CCCATTAGTGCCTTTGC | | HWFGFGYTAL | |
| | | ATTGGTTTGGCTTTGGC | | VVSGGIVGYVK | |
| | | TACACAGCACTGGTTGT | | TGSVPSLAAGL | |
| | | TTCTGGTGGGATCGTTG | | LFGSLA | |
| | | GCTATGTAAAAACAGG | | | |
| | | CAGCGTGCCGTCCCTGG | | | |
| | | CTGCAGGGCTGCTCTTC | | | |
| | | GGCAGTCTAGCC | | | |
| SS- | Secretion | ATGGGTCTGCTCCTTCC | 67 | MGLLLPLALCIL | 129 |
| 033 | signal | CCTGGCACTCTGCATCC | | VLC | |
| | | TAGTCCTGTGC | | | |
| SS- | Secretion | ATGGGGATCCAGACGA | 68 | MGIQTSPVLLA | 130 |
| 034 | signal | GCCCCGTCCTGCTGGCC | | SLGVGLVTLLG | |
| | | TCCCTGGGGGTGGGGCT | | LAVG | |
| | | GGTCACTCTGCTCGGCC | | | |
| | | TGGCTGTGGGC | | | |
| SS- | Secretion | ATGTCGGACCTGCTACT | 69 | MSDLLLLGLIG | 131 |
| 035 | signal | ACTGGGCCTGATTGGGG | | GLTLLLLLTLLA | |
| | | GCCTGACTCTCTTACTG | | FA | |
| | | CTGCTGACGCTGCTAGC | | | |
| | | CTTTGCC | | | |
| SS- | Secretion | ATGGAGACTGTGGTGAT | 70 | METVVIVAIGV | 132 |
| 036 | signal | TGTTGCCATAGGTGTGC | | LATIFLASFAAL | |
| | | TGGCCACCATGTTTCTG | | VLVCRQ | |
| | | GCTTCGTTTGCAGCCTT | | | |
| | | GGTGCTGGTTTGCAGGC | | | |
| | | AG | | | |
| SS- | Secretion | ATGCGCGGCTCTGTGGA | 71 | MAGSVECTWG | 133 |
| 037 | signal | GTGCACCTGGGGTTGGG | | WGHCAPSPLLL | |
| | | GGCACTGTGCCCCCAGC | | WTLLLFAAPFG | |
| | | CCCCTGCTCCTTTGGAC | | LLG | |
| | | TCTACTTCTGTTTGCAG | | | |
| | | CCCCATTTGGCCTGCTG | | | |
| | | GGG | | | |
| SS- | Secretion | ATGATGCCGTCCCGTAC | 72 | MMPSRTNLATG | 134 |
| 038 | signal | CAACCTGGCTACTGGAA | | IPSSKVKYSRLS | |
| | | TCCCCAGTAGTAAAGTG | | STDDGYIDLQF | |
| | | AAATATTCAAGGCTCTC | | KKTPPKIPYKAI | |
| | | CAGCACAGACGATGGC | | ALATVLFLIGA | |
| | | TACATTGACCTTCAGTT | | | |
| | | TAAGAAAACCCCTCCTA | | | |
| | | AGATCCCTTATAAGGCC | | | |
| | | ATCGCACTTGCCACTGT | | | |
| | | GCTGTTTTTGATTGGCG | | | |
| | | CC | | | |
| SS- | Secretion | ATGGCCCTGCCCCAGAT | 73 | MALPQMCDGS | 135 |
| 039 | signal | GTGTGACGGGAGCCAC | | HLASTLRYCMT | |
| | | TTGGCCTCCACCCTCCG | | VSGTVVLVAGT | |
| | | CTATTGCATGACAGTCA | | LCFA | |
| | | GCGGCACAGTGGTTCTG | | | |
| | | GTGGCCGGGACGCTCTG | | | |
| | | CTTCGCT | | | |
| SS- | Vrg-6 | TGAAAAAGTGGTTCGTT | 74 | MKKWFVAAGI | 136 |
| 041 | | GCTGCCGGCATCGGCGC | | GAGLLMLSSAA | |
| | | TGCCGGACTCATGCTCT | | | |
| | | CCAGCGCCGCCA | | | |
| SS- | PhoA | ATGAAACAGAGCACCA | 75 | MKQSTIALALL | 137 |
| 042 | | TTGCGCTGGCGCTGCTG | | PLLFTPVTKA | |
| | | CCGCTGCTGTTTACCCC | | | |
| | | GGTGACCAAAGCG | | | |
| SS- | OmpA | ATGAAAAAAACCGCGA | 76 | MKKTAIAIAVA | 138 |
| 043 | | TTGCGATTGCGGTGGCG | | LAGFATVAQA | |
| | | CTGGCGGGCTTTGCGAC | | | |
| | | CGTGGCGCAGGCG | | | |
| SS- | STI | ATGAAAAAACTGATGC | 77 | MKKLMLAIFFS | 139 |
| 044 | | TGGCGATTTTTTTTAGC | | VLSFPSFSQS | |
| | | GTGCTGAGCTTTCCGAG | | | |
| | | CTTTAGCCAGAGC | | | |
| SS- | STII | ATGAAAAAAAACATTG | 78 | MKKNIAFLLAS | 140 |
| 045 | | CGTTTCTGCTGGCGAGC | | MFVFSIATNAY | |
| | | ATGTTTGTGTTTAGCAT | | A | |
| | | TGCGACCAACGCGTATG | | | |
| | | CG | | | |
| SS- | Amylase | ATGTTTGCGAAACGCTT | 79 | MFAKRFKTSLL | 141 |
| 046 | | TAAAACCAGCCTGCTGC | | PLFAGFLLLFHL | |
| | | CGCTGTTTGCGGGCTTT | | VLAGPAAAS | |
| | | CTGCTGCTGTTTCATCT | | | |
| | | GGTGCTGGCGGGCCCG | | | |
| | | GCGGCGGCGAGC | | | |
| SS- | Alpha | ATGCGCTTTCCGAGCAT | 80 | MRFPSIFTAVLF | 142 |
| 047 | Factor | TTTTACCGCGGTGCTGT | | AASSALA | |
| | | TTGCGGCGAGCAGCGC | | | |
| | | GCTGGCG | | | |
| SS- | Alpha | ATGCGCTTTCCGAGCAT | 81 | MRFPSIFTTVLF | 143 |
| 048 | Factor | TTTTACCACCGTGCTGT | | AASSALA | |
| | | TTGCGGCGAGCAGCGC | | | |
| | | GCTGGCG | | | |
| SS- | Alpha | ATGCGCTTTCCGAGCAT | 82 | MRFPSIFTSVLF | 144 |
| 049 | Factor | TTTTACCAGCGTGCTGT | | AASSALA | |
| | | TTGCGGCGAGCAGCGC | | | |
| | | GCTGGCG | | | |
| SS- | Alpha | ATGCGCTTTCCGAGCAT | 83 | MRFPSIFTHVLF | 145 |
| 050 | Factor | TTTTACCCATGTGCTGT | | AASSALA | |
| | | TTGCGGCGAGCAGCGC | | | |
| | | GCTGGCG | | | |
| SS- | Alpha | ATGCGCTTTCCGAGCAT | 84 | MRFPSIFTIVLF | 146 |
| 051 | Factor | TTTTACCATTGTGCTGT | | AASSALA | |
| | | TTGCGGCGAGCAGCGC | | | |
| | | GCTGGCG | | | |
| SS- | Alpha | ATGCGCTTTCCGAGCAT | 85 | MRFPSIFTFVLF | 147 |
| 052 | Factor | TTTTACCTTTGTGCTGTT | | AASSALA | |
| | | TGCGGCGAGCAGCGCG | | | |
| | | CTGGCG | | | |
| SS- | Alpha | ATGCGCTTTCCGAGCAT | 86 | MRFPSIFTEVLF | 148 |
| 053 | Factor | TTTTACCGAAGTGCTGT | | AASSALA | |
| | | TTGCGGCGAGCAGCGC | | | |
| | | GCTGGCG | | | |
| SS- | Alpha | ATGCGCTTTCCGAGCAT | 87 | MRFPSIFTGVLF | 149 |
| 054 | Factor | TTTTACCGGCGTGCTGT | | AASSALA | |
| | | TTGCGGCGAGCAGCGC | | | |
| | | GCTGGCG | | | |
| SS- | Endo- | ATGCGTTCCTCCCCCCT | 88 | MRSSPLLRSAV | 150 |
| 055 | glucanase V | CCTCCGCTCCGCCGTTG | | VAALPVLALA | |
| | | TGGCCGCCCTGCCGGTG | | | |
| | | TTGGCCCTTGCC | | | |
| SS- | Secretion | ATGGGCGCGGCGGCCG | 89 | MGAAAVRWHL | 151 |
| 056 | signal | TGCGCTGGCACTTGTGC | | CVLLALGTRGR | |
| | | GTGCTGCTGGCCCTGGG | | L | |
| | | CACACGCGGGCGGCTG | | | |
| SS- | Fungal | ATGAGGAGCTCCCTTGT | 90 | MRSSLVLFFVS | 152 |
| 057 | | GCTGTTCTTTGTCTCTG | | AWTALA | |
| | | CGTGGACGGCCTTGGCC | | | |
| | | AG | | | |
| SS- | Fibronectin | ATGCTCAGGGGTCCGG | 91 | MLRGPGPGRLL | 153 |
| 058 | | GACCCGGGCGGCTGCT | | LLAVLCLGTSV | |
| | | GCTGCTAGCAGTCCTGT | | RCTETGKSKR | |
| | | GCCTGGGGACATCGGT | | | |
| | | GCGCTGCACCGAAACC | | | |
| | | GGGAAGAGCAAGAGG | | | |
| SS- | Fibronectin | ATGCTTAGGGGTCCGGG | 92 | MLRGPGPGLLL | 154 |
| 059 | | GCCCGGGCTGCTGCTGC | | LAVQCLGTAVP | |
| | | TGGCCGTCCAGCTGGGG | | STGA | |
| | | ACAGCGGTGCCCTCCAC | | | |
| | | G | | | |
| SS- | Fibronectin | ATGCGCCGGGGGGCCC | 93 | MRRGALTGLLL | 155 |
| 060 | | TGACCGGGCTGCTCCTG | | VLCLSVVLRAA | |
| | | GTCCTGTGCCTGAGTGT | | PSATSKKRR | |
| | | TGTGCTACGTGCAGCCC | | | |
| | | CCTCTGCAACAAGCAA | | | |
| | | GAAGCGCAGG | | | |

[0178] In the table, SS is secretion signal and MLS is mitochondrial leader signal. The oncology-related primary constructs or oncology-related mmRNA of the present invention may be designed to encode any of the signal sequences of SEQ ID NOs 94-155, or fragments or variants thereof. These sequences may be included at the beginning of the oncology-related polypeptide coding region, in the middle or at the terminus or alternatively into a flanking region. Further, any of the oncology-related polynucleotide primary constructs of the present invention may also comprise one or more of the sequences defined by SEQ ID NOs 32-93. These may be in the first region or either flanking region.

[0179] Additional signal sequences which may be utilized in the present invention include those taught in, for example, databases such as those found at www.signalpeptide.de/ or proline.bic.nus.edu.sg/spdb/. Those described in U.S. Pat. Nos. 8,124,379; 7,413,875 and 7,385,034 are also within the scope of the invention and the contents of each are incorporated herein by reference in their entirety.

### Target Selection

[0180] According to the present invention, the oncology-related primary constructs comprise at least a first region of linked nucleosides encoding at least one oncology-related polypeptide of interest. The oncology-related polypeptides of interest or “targets” or oncology-related proteins and oncology-related peptides of the present invention are Table 7. Shown in Table 7, are familiar cancer syndromes, tumor suppressor genes and sequence identifiers (e.g., ENST SEQ ID for the sequence identifiers associated with the ENSEMBL transcript sequences or ENSP SEQ ID for the sequence identifiers associated with the ENSEMBL protein sequences), function of the tumor suppressor gene, chromosomal location, tumor type observed. For any particular gene there may exist one or more variants or isoforms. Where these exist, they are shown in the tables as well. It will be appreciated by those of skill in the art that disclosed in the Tables are potential flanking regions. These are encoded in each ENST transcript either to the 5′ (upstream) or 3′ (downstream) of the ORF or coding region. The coding region is definitively and specifically disclosed by teaching the ENSP sequence. Consequently, the sequences taught flanking that encoding the protein are considered flanking regions. It is also possible to further characterize the 5′ and 3′ flanking regions by utilizing one or more available databases or algorithms. Databases have annotated the features contained in the flanking regions of the ENST transcripts and these are available in the art.

TABLE 7
Familial Cancer Syndrome Targets

| Familial | Tumor | ENST | ENSP | | | Tumor |
|---|---|---|---|---|---|---|
| Cancer | Suppressor | SEQ | SEQ | | Chromosomal | Types |
| Syndrome | Gene | ID | ID | Function | Location | Observed |
| Li-Fraumeni | P53 | — | — | cell cycle | 17p13.1 | brain tumors, |
| Syndrome | | | | regulation, | | sarcomas, |
| | | | | apoptosis | | leukemia, breast |
| | | | | | | cancer |
| Familial | RB1 | 3632-3634 | 8169-8171 | cell cycle | 13q14.1-q14.2 | retinoblastoma, |
| Retino- | | | | regulation | | osteogenic |
| blastoma | | | | | | sarcoma |
| Wilms | WT1 | 4530-4537 | 9067-9074 | transcriptional | 11p13 | pediatric kidney |
| Tumor | | | | regulation | | cancer, most |
| | | | | | | common form |
| | | | | | | of childhood |
| | | | | | | solid tumor |
| Neurofibro- | NF1 | 2762-2767 | 7299-7304 | catalysis of RAS | 17q11.2 | neurofibromas, |
| matosis | | | | inactivation | | sarcomas, |
| Type 1 | | | | | | gliomas |
| Neurofibro- | NF2 | 2768-2780 | 7305-7317 | linkage of cell | 22q12.2 | Schwann cell |
| matosis | | | | membrane to | | tumors, |
| Type 2 | | | | actin | | astrocytomas, |
| | | | | cytoskeleton | | meningiomas, |
| | | | | | | ependymonas |
| Familial | APC | 233-238 | 4781-4786 | signaling | 5q21-q22 | colon cancer |
| Adeno- | | | | through adhesion | | |
| matous | | | | molecules to | | |
| Polyposis | | | | nucleus | | |
| Tuberous | TSC1 | 4317-4322 | 8854-8859 | forms complex | 9q34 | seizures, mental |
| sclerosis 1 | | | | with TSC2 | | retardation, |
| | | | | protein, inhibits | | facial |
| | | | | signaling to | | angiofibromas |
| | | | | downstream | | |
| | | | | effectors of | | |
| | | | | mTOR | | |
| Tuberous | TSC2 | 4323-4328 | 8860-8865 | forms complex | 16p13.3 | benign growths |
| sclerosis 2 | | | | with TSC1 | | (hamartomas) |
| | | | | protein, inhibits | | in many tissues, |
| | | | | signaling to | | astrocytomas, |
| | | | | downstream | | rhabdomyo- |
| | | | | effectors of | | sarcomas |
| | | | | mTOR | | |
| Deleted in | DPC4, also | — | — | regulation of | 18q21.1 | pancreatic |
| Pancreatic | known as | | | TGF-β/BMP | | carcinoma, |
| Carcinoma | SMAD4 | | | signal | | colon cancer |
| 4, Familial | | | | transduction | | |
| juvenile | | | | | | |
| polyposis | | | | | | |
| syndrome | | | | | | |
| Deleted in | DCC | 1329-1332 | 5875-5878 | transmembrane | 18q21.3 | colorectal |
| Colorectal | | | | receptor | | cancer |
| Carcinoma | | | | involved in | | |
| | | | | axonal guidance | | |
| | | | | via netrins | | |
| Familial | BRCA1 | 57-593 | 5118-5141 | functions in | 17q21 | breast and |
| Breast | | | | transcription, | | ovarian cancer |
| Cancer | | | | DNA binding, | | |
| | | | | transcription | | |
| | | | | coupled DNA | | |
| | | | | repair, | | |
| | | | | homologous | | |
| | | | | recombination, | | |
| | | | | chromosomal | | |
| | | | | stability, | | |
| | | | | ubiquitination | | |
| | | | | of proteins, and | | |
| | | | | centrosome | | |
| | | | | replication | | |
| Familial | BRCA2 | 594-596 | 5142-5144 | transcriptional | 13q12.3 | breast and |
| Breast | (FANCD1) | | | regulation of | | ovarian cancer |
| Cancer | | | | genes involved | | |
| | | | | in DNA repair | | |
| | | | | and homologous | | |
| | | | | recombination | | |
| Cowden | PTEN | 3057 | 7594 | phosphoinositide | 10q23.3 | gliomas, breast |
| syndrome | | | | 3-phosphatase, | | cancer, thyroid |
| | | | | protein tyrosine | | cancer, head & |
| | | | | phosphatase | | neck squamous |
| | | | | | | carcinoma |
| Peutz- | STK11 | 3806-3807 | 8343-8344 | phosphorylates | 19p13.3 | hyper- |
| Jeghers | (serine- | | | and activates | | pigmentation, |
| Syndrome | threonine | | | AMP-activated | | multiple |
| (PJS) | kinase 11) | | | kinase (AMPK), | | hamartomatous |
| | | | | AMPK involved | | polyps, |
| | | | | in stress | | colorectal, |
| | | | | responses, lipid | | breast and |
| | | | | and glucose | | ovarian cancers |
| | | | | meatabolism | | |
| Hereditary | MSH2 | 2607-2616 | 7144-7153 | DNA mismatch | 2p22-p21 | colon cancer |
| Nonpolyposis | | | | repair | | |
| Colon Cancer | | | | | | |
| type 1, | | | | | | |
| HNPCC1 | | | | | | |
| Hereditary | MLH1 | 2588-2599 | 7125-7136 | DNA mismatch | 3p21.3 | colon cancer |
| Nonpolyposis | | | | repair | | |
| Colon Cancer | | | | | | |
| type 2, | | | | | | |
| HNPCC2 | | | | | | |
| Familial | CDH1 | 658-661 | 5206-5209 | cell-cell | 16q22.1 | gastric cancer, |
| diffuse- | | | | adhesion protein | | lobular breast |
| type gastric | | | | | | cancer |
| cancer | | | | | | |
| von Hippel- | VHL | 4486-4488 | 9023-9025 | regulation of | 3p26-p25 | renal cancers, |
| Lindau | | | | transcription | | hemangio- |
| Syndrome | | | | elongation | | blastomas, |
| | | | | through | | pheochromo- |
| | | | | activation of a | | cytoma, retinal |
| | | | | ubiquitin ligase | | angioma |
| | | | | complex | | |
| Familial | CDKN2A | 704-723 | 5252-5271 | p16INK4 | 9p21 | melanoma, |
| Melanoma | | | | inhibits cell- | | pancreatic |
| | | | | cycle kinases | | cancer, others |
| | | | | CDK4 and | | |
| | | | | CDK6; p14ARF | | |
| | | | | binds the p53 | | |
| | | | | stabilizing | | |
| | | | | protein MDM2 | | |
| Gorlin | PTCH | 3000-3016 | 7547-7553 | transmembrane | 9q22.3 | basal cell skin |
| Syndrome: | (e.g., | | | receptor for | | carcinoma |
| Nevoid | PTCH1, | | | sonic hedgehog | | |
| basal cell | PTCH2) | | | (shh), involved | | |
| carcinoma | | | | in early develop- | | |
| syndrome | | | | ment through | | |
| (NBCCS) | | | | repression of | | |
| | | | | action of | | |
| | | | | smoothened | | |
| Multiple | MEN1 | 2570-2584 | 7107-7121 | intrastrand DNA | 11q13 | parathyroid and |
| Endocrine | | | | crosslink repair | | pituitary |
| Neoplasia | | | | | | adenomas, islet |
| Type 1 | | | | | | cell tumors, |
| | | | | | | carcinoid |

### Protein Cleavage Signals and Sites

[0181] In one embodiment, the oncology-related polypeptides of the present invention may include at least one protein cleavage signal containing at least one protein cleavage site. The protein cleavage site may be located at the N-terminus, the C-terminus, at any space between the N- and the C-termini such as, but not limited to, half-way between the N- and C-termini, between the N-terminus and the half way point, between the half way point and the C-terminus, and combinations thereof.

[0182] The oncology-related polypeptides of the present invention may include, but is not limited to, a proprotein convertase (or prohormone convertase), thrombin or Factor Xa protein cleavage signal. Proprotein convertases are a family of nine proteinases, comprising seven basic amino acid-specific subtilisin-like serine proteinases related to yeast kexin, known as prohormone convertase 1/3 (PC1/3), PC2, furin, PC4, PC5/6, paired basic amino-acid cleaving enzyme 4 (PACE4) and PC7, and two other subtilases that cleave at non-basic residues, called subtilisin kexin isozyme 1 (SKI-1) and proprotein convertase subtilisin kexin 9 (PCSK9). Non-limiting examples of protein cleavage signal amino acid sequences are listing in Table 8. In Table 8, “X” refers to any amino acid, “n” may be 0, 2, 4 or 6 amino acids and “*” refers to the protein cleavage site. In Table 8, SEQ ID NO: 33885 refers to when n=4 and SEQ ID NO: 33886 refers to when n=6.

TABLE 8
Protein Cleavage Site Sequences

| Protein | Amino Acid | |
|---|---|---|
| Cleavage | Cleavage | SEQ ID |
| Signal | Sequence | NO |
| Proprotein | R-X-X-R* | 33883 |
| convertase | R-X-K/R-R* | 33884 |
| | K/R-Xn-K/R* | 33885 or 33886 |
| Thrombin | L-V-P-R*-G-S | 33887 |
| | L-V-P-R* | 33888 |
| | A/F/G/I/L/T/V/M-A/ | 33889 |
| | F/G/I/L/T/V/W-P-R* | |
| Factor Xa | I-E-G-R* | 33890 |
| | I-D-G-R* | 33891 |
| | A-E-G-R* | 33892 |
| | A/F/G/I/L/T/V/M-D/ | 33893 |
| | E-G-R* | |

[0183] In one embodiment, the oncology-related primary constructs and the oncology-related mmRNA of the present invention may be engineered such that the oncology-related primary construct or oncology-related mmRNA contains at least one encoded protein cleavage signal. The encoded protein cleavage signal may be located before the start codon, after the start codon, before the coding region, within the coding region such as, but not limited to, half way in the coding region, between the start codon and the half way point, between the half way point and the stop codon, after the coding region, before the stop codon, between two stop codons, after the stop codon and combinations thereof.

[0184] In one embodiment, the oncology-related primary constructs or oncology-related mmRNA of the present invention may include at least one encoded protein cleavage signal containing at least one protein cleavage site. The encoded protein cleavage signal may include, but is not limited to, a proprotein convertase (or prohormone convertase), thrombin and/or Factor Xa protein cleavage signal. One of skill in the art may use Table 1 above or other known methods to determine the appropriate encoded protein cleavage signal to include in the oncology-related primary constructs or mmRNA of the present invention. For example, starting with the signal of Table 8 and considering the codons of Table 1 one can design a signal for the oncology-related primary construct which can produce a protein signal in the resulting oncology-related polypeptide.

[0185] In one embodiment, the oncology-related polypeptides of the present invention include at least one protein cleavage signal and/or site.

[0186] As a non-limiting example, U.S. Pat. No. 7,374,930 and U.S. Pub. No. 20090227660, herein incorporated by reference in their entireties, use a furin cleavage site to cleave the N-terminal methionine of GLP-1 in the expression product from the Golgi apparatus of the cells. In one embodiment, the polypeptides of the present invention include at least one protein cleavage signal and/or site with the proviso that the polypeptide is not GLP-1.

[0187] In one embodiment, the oncology-related primary constructs or oncology-related mmRNA of the present invention includes at least one encoded protein cleavage signal and/or site.

[0188] In one embodiment, the oncology-related primary constructs or oncology-related mmRNA of the present invention includes at least one encoded protein cleavage signal and/or site with the proviso that the oncology-related primary construct or oncology-related mmRNA does not encode GLP-1.

[0189] In one embodiment, the oncology-related primary constructs or oncology-related mmRNA of the present invention may include more than one coding region. Where multiple coding regions are present in the oncology-related primary construct or oncology-related mmRNA of the present invention, the multiple coding regions may be separated by encoded protein cleavage sites. As a non-limiting example, the oncology-related primary construct or oncology-related mmRNA may be signed in an ordered pattern. On such pattern follows AXBY form where A and B are coding regions which may be the same or different coding regions and/or may encode the same or different oncology-related polypeptides, and X and Y are encoded protein cleavage signals which may encode the same or different protein cleavage signals. A second such pattern follows the form AXYBZ where A and B are coding regions which may be the same or different coding regions and/or may encode the same or different oncology-related polypeptides, and X, Y and Z are encoded protein cleavage signals which may encode the same or different protein cleavage signals. A third pattern follows the form ABXCY where A, B and C are coding regions which may be the same or different coding regions and/or may encode the same or different oncology-related polypeptides, and X and Y are encoded protein cleavage signals which may encode the same or different protein cleavage signals.

[0190] In one embodiment, the oncology-related polypeptides, oncology-related primary constructs and oncology-related mmRNA can also contain sequences that encode protein cleavage sites so that the oncology-related polypeptides, oncology-related primary constructs and oncology-related mmRNA can be released from a carrier region or a fusion partner by treatment with a specific protease for said protein cleavage site.

[0191] In one embodiment, the oncology-related polypeptides, primary constructs and mmRNA of the present invention may include a sequence encoding the 2A peptide. In one embodiment, this sequence may be used to separate the coding region of two or more polypeptides of interest. As a non-limiting example, the sequence encoding the 2A peptide may be between coding region A and coding region B (A-2Apep-B). The presence of the 2A peptide would result in the cleavage of one long protein into protein A, protein B and the 2A peptide. Protein A and protein B may be the same or different polypeptides of interest. In another embodiment, the 2A peptide may be used in the oncology-related polynucleotides, primary constructs and/or mmRNA of the present invention to produce two, three, four, five, six, seven, eight, nine, ten or more proteins.

### Incorporating Post Transcriptional Control Modulators

[0192] In one embodiment, the oncology-related polynucleotides, primary constructs and/or mmRNA of the present invention may include at least one post transcriptional control modulator. These post transcriptional control modulators may be, but are not limited to, small molecules, compounds and regulatory sequences. As a non-limiting example, post transcriptional control may be achieved using small molecules identified by PTC Therapeutics Inc. (South Plainfield, NJ) using their GEMS™ (Gene Expression Modulation by Small-Molecules) screening technology.

[0193] The post transcriptional control modulator may be a gene expression modulator which is screened by the method detailed in or a gene expression modulator described in International Publication No. WO2006022712, herein incorporated by reference in its entirety. Methods identifying RNA regulatory sequences involved in translational control are described in International Publication No. WO2004067728, herein incorporated by reference in its entirety; methods identifying compounds that modulate untranslated region dependent expression of a gene are described in International Publication No. WO2004065561, herein incorporated by reference in its entirety.

[0194] In one embodiment, the oncology-related polynucleotides, primary constructs and/or mmRNA of the present invention may include at least one post transcriptional control modulator is located in the 5′ and/or the 3′ untranslated region of the polynucleotides, primary constructs and/or mmRNA of the present invention

[0195] In another embodiment, the oncology-related polynucleotides, primary constructs and/or mmRNA of the present invention may include at least one post transcription control modulator to modulate premature translation termination. The post transcription control modulators may be compounds described in or a compound found by methods outlined in International Publication No. WO2004010106, WO2006044456, WO2006044682, WO2006044503 and WO2006044505, each of which is herein incorporated by reference in its entirety. As a non-limiting example, the compound may bind to a region of the 28S ribosomal RNA in order to modulate premature translation termination (See e.g., WO2004010106, herein incorporated by reference in its entirety).

[0196] In one embodiment, the oncology-related polynucleotides, primary constructs and/or mmRNA of the present invention may include at least one post transcription control modulator to alter protein expression. As a non-limiting example, the expression of VEGF may be regulated using the compounds described in or a compound found by the methods described in International Publication Nos. WO2005118857, WO2006065480, WO2006065479 and WO2006058088, each of which is herein incorporated by reference in its entirety.

[0197] The oncology-related polynucleotides, primary constructs and/or mmRNA of the present invention may include at least one post transcription control modulator to control translation. In one embodiment, the post transcription control modulator may be a RNA regulatory sequence. As a non-limiting example, the RNA regulatory sequence may be identified by the methods described in International Publication No. WO2006071903, herein incorporated by reference in its entirety.

### III. Modifications

[0198] Herein, in an oncology-related polynucleotide (such as an oncology-related primary construct or an oncology-related mRNA molecule), the terms “modification” or, as appropriate, “modified” refer to modification with respect to A, G, U or C ribonucleotides. Generally, herein, these terms are not intended to refer to the ribonucleotide modifications in naturally occurring 5′-terminal mRNA cap moieties. In a polypeptide, the term “modification” refers to a modification as compared to the canonical set of 20 amino acids, moiety)

[0199] The modifications may be various distinct modifications. In some embodiments, the coding region, the flanking regions and/or the terminal regions may contain one, two, or more (optionally different) nucleoside or nucleotide modifications. In some embodiments, a modified oncology-related polynucleotide, oncology-related primary construct, or oncology-related mmRNA introduced to a cell may exhibit reduced degradation in the cell, as compared to an unmodified oncology-related polynucleotide, oncology-related primary construct, or oncology-related mmRNA.

[0200] The oncology-related polynucleotides, oncology-related primary constructs, and oncology-related mmRNA can include any useful modification, such as to the sugar, the nucleobase, or the internucleoside linkage (e.g. to a linking phosphate/to a phosphodiester linkage/to the phosphodiester backbone). One or more atoms of a pyrimidine nucleobase may be replaced or substituted with optionally substituted amino, optionally substituted thiol, optionally substituted alkyl (e.g., methyl or ethyl), or halo (e.g., chloro or fluoro). In certain embodiments, modifications (e.g., one or more modifications) are present in each of the sugar and the internucleoside linkage. Modifications according to the present invention may be modifications of ribonucleic acids (RNAs) to deoxyribonucleic acids (DNAs), threose nucleic acids (TNAs), glycol nucleic acids (GNAs), peptide nucleic acids (PNAs), locked nucleic acids (LNAs) or hybrids thereof). Additional modifications are described herein.

[0201] As described herein, the oncology-related polynucleotides, oncology-related primary constructs, and oncology-related mmRNA of the invention do not substantially induce an innate immune response of a cell into which the mRNA is introduced. Features of an induced innate immune response include 1) increased expression of pro-inflammatory cytokines, 2) activation of intracellular PRRs (RIG-I, MDA5, etc, and/or 3) termination or reduction in protein translation.

[0202] In certain embodiments, it may desirable to intracellularly degrade a modified nucleic acid molecule introduced into the cell. For example, degradation of a modified oncology-related nucleic acid molecule may be preferable if precise timing of protein production is desired. Thus, in some embodiments, the invention provides a modified oncology-related nucleic acid molecule containing a degradation domain, which is capable of being acted on in a directed manner within a cell. In another aspect, the present disclosure provides oncology-related polynucleotides comprising a nucleoside or nucleotide that can disrupt the binding of a major groove interacting, e.g. binding, partner with the polynucleotide (e.g., where the modified nucleotide has decreased binding affinity to major groove interacting partner, as compared to an unmodified nucleotide).

[0203] The oncology-related polynucleotides, oncology-related primary constructs, and oncology-related mmRNA can optionally include other agents (e.g., RNAi-inducing agents, RNAi agents, siRNAs, shRNAs, miRNAs, antisense RNAs, ribozymes, catalytic DNA, tRNA, RNAs that induce triple helix formation, aptamers, vectors, etc.). In some embodiments, the oncology-related polynucleotides, oncology-related primary constructs, or oncology-related mmRNA may include one or more messenger RNAs (mRNAs) and one or more modified nucleoside or nucleotides (e.g., mmRNA molecules). Details for these oncology-related polynucleotides, oncology-related primary constructs, and oncology-related mmRNA follow.

### Oncology-Related Polynucleotides and Oncology-Related Primary Constructs

[0204] The oncology-related polynucleotides, primary constructs, and mmRNA of the invention includes a first region of linked nucleosides encoding a polypeptide of interest, a first flanking region located at the 5′ terminus of the first region, and a second flanking region located at the 3′ terminus of the first region.

[0205] In some embodiments, the oncology-related polynucleotide, primary construct, or mmRNA (e.g., the first region, first flanking region, or second flanking region) includes n number of linked nucleosides having Formula (Ia) or Formula (Ia-1):

[chemical structure]

or a pharmaceutically acceptable salt or stereoisomer thereof,
[0206] wherein
[0207] U is O, S, N(R^{U})ₙᵤ, or C(R^{U})ₙᵤ, wherein nu is an integer from 0 to 2 and each R^{U} is, independently, H, halo, or optionally substituted alkyl;
[0208] - - - is a single bond or absent;
[0209] each of R^{1′}, R^{2′}, R^{1″}, R^{2″}, R¹, R², R³, R⁴, and R⁵ is, independently, if present, H, halo, hydroxy, thiol, optionally substituted alkyl, optionally substituted alkoxy, optionally substituted alkenyloxy, optionally substituted alkynyloxy, optionally substituted aminoalkoxy, optionally substituted alkoxyalkoxy, optionally substituted hydroxyalkoxy, optionally substituted amino, azido, optionally substituted aryl, optionally substituted aminoalkyl, optionally substituted aminoalkenyl, optionally substituted aminoalkynyl, or absent; wherein the combination of R³ with one or more of R^{1′}, R^{1″}, R^{2′}, R^{2″}, or R⁵ (e.g., the combination of R¹ and R³, the combination of R^{1″} and R³, the combination of R^{2′} and R³, the combination of R^{2″} and R³, or the combination of R⁵ and R³) can join together to form optionally substituted alkylene or optionally substituted heteroalkylene and, taken together with the carbons to which they are attached, provide an optionally substituted heterocyclyl (e.g., a bicyclic, tricyclic, or tetracyclic heterocyclyl); wherein the combination of R⁵ with one or more of R^{1′}, R^{1″}, R^{2′} or R^{2″} (e.g., the combination of R¹ and R⁵, the combination of R^{1″} and R⁵, the combination of R^{2′} and R⁵, or the combination of R^{2″} and R⁵) can join together to form optionally substituted alkylene or optionally substituted heteroalkylene and, taken together with the carbons to which they are attached, provide an optionally substituted heterocyclyl (e.g., a bicyclic, tricyclic, or tetracyclic heterocyclyl); and wherein the combination of R⁴ and one or more of R^{1′}, R^{1″}, R^{2′}, R^{2″}, R³, or R⁵ can join together to form optionally substituted alkylene or optionally substituted heteroalkylene and, taken together with the carbons to which they are attached, provide an optionally substituted heterocyclyl (e.g., a bicyclic, tricyclic, or tetracyclic heterocyclyl); each of m′ and m″ is, independently, an integer from 0 to 3 (e.g., from 0 to 2, from 0 to 1, from 1 to 3, or from 1 to 2);
[0210] each of Y¹, Y², and Y³, is, independently, O, S, Se, —NR^{N1}—, optionally substituted alkylene, or optionally substituted heteroalkylene, wherein R^{N1} is H, optionally substituted alkyl, optionally substituted alkenyl, optionally substituted alkynyl, optionally substituted aryl, or absent;
[0211] each Y⁴ is, independently, H, hydroxy, thiol, boranyl, optionally substituted alkyl, optionally substituted alkenyl, optionally substituted alkynyl, optionally substituted alkoxy, optionally substituted alkenyloxy, optionally substituted alkynyloxy, optionally substituted thioalkoxy, optionally substituted alkoxyalkoxy, or optionally substituted amino;
[0212] each Y⁵ is, independently, O, S, Se, optionally substituted alkylene (e.g., methylene), or optionally substituted heteroalkylene;
[0213] n is an integer from 1 to 100,000; and
[0214] B is a nucleobase (e.g., a purine, a pyrimidine, or derivatives thereof), wherein the combination of B and R^{1′}, the combination of B and R^{2′}, the combination of B and R^{1″}, or the combination of B and R^{2″} can, taken together with the carbons to which they are attached, optionally form a bicyclic group (e.g., a bicyclic heterocyclyl) or wherein the combination of B, R^{1″}, and R³ or the combination of B, R^{2″}, and R³ can optionally form a tricyclic or tetracyclic group (e.g., a tricyclic or tetracyclic heterocyclyl, such as in Formula (IIo)-(IIp) herein). In some embodiments, the oncology-related polynucleotide, primary construct, or mmRNA includes a modified ribose. In some embodiments, the oncology-related polynucleotide, primary construct, or mmRNA (e.g., the first region, the first flanking region, or the second flanking region) includes n number of linked nucleosides having Formula (Ia-2)-(Ia-5) or a pharmaceutically acceptable salt or stereoisomer thereof.

[chemical structure]

[0215] In some embodiments, the oncology-related polynucleotide, primary construct, or mmRNA (e.g., the first region, the first flanking region, or the second flanking region) includes n number of linked nucleosides having Formula (Ib) or Formula (Ib-1):

[chemical structure]

or a pharmaceutically acceptable salt or stereoisomer thereof,
[0216] wherein
[0217] U is O, S, N(R^{U})ₙᵤ, or C(R^{U})ₙᵤ, wherein nu is an integer from 0 to 2 and each R^{U} is, independently, H, halo, or optionally substituted alkyl;
[0218] - - - is a single bond or absent;
[0219] each of R¹, R^{3′}, R^{3″}, and R⁴ is, independently, H, halo, hydroxy, optionally substituted alkyl, optionally substituted alkoxy, optionally substituted alkenyloxy, optionally substituted alkynyloxy, optionally substituted aminoalkoxy, optionally substituted alkoxyalkoxy, optionally substituted hydroxyalkoxy, optionally substituted amino, azido, optionally substituted aryl, optionally substituted aminoalkyl, optionally substituted aminoalkenyl, optionally substituted aminoalkynyl, or absent; and wherein the combination of R¹ and R^{3′} or the combination of R¹ and R^{3″} can be taken together to form optionally substituted alkylene or optionally substituted heteroalkylene (e.g., to produce a locked nucleic acid);
[0220] each R⁵ is, independently, H, halo, hydroxy, optionally substituted alkyl, optionally substituted alkoxy, optionally substituted alkenyloxy, optionally substituted alkynyloxy, optionally substituted aminoalkoxy, optionally substituted alkoxyalkoxy, or absent;
[0221] each of Y¹, Y², and Y³ is, independently, O, S, Se, —NR^{N1}—, optionally substituted alkylene, or optionally substituted heteroalkylene, wherein R^{N1} is H, optionally substituted alkyl, optionally substituted alkenyl, optionally substituted alkynyl, or optionally substituted aryl;
[0222] each Y⁴ is, independently, H, hydroxy, thiol, boranyl, optionally substituted alkyl, optionally substituted alkenyl, optionally substituted alkynyl, optionally substituted alkoxy, optionally substituted alkenyloxy, optionally substituted alkynyloxy, optionally substituted alkoxyalkoxy, or optionally substituted amino;
[0223] n is an integer from 1 to 100,000; and
[0224] B is a nucleobase.

[0225] In some embodiments, the oncology-related polynucleotide, primary construct, or mmRNA (e.g., the first region, first flanking region, or second flanking region) includes n number of linked nucleosides having Formula (Ic):

[chemical structure]

or a pharmaceutically acceptable salt or stereoisomer thereof,
[0226] wherein
[0227] U is O, S, N(R^{U})ₙᵤ, or C(R^{U})ₙᵤ, wherein nu is an integer from 0 to 2 and each R^{U} is, independently, H, halo, or optionally substituted alkyl;
[0228] - - - is a single bond or absent;
[0229] each of B¹, B², and B³ is, independently, a nucleobase (e.g., a purine, a pyrimidine, or derivatives thereof, as described herein), H, halo, hydroxy, thiol, optionally substituted alkyl, optionally substituted alkoxy, optionally substituted alkenyloxy, optionally substituted alkynyloxy, optionally substituted aminoalkoxy, optionally substituted alkoxyalkoxy, optionally substituted hydroxyalkoxy, optionally substituted amino, azido, optionally substituted aryl, optionally substituted aminoalkyl, optionally substituted aminoalkenyl, or optionally substituted aminoalkynyl, wherein one and only one of B¹, B², and B³ is a nucleobase;
[0230] each of R^{b1}, R^{b2}, R^{b3}, R³, and R⁵ is, independently, H, halo, hydroxy, thiol, optionally substituted alkyl, optionally substituted alkoxy, optionally substituted alkenyloxy, optionally substituted alkynyloxy, optionally substituted aminoalkoxy, optionally substituted alkoxyalkoxy, optionally substituted hydroxyalkoxy, optionally substituted amino, azido, optionally substituted aryl, optionally substituted aminoalkyl, optionally substituted aminoalkenyl or optionally substituted aminoalkynyl;
[0231] each of Y¹, Y², and Y³, is, independently, O, S, Se, —NR^{N1}—, optionally substituted alkylene, or optionally substituted heteroalkylene, wherein R^{N1} is H, optionally substituted alkyl, optionally substituted alkenyl, optionally substituted alkynyl, or optionally substituted aryl;
[0232] each Y⁴ is, independently, H, hydroxy, thiol, boranyl, optionally substituted alkyl, optionally substituted alkenyl, optionally substituted alkynyl, optionally substituted alkoxy, optionally substituted alkenyloxy, optionally substituted alkynyloxy, optionally substituted thioalkoxy, optionally substituted alkoxyalkoxy, or optionally substituted amino;
[0233] each Y⁵ is, independently, O, S, Se, optionally substituted alkylene (e.g., methylene), or optionally substituted heteroalkylene;
[0234] n is an integer from 1 to 100,000; and
[0235] wherein the ring including U can include one or more double bonds.

[0236] In particular embodiments, the ring including U does not have a double bond between U-CB³R^{b3} or between CB³R^{b3}—CB²R^{b2}.

[0237] In some embodiments, the oncology-related polynucleotide, primary construct, or mmRNA (e.g., the first region, first flanking region, or second flanking region) includes n number of linked nucleosides having Formula (Id):

[chemical structure]

or a pharmaceutically acceptable salt or stereoisomer thereof,
[0238] wherein
[0239] U is O, S, N(R^{U})ₙᵤ, or C(R^{U})ₙᵤ, wherein nu is an integer from 0 to 2 and each R^{U} is, independently, H, halo, or optionally substituted alkyl;
[0240] each R³ is, independently, H, halo, hydroxy, thiol, optionally substituted alkyl, optionally substituted alkoxy, optionally substituted alkenyloxy, optionally substituted alkynyloxy, optionally substituted aminoalkoxy, optionally substituted alkoxyalkoxy, optionally substituted hydroxyalkoxy, optionally substituted amino, azido, optionally substituted aryl, optionally substituted aminoalkyl, optionally substituted aminoalkenyl, or optionally substituted aminoalkynyl;
[0241] each of Y¹, Y², and Y³, is, independently, O, S, Se, —NR^{N1}—, optionally substituted alkylene, or optionally substituted heteroalkylene, wherein R^{N1} is H, optionally substituted alkyl, optionally substituted alkenyl, optionally substituted alkynyl, or optionally substituted aryl;
[0242] each Y⁴ is, independently, H, hydroxy, thiol, boranyl, optionally substituted alkyl, optionally substituted alkenyl, optionally substituted alkynyl, optionally substituted alkoxy, optionally substituted alkenyloxy, optionally substituted alkynyloxy, optionally substituted thioalkoxy, optionally substituted alkoxyalkoxy, or optionally substituted amino;
[0243] each Y⁵ is, independently, O, S, optionally substituted alkylene (e.g., methylene), or optionally substituted heteroalkylene;
[0244] n is an integer from 1 to 100,000; and
[0245] B is a nucleobase (e.g., a purine, a pyrimidine, or derivatives thereof).

[0246] In some embodiments, the oncology-related polynucleotide, primary construct, or mmRNA (e.g., the first region, first flanking region, or second flanking region) includes n number of linked nucleosides having Formula (Ie):

[chemical structure]

or a pharmaceutically acceptable salt or stereoisomer thereof,
[0247] wherein
[0248] each of U′ and U″ is, independently, O, S, N(R^{U})ₙᵤ, or C(R^{U})ₙᵤ, wherein nu is an integer from 0 to 2 and each R^{U} is, independently, H, halo, or optionally substituted alkyl;
[0249] each R⁶ is, independently, H, halo, hydroxy, thiol, optionally substituted alkyl, optionally substituted alkoxy, optionally substituted alkenyloxy, optionally substituted alkynyloxy, optionally substituted aminoalkoxy, optionally substituted alkoxyalkoxy, optionally substituted hydroxyalkoxy, optionally substituted amino, azido, optionally substituted aryl, optionally substituted aminoalkyl, optionally substituted aminoalkenyl, or optionally substituted aminoalkynyl;
[0250] each Y^{5′} is, independently, O, S, optionally substituted alkylene (e.g., methylene or ethylene), or optionally substituted heteroalkylene;
[0251] n is an integer from 1 to 100,000; and
[0252] B is a nucleobase (e.g., a purine, a pyrimidine, or derivatives thereof).

[0253] In some embodiments, the oncology-related polynucleotide, primary construct, or mmRNA (e.g., the first region, first flanking region, or second flanking region) includes n number of linked nucleosides having Formula (If) or (If-1):

[chemical structure]

or a pharmaceutically acceptable salt or stereoisomer thereof,
[0254] wherein
[0255] each of U′ and U″ is, independently, O, S, N, N(R^{U})ₙᵤ, or C(R^{U})ₙᵤ, wherein nu is an integer from 0 to 2 and each R^{U} is, independently, H, halo, or optionally substituted alkyl (e.g., U′ is O and U″ is N);
[0256] - - - is a single bond or absent;
[0257] each of R¹, R^{2′}, R^{1″}, R^{2″}, R³, and R⁴ is, independently, H, halo, hydroxy, thiol, optionally substituted alkyl, optionally substituted alkoxy, optionally substituted alkenyloxy, optionally substituted alkynyloxy, optionally substituted aminoalkoxy, optionally substituted alkoxyalkoxy, optionally substituted hydroxyalkoxy, optionally substituted amino, azido, optionally substituted aryl, optionally substituted aminoalkyl, optionally substituted aminoalkenyl, optionally substituted aminoalkynyl, or absent; and wherein the combination of R^{1′} and R³, the combination of R^{1″} and R³, the combination of R^{2′} and R³, or the combination of R^{2″} and R³ can be taken together to form optionally substituted alkylene or optionally substituted heteroalkylene (e.g., to produce a locked nucleic acid); each of m′ and m″ is, independently, an integer from 0 to 3 (e.g., from 0 to 2, from 0 to 1, from 1 to 3, or from 1 to 2);
[0258] each of Y¹, Y², and Y³, is, independently, O, S, Se, —NR^{N1}—, optionally substituted alkylene, or optionally substituted heteroalkylene, wherein R^{N1} is H, optionally substituted alkyl, optionally substituted alkenyl, optionally substituted alkynyl, optionally substituted aryl, or absent;
[0259] each Y⁴ is, independently, H, hydroxy, thiol, boranyl, optionally substituted alkyl, optionally substituted alkenyl, optionally substituted alkynyl, optionally substituted alkoxy, optionally substituted alkenyloxy, optionally substituted alkynyloxy, optionally substituted thioalkoxy, optionally substituted alkoxyalkoxy, or optionally substituted amino;
[0260] each Y⁵ is, independently, O, S, Se, optionally substituted alkylene (e.g., methylene), or optionally substituted heteroalkylene;
[0261] n is an integer from 1 to 100,000; and
[0262] B is a nucleobase (e.g., a purine, a pyrimidine, or derivatives thereof).

[0263] In some embodiments of the oncology-related polynucleotides, primary constructs, or mmRNA (e.g., Formulas (Ia), (Ia-1)-(Ia-3), (Ib)-(If), and (IIa)-(IIp)), the ring including U has one or two double bonds.

[0264] In some embodiments of the oncology-related polynucleotides, primary constructs, or mmRNA (e.g., Formulas (Ia)-(Ia-5), (Ib)-(If-1), (IIa)-(IIp), (IIb-1), (IIb-2), (IIc-1)-(IIc-2), (IIn-1), (IIn-2), (IVa)-(IVl), and (IXa)-(IXr)), each of R¹, R^{1′}, and R^{1″}, if present, is H. In further embodiments, each of R², R^{2′}, and R^{2″}, if present, is, independently, H, halo (e.g., fluoro), hydroxy, optionally substituted alkoxy (e.g., methoxy or ethoxy), or optionally substituted alkoxyalkoxy. In particular embodiments, alkoxyalkoxy is —(CH₂)ₛ₂ (OCH₂CH₂)ₛ₁ (CH₂)ₛ₃OR′, wherein s1 is an integer from 1 to 10 (e.g., from 1 to 6 or from 1 to 4), each of s2 and s3, independently, is an integer from 0 to 10 (e.g., from 0 to 4, from 0 to 6, from 1 to 4, from 1 to 6, or from 1 to 10), and R′ is H or C₁₋₂₀ alkyl). In some embodiments, s2 is 0, s1 is 1 or 2, s3 is 0 or 1, and R′ is C₁₋₆ alkyl.

[0265] In some embodiments of the oncology-related polynucleotides, primary constructs, or mmRNA (e.g., Formulas (Ia)-(Ia-5), (Ib)-(If-1), (IIa)-(IIp), (IIb-1), (IIb-2), (IIc-1)-(IIc-2), (IIn-1), (IIn-2), (IVa)-(IVl), and (IXa)-(IXr)), each of R², R^{2′}, and R^{2″}, if present, is H. In further embodiments, each of R¹, R^{1′}, and R^{1″}, if present, is, independently, H, halo (e.g., fluoro), hydroxy, optionally substituted alkoxy (e.g., methoxy or ethoxy), or optionally substituted alkoxyalkoxy. In particular embodiments, alkoxyalkoxy is —(CH₂)ₛ₂ (OCH₂CH₂)ₛ₁ (CH₂)ₛ₃OR′, wherein s1 is an integer from 1 to 10 (e.g., from 1 to 6 or from 1 to 4), each of s2 and s3, independently, is an integer from 0 to 10 (e.g., from 0 to 4, from 0 to 6, from 1 to 4, from 1 to 6, or from 1 to 10), and R′ is H or C₁₋₂₀ alkyl). In some embodiments, s2 is 0, s1 is 1 or 2, s3 is 0 or 1, and R′ is C₁₋₆ alkyl.

[0266] In some embodiments of the oncology-related polynucleotides, primary constructs, or mmRNA (e.g., Formulas (Ia)-(Ia-5), (Ib)-(If-1), (IIa)-(IIp), (IIb-1), (IIb-2), (IIc-1)-(IIc-2), (IIn-1), (IIn-2), (IVa)-(IVl), and (IXa)-(IXr)), each of R³, R⁴, and R⁵ is, independently, H, halo (e.g., fluoro), hydroxy, optionally substituted alkyl, optionally substituted alkoxy (e.g., methoxy or ethoxy), or optionally substituted alkoxyalkoxy. In particular embodiments, R³ is H, R⁴ is H, R⁵ is H, or R³, R⁴, and R⁵ are all H. In particular embodiments, R³ is C₁₋₆ alkyl, R⁴ is C₁₋₆ alkyl, R⁵ is C₁₋₆ alkyl, or R³, R⁴, and R⁵ are all C₁₋₆ alkyl. In particular embodiments, R³ and R⁴ are both H, and R⁵ is C₁₋₆ alkyl.

[0267] In some embodiments of the oncology-related polynucleotides, primary constructs, or mmRNA (e.g., Formulas (Ia)-(Ia-5), (Ib)-(If-1), (IIa)-(IIp), (IIb-1), (IIb-2), (IIc-1)-(IIc-2), (IIn-1), (IIn-2), (IVa)-(IVl), and (IXa)-(IXr)), R³ and R⁵ join together to form optionally substituted alkylene or optionally substituted heteroalkylene and, taken together with the carbons to which they are attached, provide an optionally substituted heterocyclyl (e.g., a bicyclic, tricyclic, or tetracyclic heterocyclyl, such as trans-3′,4′ analogs, wherein R³ and R⁵ join together to form heteroalkylene (e.g., —(CH₂)_{b1}O(CH₂)_{b2}O(CH₂)_{b3}—, wherein each of b1, b2, and b3 are, independently, an integer from 0 to 3).

[0268] In some embodiments of the oncology-related polynucleotides, primary constructs, or mmRNA (e.g., Formulas (Ia)-(Ia-5), (Ib)-(If-1), (IIa)-(IIp), (IIb-1), (IIb-2), (IIc-1)-(IIc-2), (IIn-1), (IIn-2), (IVa)-(IVl), and (IXa)-(IXr)), R³ and one or more of R^{1′}, R^{1″}, R^{2′}, R^{2″}, or R⁵ join together to form optionally substituted alkylene or optionally substituted heteroalkylene and, taken together with the carbons to which they are attached, provide an optionally substituted heterocyclyl (e.g., a bicyclic, tricyclic, or tetracyclic heterocyclyl, R³ and one or more of R^{1′}R^{1″}, R^{2′}, R^{2″}, or R⁵ join together to form heteroalkylene (e.g., —(CH₂)_{b1}O(CH₂)_{b2}O(CH₂)_{b3}—, wherein each of b1, b2, and b3 are, independently, an integer from 0 to 3).

[0269] In some embodiments of the oncology-related polynucleotides, primary constructs, or mmRNA (e.g., Formulas (Ia)-(Ia-5), (Ib)-(If-1), (IIa)-(IIp), (IIb-1), (IIb-2), (IIc-1)-(IIc-2), (IIn-1), (IIn-2), (IVa)-(IVl), and (IXa)-(IXr)), R⁵ and one or more of R^{1′}, R^{1″}, R^{2′}, or R^{2″} join together to form optionally substituted alkylene or optionally substituted heteroalkylene and, taken together with the carbons to which they are attached, provide an optionally substituted heterocyclyl (e.g., a bicyclic, tricyclic, or tetracyclic heterocyclyl, R⁵ and one or more of R^{1′}, R^{1″}, R^{2′}, or R^{2″} join together to form heteroalkylene (e.g., —(CH₂)_{b1}O(CH₂)_{b2}O(CH₂)_{b3}—, wherein each of b1, b2, and b3 are, independently, an integer from 0 to 3).

[0270] In some embodiments of the oncology-related polynucleotides, primary constructs, or mmRNA (e.g., Formulas (Ia)-(Ia-5), (Ib)-(If-1), (IIa)-(IIp), (IIb-1), (IIb-2), (IIc-1)-(IIc-2), (IIn-1), (IIn-2), (IVa)-(IVl), and (IXa)-(IXr)), each Y² is, independently, O, S, or —NR^{N1}—, wherein R^{N1} is H, optionally substituted alkyl, optionally substituted alkenyl, optionally substituted alkynyl, or optionally substituted aryl. In particular embodiments, Y² is NR^{N1}—, wherein R^{N1} is H or optionally substituted alkyl (e.g., C₁₋₆ alkyl, such as methyl, ethyl, isopropyl, or n-propyl).

[0271] In some embodiments of the oncology-related polynucleotides, primary constructs, or mmRNA (e.g., Formulas (Ia)-(Ia-5), (Ib)-(If-1), (IIa)-(IIp), (IIb-1), (IIb-2), (IIc-1)-(IIc-2), (IIn-1), (IIn-2), (IVa)-(IVl), and (IXa)-(IXr)), each Y³ is, independently, O or S.

[0272] In some embodiments of the oncology-related polynucleotides, primary constructs, or mmRNA (e.g., Formulas (Ia)-(Ia-5), (Ib)-(If-1), (IIa)-(IIp), (IIb-1), (IIb-2), (IIc-1)-(IIc-2), (IIn-1), (IIn-2), (IVa)-(IVl), and (IXa)-(IXr)), R¹ is H; each R² is, independently, H, halo (e.g., fluoro), hydroxy, optionally substituted alkoxy (e.g., methoxy or ethoxy), or optionally substituted alkoxyalkoxy (e.g., —(CH₂)ₛ₂ (OCH₂CH₂)ₛ₁(CH₂)ₛ₃OR′, wherein s1 is an integer from 1 to 10 (e.g., from 1 to 6 or from 1 to 4), each of s2 and s3, independently, is an integer from 0 to 10 (e.g., from 0 to 4, from 0 to 6, from 1 to 4, from 1 to 6, or from 1 to 10), and R′ is H or C₁₋₂₀ alkyl, such as wherein s2 is 0, s1 is 1 or 2, s3 is 0 or 1, and R′ is C₁₋₆ alkyl); each Y² is, independently, O or —NR^{N1}—, wherein R^{N1} is H, optionally substituted alkyl, optionally substituted alkenyl, optionally substituted alkynyl, or optionally substituted aryl (e.g., wherein R^{N1} is H or optionally substituted alkyl (e.g., C₁₋₆ alkyl, such as methyl, ethyl, isopropyl, or n-propyl)); and each Y³ is, independently, O or S (e.g., S). In further embodiments, R³ is H, halo (e.g., fluoro), hydroxy, optionally substituted alkyl, optionally substituted alkoxy (e.g., methoxy or ethoxy), or optionally substituted alkoxyalkoxy. In yet further embodiments, each Y¹ is, independently, O or —NR^{N1}—, wherein R^{N1} is H, optionally substituted alkyl, optionally substituted alkenyl, optionally substituted alkynyl, or optionally substituted aryl (e.g., wherein R^{N1} is H or optionally substituted alkyl (e.g., C₁₋₆ alkyl, such as methyl, ethyl, isopropyl, or n-propyl)); and each Y⁴ is, independently, H, hydroxy, thiol, optionally substituted alkyl, optionally substituted alkoxy, optionally substituted thioalkoxy, optionally substituted alkoxyalkoxy, or optionally substituted amino.

[0273] In some embodiments of the oncology-related polynucleotides, primary constructs, or mmRNA (e.g., Formulas (Ia)-(Ia-5), (Ib)-(If-1), (IIa)-(IIp), (IIb-1), (IIb-2), (IIc-1)-(IIc-2), (IIn-1), (IIn-2), (IVa)-(IVl), and (IXa)-(IXr)), each R¹ is, independently, H, halo (e.g., fluoro), hydroxy, optionally substituted alkoxy (e.g., methoxy or ethoxy), or optionally substituted alkoxyalkoxy (e.g., —(CH₂)ₛ₂(OCH₂CH₂)ₛ₁(CH₂)ₛ₃OR′, wherein s1 is an integer from 1 to 10 (e.g., from 1 to 6 or from 1 to 4), each of s2 and s3, independently, is an integer from 0 to 10 (e.g., from 0 to 4, from 0 to 6, from 1 to 4, from 1 to 6, or from 1 to 10), and R′ is H or C₁₋₂₀ alkyl, such as wherein s2 is 0, s1 is 1 or 2, s3 is 0 or 1, and R′ is C₁₋₆ alkyl); R² is H; each Y² is, independently, O or —NR^{N1}—, wherein R^{N1} is H, optionally substituted alkyl, optionally substituted alkenyl, optionally substituted alkynyl, or optionally substituted aryl (e.g., wherein R^{N1} is H or optionally substituted alkyl (e.g., C₁₋₆ alkyl, such as methyl, ethyl, isopropyl, or n-propyl)); and each Y³ is, independently, O or S (e.g., S). In further embodiments, R³ is H, halo (e.g., fluoro), hydroxy, optionally substituted alkyl, optionally substituted alkoxy (e.g., methoxy or ethoxy), or optionally substituted alkoxyalkoxy. In yet further embodiments, each Y¹ is, independently, O or —NR^{N1}—, wherein R^{N1} is H, optionally substituted alkyl, optionally substituted alkenyl, optionally substituted alkynyl, or optionally substituted aryl (e.g., wherein R^{N1} is H or optionally substituted alkyl (e.g., C₁₋₆ alkyl, such as methyl, ethyl, isopropyl, or n-propyl)); and each Y⁴ is, independently, H, hydroxy, thiol, optionally substituted alkyl, optionally substituted alkoxy, optionally substituted thioalkoxy, optionally substituted alkoxyalkoxy, or optionally substituted amino.

[0274] In some embodiments of the oncology-related polynucleotides, primary constructs, or mmRNA (e.g., Formulas (Ia)-(Ia-5), (Ib)-(If-1), (IIa)-(IIp), (IIb-1), (IIb-2), (IIc-1)-(IIc-2), (IIn-1), (IIn-2), (IVa)-(IVl), and (IXa)-(IXr)), the ring including U is in the β-D (e.g., β-D-ribo) configuration.

[0275] In some embodiments of the oncology-related polynucleotides, primary constructs, or mmRNA (e.g., Formulas (Ia)-(Ia-5), (Ib)-(If-1), (IIa)-(IIp), (IIb-1), (IIb-2), (IIc-1)-(IIc-2), (IIn-1), (IIn-2), (IVa)-(IVl), and (IXa)-(IXr)), the ring including U is in the α-L (e.g., α-L-ribo) configuration.

[0276] In some embodiments of the oncology-related polynucleotides, primary constructs, or mmRNA (e.g., Formulas (Ia)-(Ia-5), (Ib)-(If-1), (IIa)-(IIp), (IIb-1), (IIb-2), (IIc-1)-(IIc-2), (IIn-1), (IIn-2), (IVa)-(IVl), and (IXa)-(IXr)), one or more B is not pseudouridine (W) or 5-methyl-cytidine (m⁵C). In some embodiments, about 10% to about 100% of n number of B nucleobases is not W or m⁵C (e.g., from 10% to 20%, from 10% to 35%, from 10% to 50%, from 10% to 60%, from 10% to 75%, from 10% to 90%, from 10% to 95%, from 10% to 98%, from 10% to 99%, from 20% to 35%, from 20% to 50%, from 20% to 60%, from 20% to 75%, from 20% to 90%, from 20% to 95%, from 20% to 98%, from 20% to 99%, from 20% to 100%, from 50% to 60%, from 50% to 75%, from 50% to 90%, from 50% to 95%, from 50% to 98%, from 50% to 99%, from 50% to 100%, from 75% to 90%, from 75% to 95%, from 75% to 98%, from 75% to 99%, and from 75% to 100% of n number of B is not ψ or m⁵C). In some embodiments, B is not ψ or m⁵C.

[0277] In some embodiments of the oncology-related polynucleotides, primary constructs, or mmRNA (e.g., Formulas (Ia)-(Ia-5), (Ib)-(If-1), (IIa)-(IIp), (IIb-1), (IIb-2), (IIc-1)-(IIc-2), (IIn-1), (IIn-2), (IVa)-(IVl), and (IXa)-(IXr)), when B is an unmodified nucleobase selected from cytosine, guanine, uracil and adenine, then at least one of Y¹, Y², or Y³ is not O.

[0278] In some embodiments, the oncology-related polynucleotide, primary construct, or mmRNA includes a modified ribose. In some embodiments, the oncology-related polynucleotide, primary construct, or mmRNA (e.g., the first region, the first flanking region, or the second flanking region) includes n number of linked nucleosides having Formula (IIa)-(IIc):

[chemical structure]

or a pharmaceutically acceptable salt or stereoisomer thereof. In particular embodiments, U is O or C(R^{U})nu, wherein nu is an integer from 0 to 2 and each R^{U} is, independently, H, halo, or optionally substituted alkyl (e.g., U is —CH₂— or —CH—). In other embodiments, each of R¹, R², R³, R⁴, and R⁵ is, independently, H, halo, hydroxy, thiol, optionally substituted alkyl, optionally substituted alkoxy, optionally substituted alkenyloxy, optionally substituted alkynyloxy, optionally substituted aminoalkoxy, optionally substituted alkoxyalkoxy, optionally substituted hydroxyalkoxy, optionally substituted amino, azido, optionally substituted aryl, optionally substituted aminoalkyl, optionally substituted aminoalkenyl, optionally substituted aminoalkynyl, or absent (e.g., each R¹ and R² is, independently, H, halo, hydroxy, optionally substituted alkyl, or optionally substituted alkoxy; each R³ and R⁴ is, independently, H or optionally substituted alkyl; and R⁵ is H or hydroxy), and - - - is a single bond or double bond. In particular embodiments, the polynucleotides or mmRNA includes n number of linked nucleosides having Formula (IIb-1)-(IIb-2):

[chemical structure]

or a pharmaceutically acceptable salt or stereoisomer thereof. In some embodiments, U is O or C(R^{U})ₙᵤ, wherein nu is an integer from 0 to 2 and each R^{U} is, independently, H, halo, or optionally substituted alkyl (e.g., U is —CH₂— or —CH—). In other embodiments, each of R¹ and R² is, independently, H, halo, hydroxy, thiol, optionally substituted alkyl, optionally substituted alkoxy, optionally substituted alkenyloxy, optionally substituted alkynyloxy, optionally substituted aminoalkoxy, optionally substituted alkoxyalkoxy, optionally substituted hydroxyalkoxy, optionally substituted amino, azido, optionally substituted aryl, optionally substituted aminoalkyl, optionally substituted aminoalkenyl, optionally substituted aminoalkynyl, or absent (e.g., each R¹ and R² is, independently, H, halo, hydroxy, optionally substituted alkyl, or optionally substituted alkoxy, e.g., H, halo, hydroxy, alkyl, or alkoxy). In particular embodiments, R² is hydroxy or optionally substituted alkoxy (e.g., methoxy, ethoxy, or any described herein).

[0279] In particular embodiments, the oncology-related polynucleotide, primary construct, or mmRNA includes n number of linked nucleosides having Formula (IIc-1)-(IIc-4):

[chemical structure]

or a pharmaceutically acceptable salt or stereoisomer thereof. In some embodiments, U is O or C(R^{U})ₙᵤ, wherein nu is an integer from 0 to 2 and each R^{U} is, independently, H, halo, or optionally substituted alkyl (e.g., U is —CH₂— or —CH—). In some embodiments, each of R¹, R², and R³ is, independently, H, halo, hydroxy, thiol, optionally substituted alkyl, optionally substituted alkoxy, optionally substituted alkenyloxy, optionally substituted alkynyloxy, optionally substituted aminoalkoxy, optionally substituted alkoxyalkoxy, optionally substituted hydroxyalkoxy, optionally substituted amino, azido, optionally substituted aryl, optionally substituted aminoalkyl, optionally substituted aminoalkenyl, optionally substituted aminoalkynyl, or absent (e.g., each R¹ and R² is, independently, H, halo, hydroxy, optionally substituted alkyl, or optionally substituted alkoxy, e.g., H, halo, hydroxy, alkyl, or alkoxy; and each R³ is, independently, H or optionally substituted alkyl)). In particular embodiments, R² is optionally substituted alkoxy (e.g., methoxy or ethoxy, or any described herein). In particular embodiments, R¹ is optionally substituted alkyl, and R² is hydroxy. In other embodiments, R¹ is hydroxy, and R² is optionally substituted alkyl. In further embodiments, R³ is optionally substituted alkyl.

[0280] In some embodiments, the oncology-related polynucleotide, primary construct, or mmRNA includes an acyclic modified ribose. In some embodiments, the oncology-related polynucleotide, primary construct, or mmRNA (e.g., the first region, the first flanking region, or the second flanking region) includes n number of linked nucleosides having Formula (IId)-(IIf):

[chemical structure]

or a pharmaceutically acceptable salt or stereoisomer thereof.

[0281] In some embodiments, the oncology-related polynucleotide, primary construct, or mmRNA includes an acyclic modified hexitol. In some embodiments, the oncology-related polynucleotide, primary construct, or mmRNA (e.g., the first region, the first flanking region, or the second flanking region) includes n number of linked nucleosides Formula (IIg)-(IIj):

[chemical structure]

or a pharmaceutically acceptable salt or stereoisomer thereof.

[0282] In some embodiments, the oncology-related polynucleotide, primary construct, or mmRNA includes a sugar moiety having a contracted or an expanded ribose ring. In some embodiments, the oncology-related polynucleotide, primary construct, or mmRNA (e.g., the first region, the first flanking region, or the second flanking region) includes n number of linked nucleosides having Formula (IIk)-(IIm).

[chemical structure]

or a pharmaceutically acceptable salt or stereoisomer thereof, wherein each of R^{1′}, R^{1″}, R^{2′}, and R^{2″} is, independently, H, halo, hydroxy, optionally substituted alkyl, optionally substituted alkoxy, optionally substituted alkenyloxy, optionally substituted alkynyloxy, optionally substituted aminoalkoxy, optionally substituted alkoxyalkoxy, or absent; and wherein the combination of R^{2′} and R³ or the combination of R^{2″} and R³ can be taken together to form optionally substituted alkylene or optionally substituted heteroalkylene.

[0283] In some embodiments, the oncology-related polynucleotide, primary construct, or mmRNA includes a locked modified ribose. In some embodiments, the oncology-related polynucleotide, primary construct, or mmRNA (e.g., the first region, the first flanking region, or the second flanking region) includes n number of linked nucleosides having Formula (IIn):

[chemical structure]

or a pharmaceutically acceptable salt or stereoisomer thereof, wherein R^{3′} is O, S, or —NR^{N1}—, wherein R^{N1} is H, optionally substituted alkyl, optionally substituted alkenyl, optionally substituted alkynyl, or optionally substituted aryl and R^{3″} is optionally substituted alkylene (e.g., —CH₂—, —CH₂CH₂—, or —CH₂CH₂CH₂—) or optionally substituted heteroalkylene (e.g., —CH₂NH—, —CH₂CH₂NH—, —CH₂OCH₂—, or —CH₂CH₂OCH₂-)(e.g., R^{3′} is O and R^{3″} is optionally substituted alkylene (e.g., —CH₂—, —CH₂CH₂—, or —CH₂CH₂CH₂—)).

[0284] In some embodiments, the oncology-related polynucleotide, primary construct, or mmRNA includes n number of linked nucleosides having Formula (IIn-1)-(II-n2):

[chemical structure]

or a pharmaceutically acceptable salt or stereoisomer thereof, wherein R^{3′} is O, S, or —NR^{N1}—, wherein R^{N1} is H, optionally substituted alkyl, optionally substituted alkenyl, optionally substituted alkynyl, or optionally substituted aryl and R^{3″} is optionally substituted alkylene (e.g., —CH₂—, —CH₂CH₂—, or —CH₂CH₂CH₂—) or optionally substituted heteroalkylene (e.g., —CH₂NH—, —CH₂CH₂NH—, —CH₂OCH₂—, or —CH₂CH₂OCH₂—) (e.g., R^{3′} is O and R^{3″} is optionally substituted alkylene (e.g., —CH₂—, —CH₂CH₂—, or —CH₂CH₂CH₂—.

[0285] In some embodiments, the oncology-related polynucleotide, primary construct, or mmRNA includes a locked modified ribose that forms a tetracyclic heterocyclyl. In some embodiments, the oncology-related polynucleotide, primary construct, or mmRNA (e.g., the first region, the first flanking region, or the second flanking region) includes n number of linked nucleosides having Formula (IIo):

[chemical structure]

or a pharmaceutically acceptable salt or stereoisomer thereof, wherein R^{12a}, R^{12c}, T^{1′}, T^{1″}, T^{2′}, T^{2″}, V¹, and V³ are as described herein.

[0286] Any of the formulas for the oncology-related polynucleotides, primary constructs, or mmRNA can include one or more nucleobases described herein (e.g., Formulas (b1)-(b43)).

[0287] In one embodiment, the present invention provides methods of preparing a polynucleotide, primary construct, or mmRNA, wherein the polynucleotide comprises n number of nucleosides having Formula (Ia), as defined herein:

[chemical structure]

[0288] the method comprising reacting a compound of Formula (IIIa), as defined herein:

[chemical structure]

[0289] with an RNA polymerase, and a cDNA template.

[0290] In a further embodiment, the present invention provides methods of amplifying a polynucleotide, primary construct, or mmRNA comprising at least one nucleotide (e.g., mmRNA molecule), the method comprising:

reacting a compound of Formula (IIIa), as defined herein, with a primer, a cDNA template, and an RNA polymerase.

[0291] In one embodiment, the present invention provides methods of preparing a polynucleotide, primary construct, or mmRNA comprising at least one nucleotide (e.g., mmRNA molecule), wherein the polynucleotide comprises n number of nucleosides having Formula (Ia), as defined herein:

[chemical structure]

the method comprising reacting a compound of Formula (IIIa-1), as defined herein:

[chemical structure]

[0292] with an RNA polymerase, and a cDNA template.

[0293] In a further embodiment, the present invention provides methods of amplifying a polynucleotide, primary construct, or mmRNA comprising at least one nucleotide (e.g., mmRNA molecule), the method comprising:

reacting a compound of Formula (IIIa-1), as defined herein, with a primer, a cDNA template, and an RNA polymerase.

[0294] In one embodiment, the present invention provides methods of preparing a modified mRNA comprising at least one nucleotide (e.g., mmRNA molecule), wherein the polynucleotide comprises n number of nucleosides having Formula (Ia-2), as defined herein:

[chemical structure]

the method comprising reacting a compound of Formula (IIIa-2), as defined herein:

[chemical structure]

[0295] with an RNA polymerase, and a cDNA template.

[0296] In a further embodiment, the present invention provides methods of amplifying a modified mRNA comprising at least one nucleotide (e.g., mmRNA molecule), the method comprising:
[0297] reacting a compound of Formula (IIIa-2), as defined herein, with a primer, a cDNA template, and an RNA polymerase.

[0298] In some embodiments, the reaction may be repeated from 1 to about 7,000 times. In any of the embodiments herein, B may be a nucleobase of Formula (b1)-(b43).

[0299] The oncology-related polynucleotides, primary constructs, and mmRNA can optionally include 5′ and/or 3′ flanking regions, which are described herein.

Modified RNA (mmRNA) Molecules

[0300] The present invention also includes building blocks, e.g., modified ribonucleosides, modified ribonucleotides, of modified RNA (mmRNA) molecules. For example, these building blocks can be useful for preparing the oncology-related polynucleotides, primary constructs, or mmRNA of the invention.

[0301] In some embodiments, the building block molecule has Formula (IIIa) or (IIIa-1):

[chemical structure]

or a pharmaceutically acceptable salt or stereoisomer thereof, wherein the substituents are as described herein (e.g., for Formula (Ia) and (Ia-1)), and wherein when B is an unmodified nucleobase selected from cytosine, guanine, uracil and adenine, then at least one of Y¹, Y², or Y³ is not O.

[0302] In some embodiments, the building block molecule, which may be incorporated into a polynucleotide, primary construct, or mmRNA, has Formula (IVa)-(IVb).

[chemical structure]

or a pharmaceutically acceptable salt or stereoisomer thereof, wherein B is as described herein (e.g., any one of (b1)-(b43)). In particular embodiments, Formula (IVa) or (IVb) is combined with a modified uracil (e.g., any one of formulas (b1)-(b9), (b21)-(b23), and (b28)-(b31), such as formula (b1), (b8), (b28), (b29), or (b30)). In particular embodiments, Formula (IVa) or (IVb) is combined with a modified cytosine (e.g., any one of formulas (b10)-(b14), (b24), (b25), and (b32)-(b36), such as formula (b10) or (b32)). In particular embodiments, Formula (IVa) or (IVb) is combined with a modified guanine (e.g., any one of formulas (b15)-(b17) and (b37)-(b40)). In particular embodiments, Formula (IVa) or (IVb) is combined with a modified adenine (e.g., any one of formulas (b18)-(b20) and (b41)-(b43)).

[0303] In some embodiments, the building block molecule, which may be incorporated into a polynucleotide, primary construct, or mmRNA, has Formula (IVc)-(IVk):

[chemical structure]

[chemical structure]

or a pharmaceutically acceptable salt or stereoisomer thereof, wherein B is as described herein (e.g., any one of (b1)-(b43)). In particular embodiments, one of Formulas (IVc)-(IVk) is combined with a modified uracil (e.g., any one of formulas (b1)-(b9), (b21)-(b23), and (b28)-(b31), such as formula (b1), (b8), (b28), (b29), or (b30)). In particular embodiments, one of Formulas (IVc)-(IVk) is combined with a modified cytosine (e.g., any one of formulas (b10)-(b14), (b24), (b25), and (b32)-(b36), such as formula (b10) or (b32)). In particular embodiments, one of Formulas (IVc)-(IVk) is combined with a modified guanine (e.g., any one of formulas (b15)-(b17) and (b37)-(b40)). In particular embodiments, one of Formulas (IVc)-(IVk) is combined with a modified adenine (e.g., any one of formulas (b18)-(b20) and (b41)-(b43)).

[0304] In other embodiments, the building block molecule, which may be incorporated into a polynucleotide, primary construct, or mmRNA, has Formula (Va) or (Vb):

[chemical structure]

or a pharmaceutically acceptable salt or stereoisomer thereof, wherein B is as described herein (e.g., any one of (b1)-(b43)).

[0305] In other embodiments, the building block molecule, which may be incorporated into a polynucleotide, primary construct, or mmRNA, has Formula (IXa)-(IXd):

[chemical structure]

or a pharmaceutically acceptable salt or stereoisomer thereof, wherein B is as described herein (e.g., any one of (b1)-(b43)). In particular embodiments, one of Formulas (IXa)-(IXd) is combined with a modified uracil (e.g., any one of formulas (b1)-(b9), (b21)-(b23), and (b28)-(b31), such as formula (b1), (b8), (b28), (b29), or (b30)). In particular embodiments, one of Formulas (IXa)-(IXd) is combined with a modified cytosine (e.g., any one of formulas (b10)-(b14), (b24), (b25), and (b32)-(b36), such as formula (b10) or (b32)). In particular embodiments, one of Formulas (IXa)-(IXd) is combined with a modified guanine (e.g., any one of formulas (b15)-(b17) and (b37)-(b40)). In particular embodiments, one of Formulas (IXa)-(IXd) is combined with a modified adenine (e.g., any one of formulas (b18)-(b20) and (b41)-(b43)).

[0306] In other embodiments, the building block molecule, which may be incorporated into a polynucleotide, primary construct, or mmRNA, has Formula (IXe)—(IXg):

[chemical structure]

or a pharmaceutically acceptable salt or stereoisomer thereof, wherein B is as described herein (e.g., any one of (b1)-(b43)). In particular embodiments, one of Formulas (IXe)—(IXg) is combined with a modified uracil (e.g., any one of formulas (b1)-(b9), (b21)-(b23), and (b28)-(b31), such as formula (b1), (b8), (b28), (b29), or (b30)). In particular embodiments, one of Formulas (IXe)—(IXg) is combined with a modified cytosine (e.g., any one of formulas (b1O)-(b14), (b24), (b25), and (b32)-(b36), such as formula (b1O) or (b32)). In particular embodiments, one of Formulas (IXe)—(IXg) is combined with a modified guanine (e.g., any one of formulas (b15)-(b17) and (b37)-(b40)). In particular embodiments, one of Formulas (IXe)—(IXg) is combined with a modified adenine (e.g., any one of formulas (b18)-(b20) and (b41)-(b43)).

[0307] In other embodiments, the building block molecule, which may be incorporated into a polynucleotide, primary construct, or mmRNA, has Formula (IXh)-(IXk):

[chemical structure]

or a pharmaceutically acceptable salt or stereoisomer thereof, wherein B is as described herein (e.g., any one of (b1)-(b43)). In particular embodiments, one of Formulas (IXh)-(IXk) is combined with a modified uracil (e.g., any one of formulas (b1)-(b9), (b21)-(b23), and (b28)-(b31), such as formula (b1), (b8), (b28), (b29), or (b30)). In particular embodiments, one of Formulas (IXh)-(IXk) is combined with a modified cytosine (e.g., any one of formulas (b10)-(b14), (b24), (b25), and (b32)-(b36), such as formula (b10) or (b32)). In particular embodiments, one of Formulas (IXh)-(IXk) is combined with a modified guanine (e.g., any one of formulas (b15)-(b17) and (b37)-(b40)). In particular embodiments, one of Formulas (IXh)-(IXk) is combined with a modified adenine (e.g., any one of formulas (b18)-(b20) and (b41)-(b43)).

[0308] In other embodiments, the building block molecule, which may be incorporated into a polynucleotide, primary construct, or mmRNA, has Formula (IXl)-(IXr):

[chemical structure]

or a pharmaceutically acceptable salt or stereoisomer thereof, wherein each r1 and r2 is, independently, an integer from 0 to 5 (e.g., from 0 to 3, from 1 to 3, or from 1 to 5) and B is as described herein (e.g., any one of (b1)-(b43)). In particular embodiments, one of Formulas (IXl)-(IXr) is combined with a modified uracil (e.g., any one of formulas (b1)-(b9), (b21)-(b23), and (b28)-(b31), such as formula (b1), (b8), (b28), (b29), or (b30)). In particular embodiments, one of Formulas (IXl)-(IXr) is combined with a modified cytosine (e.g., any one of formulas (b10)-(b14), (b24), (b25), and (b32)-(b36), such as formula (b10) or (b32)). In particular embodiments, one of Formulas (IXl)-(IXr) is combined with a modified guanine (e.g., any one of formulas (b15)-(b17) and (b37)-(b40)). In particular embodiments, one of Formulas (IXl)-(IXr) is combined with a modified adenine (e.g., any one of formulas (b18)-(b20) and (b41)-(b43)).

[0309] In some embodiments, the building block molecule, which may be incorporated into a polynucleotide, primary construct, or mmRNA, can be selected from the group consisting of:

[chemical structure]

[chemical structure]

or a pharmaceutically acceptable salt or stereoisomer thereof, wherein each r is, independently, an integer from 0 to 5 (e.g., from 0 to 3, from 1 to 3, or from 1 to 5).

[0310] In some embodiments, the building block molecule, which may be incorporated into a polynucleotide, primary construct, or mmRNA, can be selected from the group consisting of:

[chemical structure]

[chemical structure]

or a pharmaceutically acceptable salt or stereoisomer thereof, wherein each r is, independently, an integer from 0 to 5 (e.g., from 0 to 3, from 1 to 3, or from 1 to 5) and s1 is as described herein.

[0311] In some embodiments, the building block molecule, which may be incorporated into a nucleic acid (e.g., RNA, mRNA, polynucleotide, primary construct, or mmRNA), is a modified uridine (e.g., selected from the group consisting of:

[chemical structure]

[chemical structure]

[chemical structure]

[chemical structure]

[chemical structure]

[chemical structure]

[chemical structure]

[chemical structure]

[chemical structure]

[chemical structure]

[chemical structure]

[chemical structure]

[chemical structure]

[chemical structure]

[chemical structure]

[chemical structure]

[chemical structure]

[chemical structure]

[chemical structure]

[chemical structure]

[chemical structure]

[chemical structure]

[chemical structure]

or a pharmaceutically acceptable salt or stereoisomer thereof, wherein Y¹, Y³, Y⁴, Y⁶, and r are as described herein (e.g., each r is, independently, an integer from 0 to 5, such as from 0 to 3, from 1 to 3, or from 1 to 5)).

[0312] In some embodiments, the building block molecule, which may be incorporated into a polynucleotide, primary construct, or mmRNA, is a modified cytidine (e.g., selected from the group consisting of:

[chemical structure]

[chemical structure]

[chemical structure]

[chemical structure]

[chemical structure]

[chemical structure]

[chemical structure]

or a pharmaceutically acceptable salt or stereoisomer thereof, wherein Y¹, Y³, Y⁴, Y⁶, and r are as described herein (e.g., each r is, independently, an integer from 0 to 5, such as from 0 to 3, from 1 to 3, or from 1 to 5)). For example, the building block molecule, which may be incorporated into a polynucleotide, primary construct, or mmRNA, can be:

[chemical structure]

or a pharmaceutically acceptable salt or stereoisomer thereof, wherein each r is, independently, an integer from 0 to 5 (e.g., from 0 to 3, from 1 to 3, or from 1 to 5).

[0313] In some embodiments, the building block molecule, which may be incorporated into a polynucleotide, primary construct, or mmRNA, is a modified adenosine (e.g., selected from the group consisting of:

[chemical structure]

[chemical structure]

[chemical structure]

[chemical structure]

[chemical structure]

[chemical structure]

[chemical structure]

[chemical structure]

[chemical structure]

pharmaceutically acceptable salt or stereoisomer thereof, wherein Y¹, Y³, Y⁴, Y⁶, and r are as described herein (e.g., each r is, independently, an integer from 0 to 5, such as from 0 to 3, from 1 to 3, or from 1 to 5)).

[0314] In some embodiments, the building block molecule, which may be incorporated into a polynucleotide, primary construct, or mmRNA, is a modified guanosine (e.g., selected from the group consisting of:

[chemical structure]

[chemical structure]

[chemical structure]

[chemical structure]

[chemical structure]

[chemical structure]

[chemical structure]

[chemical structure]

or a pharmaceutically acceptable salt or stereoisomer thereof, wherein Y¹, Y³, Y⁴, Y⁶, and r are as described herein (e.g., each r is, independently, an integer from 0 to 5, such as from 0 to 3, from 1 to 3, or from 1 to 5)).

[0315] In some embodiments, the chemical modification can include replacement of C group at C-5 of the ring (e.g., for a pyrimidine nucleoside, such as cytosine or uracil) with N (e.g., replacement of the >CH group at C-5 with >NR^{N1} group, wherein R^{N}1 is H or optionally substituted alkyl). For example, the building block molecule, which may be incorporated into a polynucleotide, primary construct, or mmRNA, can be:

[chemical structure]

or a pharmaceutically acceptable salt or stereoisomer thereof, wherein each r is, independently, an integer from 0 to 5 (e.g., from 0 to 3, from 1 to 3, or from 1 to 5).

[0316] In another embodiment, the chemical modification can include replacement of the hydrogen at C-5 of cytosine with halo (e.g., Br, Cl, F, or I) or optionally substituted alkyl (e.g., methyl). For example, the building block molecule, which may be incorporated into a polynucleotide, primary construct, or mmRNA, can be:

[chemical structure]

or a pharmaceutically acceptable salt or stereoisomer thereof, wherein each r is, independently, an integer from 0 to 5 (e.g., from 0 to 3, from 1 to 3, or from 1 to 5).

[0317] In yet a further embodiment, the chemical modification can include a fused ring that is formed by the NH₂ at the C-4 position and the carbon atom at the C-5 position. For example, the building block molecule, which may be incorporated into a polynucleotide, primary construct, or mmRNA, can be:

[chemical structure]

or a pharmaceutically acceptable salt or stereoisomer thereof, wherein each r is, independently, an integer from 0 to 5 (e.g., from 0 to 3, from 1 to 3, or from 1 to 5).

### Modifications on the Sugar

[0318] The modified nucleosides and nucleotides (e.g., building block molecules), which may be incorporated into a polynucleotide, primary construct, or mmRNA (e.g., RNA or mRNA, as described herein), can be modified on the sugar of the ribonucleic acid. For example, the 2′ hydroxyl group (OH) can be modified or replaced with a number of different substituents. Exemplary substitutions at the 2′-position include, but are not limited to, H, halo, optionally substituted C₁₋₆ alkyl; optionally substituted C₁₋₆ alkoxy; optionally substituted C₆₋₁₀ aryloxy; optionally substituted C₃₋₈ cycloalkyl; optionally substituted C₃₋₈ cycloalkoxy; optionally substituted C₆₋₁₀ aryloxy; optionally substituted C₆₋₁₀ aryl-C₁₋₆ alkoxy, optionally substituted C₁₋₁₂ (heterocyclyl)oxy; a sugar (e.g., ribose, pentose, or any described herein); a polyethyleneglycol (PEG), —O(CH₂CH₂O)ₙCH₂CH₂OR, where R is H or optionally substituted alkyl, and n is an integer from 0 to 20 (e.g., from 0 to 4, from 0 to 8, from 0 to 10, from 0 to 16, from 1 to 4, from 1 to 8, from 1 to 10, from 1 to 16, from 1 to 20, from 2 to 4, from 2 to 8, from 2 to 10, from 2 to 16, from 2 to 20, from 4 to 8, from 4 to 10, from 4 to 16, and from 4 to 20); “locked” nucleic acids (LNA) in which the 2′-hydroxyl is connected by a C₁₋₆ alkylene or C₁₋₆ heteroalkylene bridge to the 4′-carbon of the same ribose sugar, where exemplary bridges included methylene, propylene, ether, or amino bridges; aminoalkyl, as defined herein; aminoalkoxy, as defined herein; amino as defined herein; and amino acid, as defined herein

[0319] Generally, RNA includes the sugar group ribose, which is a 5-membered ring having an oxygen. Exemplary, non-limiting modified nucleotides include replacement of the oxygen in ribose (e.g., with S, Se, or alkylene, such as methylene or ethylene); addition of a double bond (e.g., to replace ribose with cyclopentenyl or cyclohexenyl); ring contraction of ribose (e.g., to form a 4-membered ring of cyclobutane or oxetane); ring expansion of ribose (e.g., to form a 6- or 7-membered ring having an additional carbon or heteroatom, such as for anhydrohexitol, altritol, mannitol, cyclohexanyl, cyclohexenyl, and morpholino that also has a phosphoramidate backbone); multicyclic forms (e.g., tricyclo; and “unlocked” forms, such as glycol nucleic acid (GNA) (e.g., R-GNA or S-GNA, where ribose is replaced by glycol units attached to phosphodiester bonds), threose nucleic acid (TNA, where ribose is replace with α-L-threofuranosyl-(3′→2′)), and peptide nucleic acid (PNA, where 2-amino-ethyl-glycine linkages replace the ribose and phosphodiester backbone). The sugar group can also contain one or more carbons that possess the opposite stereochemical configuration than that of the corresponding carbon in ribose. Thus, a polynucleotide, primary construct, or mmRNA molecule can include nucleotides containing, e.g., arabinose, as the sugar.

### Modifications on the Nucleobase

[0320] The present disclosure provides for modified nucleosides and nucleotides. As described herein “nucleoside” is defined as a compound containing a sugar molecule (e.g., a pentose or ribose) or a derivative thereof in combination with an organic base (e.g., a purine or pyrimidine) or a derivative thereof (also referred to herein as “nucleobase”). As described herein, “nucleotide” is defined as a nucleoside including a phosphate group. The modified nucleotides may by synthesized by any useful method, as described herein (e.g., chemically, enzymatically, or recombinantly to include one or more modified or non-natural nucleosides).

[0321] The modified nucleotide base pairing encompasses not only the standard adenosine-thymine, adenosine-uracil, or guanosine-cytosine base pairs, but also base pairs formed between nucleotides and/or modified nucleotides comprising non-standard or modified bases, wherein the arrangement of hydrogen bond donors and hydrogen bond acceptors permits hydrogen bonding between a non-standard base and a standard base or between two complementary non-standard base structures. One example of such non-standard base pairing is the base pairing between the modified nucleotide inosine and adenine, cytosine or uracil.

[0322] The modified nucleosides and nucleotides can include a modified nucleobase. Examples of nucleobases found in RNA include, but are not limited to, adenine, guanine, cytosine, and uracil. Examples of nucleobase found in DNA include, but are not limited to, adenine, guanine, cytosine, and thymine. These nucleobases can be modified or wholly replaced to provide oncology-related polynucleotides, primary constructs, or mmRNA molecules having enhanced properties, e.g., resistance to nucleases through disruption of the binding of a major groove binding partner. Table 9 below identifies the chemical faces of each canonical nucleotide. Circles identify the atoms comprising the respective chemical regions.

TABLE 9

| | | Major Groove Face | Minor Groove Face | Watson-Crick Base-pairing Face |
|---|---|---|---|---|
| Pyrimi- dines | Cyti- dine: | [chemical structure] | [chemical structure] | [chemical structure] |
| | Uridine: | [chemical structure] | [chemical structure] | [chemical structure] |
| Purines | Adeno- sine: | [chemical structure] | [chemical structure] | [chemical structure] |
| | Guano- sine: | [chemical structure] | [chemical structure] | [chemical structure] |

[0323] In some embodiments, B is a modified uracil. Exemplary modified uracils include those having Formula (b1)-(b5):

[chemical structure]

or a pharmaceutically acceptable salt or stereoisomer thereof, wherein
[0324] [symbol] is a single or double bond;
[0325] each of T^{1′}, T^{1″}, T^{2″}, and T^{2″} is, independently, H, optionally substituted alkyl, optionally substituted alkoxy, or optionally substituted thioalkoxy, or the combination of T^{1′} and T^{1″} or the combination of T^{2′} and T^{2″} join together (e.g., as in T²) to form O (oxo), S (thio), or Se (seleno);
[0326] each of V¹ and V² is, independently, O, S, N(R^{Vb})ₙᵥ, or C(R^{Vb})ₙᵥ, wherein nv is an integer from 0 to 2 and each R^{Vb} is, independently, H, halo, optionally substituted amino acid, optionally substituted alkyl, optionally substituted haloalkyl, optionally substituted alkenyl, optionally substituted alkynyl, optionally substituted alkoxy, optionally substituted alkenyloxy, optionally substituted alkynyloxy, optionally substituted hydroxyalkyl, optionally substituted hydroxyalkenyl, optionally substituted hydroxyalkynyl, optionally substituted aminoalkyl (e.g., substituted with an N-protecting group, such as any described herein, e.g., trifluoroacetyl), optionally substituted aminoalkenyl, optionally substituted aminoalkynyl, optionally substituted acylaminoalkyl (e.g., substituted with an N-protecting group, such as any described herein, e.g., trifluoroacetyl), optionally substituted alkoxycarbonylalkyl, optionally substituted alkoxycarbonylalkenyl, optionally substituted alkoxycarbonylalkynyl, or optionally substituted alkynyloxy (e.g., optionally substituted with any substituent described herein, such as those selected from (1)-(21) for alkyl);
[0327] R¹⁰ is H, halo, optionally substituted amino acid, hydroxy, optionally substituted alkyl, optionally substituted alkenyl, optionally substituted alkynyl, optionally substituted aminoalkyl, optionally substituted hydroxyalkyl, optionally substituted hydroxyalkenyl, optionally substituted hydroxyalkynyl, optionally substituted aminoalkenyl, optionally substituted aminoalkynyl, optionally substituted alkoxy, optionally substituted alkoxycarbonylalkyl, optionally substituted alkoxycarbonylalkenyl, optionally substituted alkoxycarbonylalkynyl, optionally substituted alkoxycarbonylalkoxy, optionally substituted carboxyalkoxy, optionally substituted carboxyalkyl, or optionally substituted carbamoylalkyl;
[0328] R¹¹ is H or optionally substituted alkyl;
[0329] R^{12a} is H, optionally substituted alkyl, optionally substituted hydroxyalkyl, optionally substituted hydroxyalkenyl, optionally substituted hydroxyalkynyl, optionally substituted aminoalkyl, optionally substituted aminoalkenyl, or optionally substituted aminoalkynyl, optionally substituted carboxyalkyl (e.g., optionally substituted with hydroxy), optionally substituted carboxyalkoxy, optionally substituted carboxyaminoalkyl, or optionally substituted carbamoylalkyl; and
[0330] R^{12c} is H, halo, optionally substituted alkyl, optionally substituted alkoxy, optionally substituted thioalkoxy, optionally substituted amino, optionally substituted hydroxyalkyl, optionally substituted hydroxyalkenyl, optionally substituted hydroxyalkynyl, optionally substituted aminoalkyl, optionally substituted aminoalkenyl, or optionally substituted aminoalkynyl.

[0331] Other exemplary modified uracils include those having Formula (b6)-(b9)

[chemical structure]

or a pharmaceutically acceptable salt or stereoisomer thereof, wherein
[0332] [symbol] is a single or double bond;
[0333] each of T^{1′}, T^{1″}, T^{2′}, and T^{2″} is, independently, H, optionally substituted alkyl, optionally substituted alkoxy, or optionally substituted thioalkoxy, or the combination of T^{1′} and T^{1″} join together (e.g., as in T¹) or the combination of T^{2′} and T^{2″} join together (e.g., as in T²) to form O (oxo), S (thio), or Se (seleno), or each T¹ and T² is, independently, O (oxo), S (thio), or Se (seleno);
[0334] each of W¹ and W² is, independently, N(R^{Wa})_{nw} or C(R^{Wa})_{nw}, wherein nw is an integer from 0 to 2 and each R^{Wa} is, independently, H, optionally substituted alkyl, or optionally substituted alkoxy;
[0335] each V³ is, independently, O, S, N(R^{Va})ₙᵥ, or C(R^{Va})ₙᵥ, wherein nv is an integer from 0 to 2 and each R^{Va} is, independently, H, halo, optionally substituted amino acid, optionally substituted alkyl, optionally substituted hydroxyalkyl, optionally substituted hydroxyalkenyl, optionally substituted hydroxyalkynyl, optionally substituted alkenyl, optionally substituted alkynyl, optionally substituted heterocyclyl, optionally substituted alkheterocyclyl, optionally substituted alkoxy, optionally substituted alkenyloxy, or optionally substituted alkynyloxy, optionally substituted aminoalkyl (e.g., substituted with an N-protecting group, such as any described herein, e.g., trifluoroacetyl, or sulfoalkyl), optionally substituted aminoalkenyl, optionally substituted aminoalkynyl, optionally substituted acylaminoalkyl (e.g., substituted with an N-protecting group, such as any described herein, e.g., trifluoroacetyl), optionally substituted alkoxycarbonylalkyl, optionally substituted alkoxycarbonylalkenyl, optionally substituted alkoxycarbonylalkynyl, optionally substituted alkoxycarbonylacyl, optionally substituted alkoxycarbonylalkoxy, optionally substituted carboxyalkyl (e.g., optionally substituted with hydroxy and/or an O-protecting group), optionally substituted carboxyalkoxy, optionally substituted carboxyaminoalkyl, or optionally substituted carbamoylalkyl (e.g., optionally substituted with any substituent described herein, such as those selected from (1)-(21) for alkyl), and wherein R^{Va} and R^{12c} taken together with the carbon atoms to which they are attached can form optionally substituted cycloalkyl, optionally substituted aryl, or optionally substituted heterocyclyl (e.g., a 5- or 6-membered ring);
[0336] R^{12a} is H, optionally substituted alkyl, optionally substituted hydroxyalkyl, optionally substituted hydroxyalkenyl, optionally substituted hydroxyalkynyl, optionally substituted aminoalkyl, optionally substituted aminoalkenyl, optionally substituted aminoalkynyl, optionally substituted carboxyalkyl (e.g., optionally substituted with hydroxy and/or an O-protecting group), optionally substituted carboxyalkoxy, optionally substituted carboxyaminoalkyl, optionally substituted carbamoylalkyl, or absent;
[0337] R^{12b} is H, optionally substituted alkyl, optionally substituted alkenyl, optionally substituted alkynyl, optionally substituted hydroxyalkyl, optionally substituted hydroxyalkenyl, optionally substituted hydroxyalkynyl, optionally substituted aminoalkyl, optionally substituted aminoalkenyl, optionally substituted aminoalkynyl, optionally substituted alkaryl, optionally substituted heterocyclyl, optionally substituted alkheterocyclyl, optionally substituted amino acid, optionally substituted alkoxycarbonylacyl, optionally substituted alkoxycarbonylalkoxy, optionally substituted alkoxycarbonylalkyl, optionally substituted alkoxycarbonylalkenyl, optionally substituted alkoxycarbonylalkynyl, optionally substituted alkoxycarbonylalkoxy, optionally substituted carboxyalkyl (e.g., optionally substituted with hydroxy and/or an O-protecting group), optionally substituted carboxyalkoxy, optionally substituted carboxyaminoalkyl, or optionally substituted carbamoylalkyl,
[0338] wherein the combination of R^{12b} and T^{1′} or the combination of R^{12b} and R^{12c} can join together to form optionally substituted heterocyclyl; and
[0339] R^{12c} is H, halo, optionally substituted alkyl, optionally substituted alkoxy, optionally substituted thioalkoxy, optionally substituted amino, optionally substituted aminoalkyl, optionally substituted aminoalkenyl, or optionally substituted aminoalkynyl.

[0340] Further exemplary modified uracils include those having Formula (b28)-(b31):

[chemical structure]

or a pharmaceutically acceptable salt or stereoisomer thereof, wherein
[0341] each of T¹ and T² is, independently, O (oxo), S (thio), or Se (seleno);
[0342] each R^{Vb′} and R^{Vb″} is, independently, H, halo, optionally substituted amino acid, optionally substituted alkyl, optionally substituted haloalkyl, optionally substituted hydroxyalkyl, optionally substituted hydroxyalkenyl, optionally substituted hydroxyalkynyl, optionally substituted alkenyl, optionally substituted alkynyl, optionally substituted alkoxy, optionally substituted alkenyloxy, optionally substituted alkynyloxy, optionally substituted aminoalkyl (e.g., substituted with an N-protecting group, such as any described herein, e.g., trifluoroacetyl, or sulfoalkyl), optionally substituted aminoalkenyl, optionally substituted aminoalkynyl, optionally substituted acylaminoalkyl (e.g., substituted with an N-protecting group, such as any described herein, e.g., trifluoroacetyl), optionally substituted alkoxycarbonylalkyl, optionally substituted alkoxycarbonylalkenyl, optionally substituted alkoxycarbonylalkynyl, optionally substituted alkoxycarbonylacyl, optionally substituted alkoxycarbonylalkoxy, optionally substituted carboxyalkyl (e.g., optionally substituted with hydroxy and/or an O-protecting group), optionally substituted carboxyalkoxy, optionally substituted carboxyaminoalkyl, or optionally substituted carbamoylalkyl (e.g., optionally substituted with any substituent described herein, such as those selected from (1)-(21) for alkyl) (e.g., R^{Vb′} is optionally substituted alkyl, optionally substituted alkenyl, or optionally substituted aminoalkyl, e.g., substituted with an N-protecting group, such as any described herein, e.g., trifluoroacetyl, or sulfoalkyl);
[0343] R^{12a} is H, optionally substituted alkyl, optionally substituted carboxyaminoalkyl, optionally substituted aminoalkyl (e.g., e.g., substituted with an N-protecting group, such as any described herein, e.g., trifluoroacetyl, or sulfoalkyl), optionally substituted aminoalkenyl, or optionally substituted aminoalkynyl; and
[0344] R^{12b} is H, optionally substituted alkyl, optionally substituted alkenyl, optionally substituted alkynyl, optionally substituted hydroxyalkyl, optionally substituted hydroxyalkenyl, optionally substituted hydroxyalkynyl, optionally substituted aminoalkyl, optionally substituted aminoalkenyl, optionally substituted aminoalkynyl (e.g., e.g., substituted with an N-protecting group, such as any described herein, e.g., trifluoroacetyl, or sulfoalkyl),
[0345] optionally substituted alkoxycarbonylacyl, optionally substituted alkoxycarbonylalkoxy, optionally substituted alkoxycarbonylalkyl, optionally substituted alkoxycarbonylalkenyl, optionally substituted alkoxycarbonylalkynyl, optionally substituted alkoxycarbonylalkoxy, optionally substituted carboxyalkoxy, optionally substituted carboxyalkyl, or optionally substituted carbamoylalkyl.

[0346] In particular embodiments, T¹ is O (oxo), and T² is S (thio) or Se (seleno). In other embodiments, T¹ is S (thio), and T² is O (oxo) or Se (seleno). In some embodiments, R^{Vb′} is H, optionally substituted alkyl, or optionally substituted alkoxy.

[0347] In other embodiments, each R^{12a} and R^{12b} is, independently, H, optionally substituted alkyl, optionally substituted alkenyl, optionally substituted alkynyl, or optionally substituted hydroxyalkyl. In particular embodiments, R^{12a} is H. In other embodiments, both R^{12a} and R^{12b} are H.

[0348] In some embodiments, each R^{Vb′} of R^{12b} is, independently, optionally substituted aminoalkyl (e.g., substituted with an N-protecting group, such as any described herein, e.g., trifluoroacetyl, or sulfoalkyl), optionally substituted aminoalkenyl, optionally substituted aminoalkynyl, or optionally substituted acylaminoalkyl (e.g., substituted with an N-protecting group, such as any described herein, e.g., trifluoroacetyl). In some embodiments, the amino and/or alkyl of the optionally substituted aminoalkyl is substituted with one or more of optionally substituted alkyl, optionally substituted alkenyl, optionally substituted sulfoalkyl, optionally substituted carboxy (e.g., substituted with an O-protecting group), optionally substituted hydroxy (e.g., substituted with an O-protecting group), optionally substituted carboxyalkyl (e.g., substituted with an O-protecting group), optionally substituted alkoxycarbonylalkyl (e.g., substituted with an O-protecting group), or N-protecting group. In some embodiments, optionally substituted aminoalkyl is substituted with an optionally substituted sulfoalkyl or optionally substituted alkenyl. In particular embodiments, R^{12a} and R^{Vb″} are both H. In particular embodiments, T¹ is O (oxo), and T² is S (thio) or Se (seleno).

[0349] In some embodiments, R^{Vb′} is optionally substituted alkoxycarbonylalkyl or optionally substituted carbamoylalkyl.

[0350] In particular embodiments, the optional substituent for R^{12a}, R^{12b}, R^{12c}, or R^{Va} is a polyethylene glycol group (e.g., —(CH₂)ₛ₂(OCH₂CH₂)ₛ₁(CH₂)ₛ₃OR′, wherein s1 is an integer from 1 to 10 (e.g., from 1 to 6 or from 1 to 4), each of s2 and s3, independently, is an integer from 0 to 10 (e.g., from 0 to 4, from 0 to 6, from 1 to 4, from 1 to 6, or from 1 to 10), and R′ is H or C₁₋₂₀ alkyl); or an amino-polyethylene glycol group (e.g., —NR^{N1}(CH₂)ₛ₂(CH₂CH₂O)ₛ₁(CH₂)ₛ₃NR^{N1}, wherein s1 is an integer from 1 to 10 (e.g., from 1 to 6 or from 1 to 4), each of s2 and s3, independently, is an integer from 0 to 10 (e.g., from 0 to 4, from 0 to 6, from 1 to 4, from 1 to 6, or from 1 to 10), and each R^{N1} is, independently, hydrogen or optionally substituted C₁₋₆ alkyl).

[0351] In some embodiments, B is a modified cytosine. Exemplary modified cytosines include compounds of Formula (b10)-(b14):

[chemical structure]

or a pharmaceutically acceptable salt or stereoisomer thereof, wherein
[0352] each of T^{3′} and T^{3″} is, independently, H, optionally substituted alkyl, optionally substituted alkoxy, or optionally substituted thioalkoxy, or the combination of T^{3′} and T^{3″} join together (e.g., as in T³) to form O (oxo), S (thio), or Se (seleno);
[0353] each V⁴ is, independently, O, S, N(R^{Vc})ₙᵥ, or C(R^{Vc})ₙᵥ, wherein nv is an integer from 0 to 2 and each R^{Vc} is, independently, H, halo, optionally substituted amino acid, optionally substituted alkyl, optionally substituted alkenyl, optionally substituted alkynyl, optionally substituted alkoxy, optionally substituted alkenyloxy, optionally substituted heterocyclyl, optionally substituted alkheterocyclyl, or optionally substituted alkynyloxy (e.g., optionally substituted with any substituent described herein, such as those selected from (1)-(21) for alkyl), wherein the combination of R^{13b} and R^{Vc} can be taken together to form optionally substituted heterocyclyl;
[0354] each V⁵ is, independently, N(R^{Vd})_{ny}, or C(R^{Vd})_{ny}, wherein nv is an integer from 0 to 2 and each R^{Vd} is, independently, H, halo, optionally substituted amino acid, optionally substituted alkyl, optionally substituted alkenyl, optionally substituted alkynyl, optionally substituted alkoxy, optionally substituted alkenyloxy, optionally substituted heterocyclyl, optionally substituted alkheterocyclyl, or optionally substituted alkynyloxy (e.g., optionally substituted with any substituent described herein, such as those selected from (1)-(21) for alkyl) (e.g., V⁵ is —CH or N);
[0355] each of R^{13a} and R^{13b} is, independently, H, optionally substituted acyl, optionally substituted acyloxyalkyl, optionally substituted alkyl, or optionally substituted alkoxy, wherein the combination of R^{13b} and R¹⁴ can be taken together to form optionally substituted heterocyclyl;
[0356] each R¹⁴ is, independently, H, halo, hydroxy, thiol, optionally substituted acyl, optionally substituted amino acid, optionally substituted alkyl, optionally substituted haloalkyl, optionally substituted alkenyl, optionally substituted alkynyl, optionally substituted hydroxyalkyl (e.g., substituted with an O-protecting group), optionally substituted hydroxyalkenyl, optionally substituted hydroxyalkynyl, optionally substituted alkoxy, optionally substituted alkenyloxy, optionally substituted alkynyloxy, optionally substituted aminoalkoxy, optionally substituted alkoxyalkoxy, optionally substituted acyloxyalkyl, optionally substituted amino (e.g., —NHR, wherein R is H, alkyl, aryl, or phosphoryl), azido, optionally substituted aryl, optionally substituted heterocyclyl, optionally substituted alkheterocyclyl, optionally substituted aminoalkyl, optionally substituted aminoalkenyl, or optionally substituted aminoalkyl; and
[0357] each of R¹⁵ and R¹⁶ is, independently, H, optionally substituted alkyl, optionally substituted alkenyl, or optionally substituted alkynyl.

[0358] Further exemplary modified cytosines include those having Formula (b32)-(b35):

[chemical structure]

or a pharmaceutically acceptable salt or stereoisomer thereof, wherein
[0359] each of T¹ and T³ is, independently, O (oxo), S (thio), or Se (seleno);
[0360] each of R^{13a} and R^{13b} is, independently, H, optionally substituted acyl, optionally substituted acyloxyalkyl, optionally substituted alkyl, or optionally substituted alkoxy, wherein the combination of R^{13b} and R¹⁴ can be taken together to form optionally substituted heterocyclyl;
[0361] each R¹⁴ is, independently, H, halo, hydroxy, thiol, optionally substituted acyl, optionally substituted amino acid, optionally substituted alkyl, optionally substituted haloalkyl, optionally substituted alkenyl, optionally substituted alkynyl, optionally substituted hydroxyalkyl (e.g., substituted with an O-protecting group), optionally substituted hydroxyalkenyl, optionally substituted hydroxyalkynyl, optionally substituted alkoxy, optionally substituted alkenyloxy, optionally substituted alkynyloxy, optionally substituted aminoalkoxy, optionally substituted alkoxyalkoxy, optionally substituted acyloxyalkyl, optionally substituted amino (e.g., —NHR, wherein R is H, alkyl, aryl, or phosphoryl), azido, optionally substituted aryl, optionally substituted heterocyclyl, optionally substituted alkheterocyclyl, optionally substituted aminoalkyl (e.g., hydroxyalkyl, alkyl, alkenyl, or alkynyl), optionally substituted aminoalkenyl, or optionally substituted aminoalkynyl; and
[0362] each of R¹⁵ and R¹⁶ is, independently, H, optionally substituted alkyl, optionally substituted alkenyl, or optionally substituted alkynyl (e.g., R¹⁵ is H, and R¹⁶ is H or optionally substituted alkyl).
[0363] In some embodiments, R¹⁵ is H, and R¹⁶ is H or optionally substituted alkyl. In particular embodiments, R¹⁴ is H, acyl, or hydroxyalkyl. In some embodiments, R¹⁴ is halo. In some embodiments, both R¹⁴ and R¹⁵ are H. In some embodiments, both R¹⁵ and R¹⁶ are H. In some embodiments, each of R¹⁴ and R¹⁵ and R¹⁶ is H. In further embodiments, each of R^{13a} and R^{13b} is independently, H or optionally substituted alkyl.

[0364] Further non-limiting examples of modified cytosines include compounds of Formula (b36):

[chemical structure]

or a pharmaceutically acceptable salt or stereoisomer thereof,
[0365] wherein
[0366] each R^{13b} is, independently, H, optionally substituted acyl, optionally substituted acyloxyalkyl, optionally substituted alkyl, or optionally substituted alkoxy, wherein the combination of R^{13b} and R^{14b} can be taken together to form optionally substituted heterocyclyl;
[0367] each R^{14a} and R^{14b} is, independently, H, halo, hydroxy, thiol, optionally substituted acyl, optionally substituted amino acid, optionally substituted alkyl, optionally substituted haloalkyl, optionally substituted alkenyl, optionally substituted alkynyl, optionally substituted hydroxyalkyl (e.g., substituted with an O-protecting group), optionally substituted hydroxyalkenyl, optionally substituted alkoxy, optionally substituted alkenyloxy, optionally substituted alkynyloxy, optionally substituted aminoalkoxy, optionally substituted alkoxyalkoxy, optionally substituted acyloxyalkyl, optionally substituted amino (e.g., —NHR, wherein R is H, alkyl, aryl, phosphoryl, optionally substituted aminoalkyl, or optionally substituted carboxyaminoalkyl), azido, optionally substituted aryl, optionally substituted heterocyclyl, optionally substituted alkheterocyclyl, optionally substituted aminoalkyl, optionally substituted aminoalkenyl, or optionally substituted aminoalkynyl; and
[0368] each of R¹⁵ is, independently, H, optionally substituted alkyl, optionally substituted alkenyl, or optionally substituted alkynyl.
[0369] In particular embodiments, R^{14b} is an optionally substituted amino acid (e.g., optionally substituted lysine). In some embodiments, R^{14a} is H.

[0370] In some embodiments, B is a modified guanine. Exemplary modified guanines include compounds of Formula (b15)-(b17):

[chemical structure]

or a pharmaceutically acceptable salt or stereoisomer thereof, wherein
[0371] each of T^{4′}, T^{4″}, T^{5′}, T^{5″}, T^{6′}, and T^{6″} is, independently, H, optionally substituted alkyl, or optionally substituted alkoxy, and wherein the combination of T^{4′} and T^{4″} (e.g., as in T⁴) or the combination of T^{5′} and T^{5″} (e.g., as in T⁵) or the combination of T^{6′} and T^{6″} (e.g., as in T⁶) join together form O (oxo), S (thio), or Se (seleno);
[0372] each of V⁵ and V⁶ is, independently, O, S, N(R^{Vd})ₙᵥ, or C(R^{Vd})ₙᵥ, wherein nv is an integer from 0 to 2 and each R^{Vd} is, independently, H, halo, thiol, optionally substituted amino acid, cyano, amidine, optionally substituted aminoalkyl, optionally substituted aminoalkenyl, optionally substituted aminoalkynyl, optionally substituted alkyl, optionally substituted alkenyl, optionally substituted alkynyl, optionally substituted alkoxy, optionally substituted alkenyloxy, or optionally substituted alkynyloxy (e.g., optionally substituted with any substituent described herein, such as those selected from (1)-(21) for alkyl), optionally substituted thioalkoxy, or optionally substituted amino; and
[0373] each of R¹⁷, R¹⁸, R^{19a}, R^{19b}, R²¹, R²², R²³, and R²⁴ is, independently, H, halo, thiol, optionally substituted alkyl, optionally substituted alkenyl, optionally substituted alkynyl, optionally substituted thioalkoxy, optionally substituted amino, or optionally substituted amino acid.

[0374] Exemplary modified guanosines include compounds of Formula (b37)-(b40):

[chemical structure]

or a pharmaceutically acceptable salt or stereoisomer thereof, wherein
[0375] each of T^{4′} is, independently, H, optionally substituted alkyl, or optionally substituted alkoxy, and each T⁴ is, independently, O (oxo), S (thio), or Se (seleno);
[0376] each of R¹⁸, R^{19a}, R^{19b} and R²¹ is, independently, H, halo, thiol, optionally substituted alkyl, optionally substituted alkenyl, optionally substituted alkynyl, optionally substituted thioalkoxy, optionally substituted amino, or optionally substituted amino acid.

[0377] In some embodiments, R¹⁸ is H or optionally substituted alkyl. In further embodiments, T⁴ is oxo. In some embodiments, each of R^{19a} and R^{19b} is, independently, H or optionally substituted alkyl.

[0378] In some embodiments, B is a modified adenine. Exemplary modified adenines include compounds of Formula (b18)-(b20):

[chemical structure]

or a pharmaceutically acceptable salt or stereoisomer thereof, wherein
[0379] each V⁷ is, independently, O, S, N(R^{Ve})ₙᵥ, or C(R^{Ve})ₙᵥ, wherein nv is an integer from 0 to 2 and each R^{Ve} is, independently, H, halo, optionally substituted amino acid, optionally substituted alkyl, optionally substituted alkenyl, optionally substituted alkynyl, optionally substituted alkoxy, optionally substituted alkenyloxy, or optionally substituted alkynyloxy (e.g., optionally substituted with any substituent described herein, such as those selected from (1)-(21) for alkyl);
[0380] each R²⁵ is, independently, H, halo, thiol, optionally substituted alkyl, optionally substituted alkenyl, optionally substituted alkynyl, optionally substituted thioalkoxy, or optionally substituted amino;
[0381] each of R^{26a} and R^{26b} is, independently, H, optionally substituted acyl, optionally substituted amino acid, optionally substituted carbamoylalkyl, optionally substituted alkyl, optionally substituted alkenyl, optionally substituted alkynyl, optionally substituted hydroxyalkyl, optionally substituted hydroxyalkenyl, optionally substituted hydroxyalkynyl, optionally substituted alkoxy, or polyethylene glycol group (e.g., —(CH₂)ₛ₂(OCH₂CH₂)ₛ₁(CH₂)ₛ₃OR′, wherein s1 is an integer from 1 to 10 (e.g., from 1 to 6 or from 1 to 4), each of s2 and s3, independently, is an integer from 0 to 10 (e.g., from 0 to 4, from 0 to 6, from 1 to 4, from 1 to 6, or from 1 to 10), and R′ is H or C₁₋₂₀ alkyl); or an amino-polyethylene glycol group (e.g., —NR^{N1}(CH₂)ₛ₂(CH₂CH₂O)ₛ₁(CH₂)ₛ₃NR^{N1}, wherein s1 is an integer from 1 to 10 (e.g., from 1 to 6 or from 1 to 4), each of s2 and s3, independently, is an integer from 0 to 10 (e.g., from 0 to 4, from 0 to 6, from 1 to 4, from 1 to 6, or from 1 to 10), and each R^{N1} is, independently, hydrogen or optionally substituted C₁₋₆ alkyl);
[0382] each R²⁷ is, independently, H, optionally substituted alkyl, optionally substituted alkenyl, optionally substituted alkynyl, optionally substituted alkoxy, optionally substituted thioalkoxy or optionally substituted amino;
[0383] each R²⁸ is, independently, H, optionally substituted alkyl, optionally substituted alkenyl, or optionally substituted alkynyl; and
[0384] each R²⁹ is, independently, H, optionally substituted acyl, optionally substituted amino acid, optionally substituted carbamoylalkyl, optionally substituted alkyl, optionally substituted alkenyl, optionally substituted alkynyl, optionally substituted hydroxyalkyl, optionally substituted hydroxyalkenyl, optionally substituted alkoxy, or optionally substituted amino.

[0385] Exemplary modified adenines include compounds of Formula (b41)-(b43):

[chemical structure]

or a pharmaceutically acceptable salt or stereoisomer thereof, wherein
[0386] each R²⁵ is, independently, H, halo, thiol, optionally substituted alkyl, optionally substituted alkenyl, optionally substituted alkynyl, optionally substituted thioalkoxy, or optionally substituted amino;
[0387] each of R^{26a} and R^{26b} is, independently, H, optionally substituted acyl, optionally substituted amino acid, optionally substituted carbamoylalkyl, optionally substituted alkyl, optionally substituted alkenyl, optionally substituted alkynyl, optionally substituted hydroxyalkyl, optionally substituted hydroxyalkenyl, optionally substituted hydroxyalkynyl, optionally substituted alkoxy, or polyethylene glycol group (e.g., —(CH₂)ₛ₂(OCH₂CH₂)ₛ₁(CH₂)ₛ₃OR′, wherein s1 is an integer from 1 to 10 (e.g., from 1 to 6 or from 1 to 4), each of s2 and s3, independently, is an integer from 0 to 10 (e.g., from 0 to 4, from 0 to 6, from 1 to 4, from 1 to 6, or from 1 to 10), and R′ is H or C₁₋₂₀ alkyl); or an amino-polyethylene glycol group (e.g., —NR^{N1}(CH₂)ₛ₂(CH₂CH₂O)ₛ₁(CH₂)ₛ₃NR^{N1}, wherein s1 is an integer from 1 to 10 (e.g., from 1 to 6 or from 1 to 4), each of s2 and s3, independently, is an integer from 0 to 10 (e.g., from 0 to 4, from 0 to 6, from 1 to 4, from 1 to 6, or from 1 to 10), and each R^{N1} is, independently, hydrogen or optionally substituted C₁₋₆ alkyl); and
[0388] each R²⁷ is, independently, H, optionally substituted alkyl, optionally substituted alkenyl, optionally substituted alkynyl, optionally substituted alkoxy, optionally substituted thioalkoxy, or optionally substituted amino.

[0389] In some embodiments, R^{26a} is H, and R^{26b} is optionally substituted alkyl. In some embodiments, each of R^{26a} and R^{26b} is, independently, optionally substituted alkyl. In particular embodiments, R²⁷ is optionally substituted alkyl, optionally substituted alkoxy, or optionally substituted thioalkoxy. In other embodiments, R²⁵ is optionally substituted alkyl, optionally substituted alkoxy, or optionally substituted thioalkoxy.

[0390] In particular embodiments, the optional substituent for R^{26a}, R^{26b} or R²⁹ is a polyethylene glycol group (e.g., —(CH₂)ₛ₂(OCH₂CH₂)ₛ₁(CH₂)ₛ₃OR′, wherein s1 is an integer from 1 to 10 (e.g., from 1 to 6 or from 1 to 4), each of s2 and s3, independently, is an integer from 0 to 10 (e.g., from 0 to 4, from 0 to 6, from 1 to 4, from 1 to 6, or from 1 to 10), and R′ is H or C₁₋₂₀ alkyl); or an amino-polyethylene glycol group (e.g., —NR^{N1}(CH₂)ₛ₂(CH₂CH₂O)ₛ₁(CH₂)ₛ₃NR^{N1}, wherein s1 is an integer from 1 to 10 (e.g., from 1 to 6 or from 1 to 4), each of s2 and s3, independently, is an integer from 0 to 10 (e.g., from 0 to 4, from 0 to 6, from 1 to 4, from 1 to 6, or from 1 to 10), and each R^{N1} is, independently, hydrogen or optionally substituted C₁₋₆ alkyl).

[0391] In some embodiments, B may have Formula (b21):

[chemical structure]

wherein X¹² is, independently, O, S, optionally substituted alkylene (e.g., methylene), or optionally substituted heteroalkylene, xa is an integer from 0 to 3, and R^{12a} and T² are as described herein.

[0392] In some embodiments, B may have Formula (b22):

[chemical structure]

wherein R^{10′} is, independently, optionally substituted alkyl, optionally substituted alkenyl, optionally substituted alkynyl, optionally substituted aryl, optionally substituted heterocyclyl, optionally substituted aminoalkyl, optionally substituted aminoalkenyl, optionally substituted aminoalkynyl, optionally substituted alkoxy, optionally substituted alkoxycarbonylalkyl, optionally substituted alkoxycarbonylalkenyl, optionally substituted alkoxycarbonylalkynyl, optionally substituted alkoxycarbonylalkoxy, optionally substituted carboxyalkoxy, optionally substituted carboxyalkyl, or optionally substituted carbamoylalkyl, and R¹¹, R^{12a}, T¹, and T² are as described herein.

[0393] In some embodiments, B may have Formula (b23):

[chemical structure]

wherein R¹⁰ is optionally substituted heterocyclyl (e.g., optionally substituted furyl, optionally substituted thienyl, or optionally substituted pyrrolyl), optionally substituted aryl (e.g., optionally substituted phenyl or optionally substituted naphthyl), or any substituent described herein (e.g., for R¹⁰); and wherein R¹¹ (e.g., H or any substituent described herein), R^{12a}(e.g., H or any substituent described herein), T¹ (e.g., oxo or any substituent described herein), and T² (e.g., oxo or any substituent described herein) are as described herein.

[0394] In some embodiments, B may have Formula (b24):

[chemical structure]

wherein R^{14′} is, independently, optionally substituted alkyl, optionally substituted alkenyl, optionally substituted alkynyl, optionally substituted aryl, optionally substituted heterocyclyl, optionally substituted alkaryl, optionally substituted alkheterocyclyl, optionally substituted aminoalkyl, optionally substituted aminoalkenyl, optionally substituted aminoalkynyl, optionally substituted alkoxy, optionally substituted alkoxycarbonylalkenyl, optionally substituted alkoxycarbonylalkynyl, optionally substituted alkoxycarbonylalkyl, optionally substituted alkoxycarbonylalkoxy, optionally substituted carboxyalkoxy, optionally substituted carboxyalkyl, or optionally substituted carbamoylalkyl, and R^{13a}, R^{13b}, R¹⁵, and T³ are as described herein.

[0395] In some embodiments, B may have Formula (b25):

[chemical structure]

wherein R^{14′} is optionally substituted heterocyclyl (e.g., optionally substituted furyl, optionally substituted thienyl, or optionally substituted pyrrolyl), optionally substituted aryl (e.g., optionally substituted phenyl or optionally substituted naphthyl), or any substituent described herein (e.g., for R¹⁴ or R^{14′}); and wherein R^{13a} (e.g., H or any substituent described herein), R^{13b} (e.g., H or any substituent described herein), R¹⁵ (e.g., H or any substituent described herein), and T³ (e.g., oxo or any substituent described herein) are as described herein.

[0396] In some embodiments, B is a nucleobase selected from the group consisting of cytosine, guanine, adenine, and uracil. In some embodiments, B may be:

[chemical structure]

[0397] In some embodiments, the modified nucleobase is a modified uracil. Exemplary nucleobases and nucleosides having a modified uracil include pseudouridine (W), pyridin-4-one ribonucleoside, 5-aza-uridine, 6-aza-uridine, 2-thio-5-aza-uridine, 2-thio-uridine (s²U), 4-thio-uridine (s⁴U), 4-thio-pseudouridine, 2-thio-pseudouridine, 5-hydroxy-uridine (ho⁵U), 5-aminoallyl-uridine, 5-halo-uridine (e.g., 5-iodo-uridine or 5-bromo-uridine), 3-methyl-uridine (m³U), 5-methoxy-uridine (mo⁵U), uridine 5-oxyacetic acid (cmo⁵U), uridine 5-oxyacetic acid methyl ester (mcmo⁵U), 5-carboxymethyl-uridine (cm⁵U), 1-carboxymethyl-pseudouridine, 5-carboxyhydroxymethyl-uridine (chm⁵U), 5-carboxyhydroxymethyl-uridine methyl ester (mchm⁵U), 5-methoxycarbonylmethyl-uridine (mcm⁵U), 5-methoxycarbonylmethyl-2-thio-uridine (mcm⁵s²U), 5-aminomethyl-2-thio-uridine (nm⁵s²U), 5-methylaminomethyl-uridine (mnm⁵U), 5-methylaminomethyl-2-thio-uridine (mnm⁵s²U), 5-methylaminomethyl-2-seleno-uridine (mnm⁵se²U), 5-carbamoylmethyl-uridine (ncm⁵U), 5-carboxymethylaminomethyl-uridine (cmnm⁵U), 5-carboxymethylaminomethyl-2-thio-uridine (cmnm⁵s²U), 5-propynyl-uridine, 1-propynyl-pseudouridine, 5-taurinomethyl-uridine (τm⁵U), 1-taurinomethyl-pseudouridine, 5-taurinomethyl-2-thio-uridine(τm⁵s²U), 1-taurinomethyl-4-thio-pseudouridine, 5-methyl-uridine (m⁵U, i.e., having the nucleobase deoxythymine), 1-methylpseudouridine (m1ψ), 5-methyl-2-thio-uridine (m⁵s²U), 1-methyl-4-thio-pseudouridine (m¹s⁴ψ), 4-thio-1-methyl-pseudouridine, 3-methyl-pseudouridine (m³ψ), 2-thio-1-methyl-pseudouridine, 1-methyl-1-deaza-pseudouridine, 2-thio-1-methyl-1-deaza-pseudouridine, dihydrouridine (D), dihydropseudouridine, 5,6-dihydrouridine, 5-methyl-dihydrouridine (m⁵D), 2-thio-dihydrouridine, 2-thio-dihydropseudouridine, 2-methoxy-uridine, 2-methoxy-4-thio-uridine, 4-methoxy-pseudouridine, 4-methoxy-2-thio-pseudouridine, N1-methyl-pseudouridine (also known as 1-methylpseudouridine (m¹ψ)), 3-(3-amino-3-carboxypropyl)uridine (acp³U), 1-methyl-3-(3-amino-3-carboxypropyl)pseudouridine (acp³ ψ), 5-(isopentenylaminomethyl)uridine (inm⁵U), 5-(isopentenylaminomethyl)-2-thio-uridine (inm⁵s²U), α-thio-uridine, 2′-O-methyl-uridine (Um), 5,2′-O-dimethyl-uridine (m⁵Um), 2′-O-methyl-pseudouridine (ψm), 2-thio-2′-O-methyl-uridine (s²Um), 5-methoxycarbonylmethyl-2′-O-methyl-uridine (mcm⁵Um), 5-carbamoylmethyl-2′-O-methyl-uridine (ncm⁵Um), 5-carboxymethylaminomethyl-2′-O-methyl-uridine (cmnm⁵Um), 3,2′-O-dimethyl-uridine (m³Um), 5-(isopentenylaminomethyl)-2′-O-methyl-uridine (inm⁵Um), 1-thio-uridine, deoxythymidine, 2′-F-ara-uridine, 2′-F-uridine, 2′-OH-ara-uridine, 5-(2-carbomethoxyvinyl) uridine, and 5-[3-(1-E-propenylamino)uridine.

[0398] In some embodiments, the modified nucleobase is a modified cytosine. Exemplary nucleobases and nucleosides having a modified cytosine include 5-aza-cytidine, 6-aza-cytidine, pseudoisocytidine, 3-methyl-cytidine (m³C), N4-acetyl-cytidine (ac⁴C), 5-formyl-cytidine (f⁵C), N4-methyl-cytidine (m⁴C), 5-methyl-cytidine (m⁵C), 5-halo-cytidine (e.g., 5-iodo-cytidine), 5-hydroxymethyl-cytidine (hm⁵C), 1-methyl-pseudoisocytidine, pyrrolo-cytidine, pyrrolo-pseudoisocytidine, 2-thio-cytidine (s²C), 2-thio-5-methyl-cytidine, 4-thio-pseudoisocytidine, 4-thio-1-methyl-pseudoisocytidine, 4-thio-1-methyl-1-deaza-pseudoisocytidine, 1-methyl-1-deaza-pseudoisocytidine, zebularine, 5-aza-zebularine, 5-methyl-zebularine, 5-aza-2-thio-zebularine, 2-thio-zebularine, 2-methoxy-cytidine, 2-methoxy-5-methyl-cytidine, 4-methoxy-pseudoisocytidine, 4-methoxy-1-methyl-pseudoisocytidine, lysidine (k₂C), α-thio-cytidine, 2′-O-methyl-cytidine (Cm), 5,2′-O-dimethyl-cytidine (m⁵Cm), N4-acetyl-2′-O-methyl-cytidine (ac⁴Cm), N4,2′-O-dimethyl-cytidine (m⁴Cm), 5-formyl-2′-O-methyl-cytidine (f⁵Cm), N4,N4,2′-O-trimethyl-cytidine (m⁴²Cm), 1-thio-cytidine, 2′-F-ara-cytidine, 2′-F-cytidine, and 2′-OH-ara-cytidine.

[0399] In some embodiments, the modified nucleobase is a modified adenine. Exemplary nucleobases and nucleosides having a modified adenine include 2-amino-purine, 2, 6-diaminopurine, 2-amino-6-halo-purine (e.g., 2-amino-6-chloro-purine), 6-halo-purine (e.g., 6-chloro-purine), 2-amino-6-methyl-purine, 8-azido-adenosine, 7-deaza-adenine, 7-deaza-8-aza-adenine, 7-deaza-2-amino-purine, 7-deaza-8-aza-2-amino-purine, 7-deaza-2,6-diaminopurine, 7-deaza-8-aza-2,6-diaminopurine, 1-methyl-adenosine (m¹A), 2-methyl-adenine (m²A), N6-methyl-adenosine (m⁶A), 2-methylthio-N6-methyl-adenosine (ms²m⁶A), N6-isopentenyl-adenosine (i⁶A), 2-methylthio-N6-isopentenyl-adenosine (ms²i⁶A), N6-(cis-hydroxyisopentenyl)adenosine (io⁶A), 2-methylthio-N6-(cis-hydroxyisopentenyl)adenosine (ms²io⁶A), N6-glycinylcarbamoyl-adenosine (g⁶A), N6-threonylcarbamoyl-adenosine (t⁶A), N6-methyl-N6-threonylcarbamoyl-adenosine (m⁶t⁶A), 2-methylthio-N6-threonylcarbamoyl-adenosine (ms²g⁶A), N6,N6-dimethyl-adenosine (m⁶²A), N6-hydroxynorvalylcarbamoyl-adenosine (hn⁶A), 2-methylthio-N6-hydroxynorvalylcarbamoyl-adenosine (ms²hn⁶A), N6-acetyl-adenosine (ac⁶A), 7-methyl-adenine, 2-methylthio-adenine, 2-methoxy-adenine, α-thio-adenosine, 2′-O-methyl-adenosine (Am), N6,2′-O-dimethyl-adenosine (m⁶Am), N6,N6,2′-O-trimethyl-adenosine (m⁶₂Am), 1,2′-O-dimethyl-adenosine (m¹Am), 2′-O-ribosyladenosine (phosphate) (Ar(p)), 2-amino-N6-methyl-purine, 1-thio-adenosine, 8-azido-adenosine, 2′-F-ara-adenosine, 2′-F-adenosine, 2′-OH-ara-adenosine, and N6-(19-amino-pentaoxanonadecyl)-adenosine.

[0400] In some embodiments, the modified nucleobase is a modified guanine. Exemplary nucleobases and nucleosides having a modified guanine include inosine (I), 1-methyl-inosine (m¹I), wyosine (imG), methylwyosine (mimG), 4-demethyl-wyosine (imG-14), isowyosine (imG2), wybutosine (yW), peroxywybutosine (o₂yW), hydroxywybutosine (OHyW), undermodified hydroxywybutosine (OHyW*), 7-deaza-guanosine, queuosine (Q), epoxyqueuosine (oQ), galactosyl-queuosine (galQ), mannosyl-queuosine (manQ), 7-cyano-7-deaza-guanosine (preQ₀), 7-aminomethyl-7-deaza-guanosine (preQ₁), archaeosine (G⁺), 7-deaza-8-aza-guanosine, 6-thio-guanosine, 6-thio-7-deaza-guanosine, 6-thio-7-deaza-8-aza-guanosine, 7-methyl-guanosine (m⁷G), 6-thio-7-methyl-guanosine, 7-methyl-inosine, 6-methoxy-guanosine, 1-methyl-guanosine (m¹G), N2-methyl-guanosine (m²G), N2,N2-dimethyl-guanosine (m²²G), N2,7-dimethyl-guanosine (m^{2,7}G), N2, N2,7-dimethyl-guanosine (m^{2,2,7}G), 8-oxo-guanosine, 7-methyl-8-oxo-guanosine, 1-methyl-6-thio-guanosine, N2-methyl-6-thio-guanosine, N2,N2-dimethyl-6-thio-guanosine, α-thio-guanosine, 2′-O-methyl-guanosine (Gm), N2-methyl-2′-O-methyl-guanosine (m²Gm), N2,N2-dimethyl-2′-O-methyl-guanosine (m²²Gm), 1-methyl-2′-O-methyl-guanosine (m¹Gm), N2,7-dimethyl-2′-O-methyl-guanosine (m^{2,7}Gm), 2′-O-methyl-inosine (Im), 1,2′-O-dimethyl-inosine (m¹Im), and 2′-O-ribosylguanosine (phosphate) (Gr(p)).

[0401] The nucleobase of the nucleotide can be independently selected from a purine, a pyrimidine, a purine or pyrimidine analog. For example, the nucleobase can each be independently selected from adenine, cytosine, guanine, uracil, or hypoxanthine. In another embodiment, the nucleobase can also include, for example, naturally-occurring and synthetic derivatives of a base, including pyrazolo[3,4-d]pyrimidines, 5-methylcytosine (5-me-C), 5-hydroxymethyl cytosine, xanthine, hypoxanthine, 2-aminoadenine, 6-methyl and other alkyl derivatives of adenine and guanine, 2-propyl and other alkyl derivatives of adenine and guanine, 2-thiouracil, 2-thiothymine and 2-thiocytosine, 5-propynyl uracil and cytosine, 6-azo uracil, cytosine and thymine, 5-uracil (pseudouracil), 4-thiouracil, 8-halo (e.g., 8-bromo), 8-amino, 8-thiol, 8-thioalkyl, 8-hydroxyl and other 8-substituted adenines and guanines, 5-halo particularly 5-bromo, 5-trifluoromethyl and other 5-substituted uracils and cytosines, 7-methylguanine and 7-methyladenine, 8-azaguanine and 8-azaadenine, deazaguanine, 7-deazaguanine, 3-deazaguanine, deazaadenine, 7-deazaadenine, 3-deazaadenine, pyrazolo[3,4-d]pyrimidine, imidazo[1,5-a]1,3,5 triazinones, 9-deazapurines, imidazo[4,5-d]pyrazines, thiazolo[4,5-d]pyrimidines, pyrazin-2-ones, 1,2,4-triazine, pyridazine; and 1,3,5 triazine. When the nucleotides are depicted using the shorthand A, G, C, T or U, each letter refers to the representative base and/or derivatives thereof, e.g., A includes adenine or adenine analogs, e.g., 7-deaza adenine).

### Modifications on the Internucleoside Linkage

[0402] The modified nucleotides, which may be incorporated into a polynucleotide, primary construct, or mmRNA molecule, can be modified on the internucleoside linkage (e.g., phosphate backbone). Herein, in the context of the polynucleotide backbone, the phrases “phosphate” and “phosphodiester” are used interchangeably. Backbone phosphate groups can be modified by replacing one or more of the oxygen atoms with a different substituent. Further, the modified nucleosides and nucleotides can include the wholesale replacement of an unmodified phosphate moiety with another internucleoside linkage as described herein. Examples of modified phosphate groups include, but are not limited to, phosphorothioate, phosphoroselenates, boranophosphates, boranophosphate esters, hydrogen phosphonates, phosphoramidates, phosphorodiamidates, alkyl or aryl phosphonates, and phosphotriesters. Phosphorodithioates have both non-linking oxygens replaced by sulfur. The phosphate linker can also be modified by the replacement of a linking oxygen with nitrogen (bridged phosphoramidates), sulfur (bridged phosphorothioates), and carbon (bridged methylene-phosphonates).

[0403] The α-thio substituted phosphate moiety is provided to confer stability to RNA and DNA polymers through the unnatural phosphorothioate backbone linkages. Phosphorothioate DNA and RNA have increased nuclease resistance and subsequently a longer half-life in a cellular environment. Phosphorothioate linked oncology-related polynucleotides, primary constructs, or mmRNA molecules are expected to also reduce the innate immune response through weaker binding/activation of cellular innate immune molecules.

[0404] In specific embodiments, a modified nucleoside includes an alpha-thio-nucleoside (e.g., 5′-O-(1-thiophosphate)-adenosine, 5′-O-(1-thiophosphate)-cytidine (α-thio-cytidine), 5′-O-(1-thiophosphate)-guanosine, 5′-O-(1-thiophosphate)-uridine, or 5′-O-(1-thiophosphate)-pseudouridine).

[0405] Other internucleoside linkages that may be employed according to the present invention, including internucleoside linkages which do not contain a phosphorous atom, are described herein below.

### Combinations of Modified Sugars, Nucleobases, and Internucleoside Linkages

[0406] The oncology-related polynucleotides, primary constructs, and mmRNA of the invention can include a combination of modifications to the sugar, the nucleobase, and/or the internucleoside linkage. These combinations can include any one or more modifications described herein. For examples, any of the nucleotides described herein in Formulas (Ia), (Ia-1)-(Ia-3), (Ib)-(If), (IIa)-(IIp), (IIb-1), (IIb-2), (IIc-1)-(IIc-2), (IIn-1), (IIn-2), (IVa)-(IVl), and (IXa)-(IXr) can be combined with any of the nucleobases described herein (e.g., in Formulas (b1)-(b43) or any other described herein).

Synthesis of Oncology-Related Polypeptides, Primary Constructs, and mmRNA Molecules

[0407] The oncology-related polypeptides, oncology-related primary constructs, and oncology-related mmRNA molecules for use in accordance with the invention may be prepared according to any useful technique, as described herein. The modified nucleosides and nucleotides used in the synthesis of oncology-related polynucleotides, oncology-related primary constructs, and oncology-related mmRNA molecules disclosed herein can be prepared from readily available starting materials using the following general methods and procedures. Where typical or preferred process conditions (e.g., reaction temperatures, times, mole ratios of reactants, solvents, pressures, etc.) are provided, a skilled artisan would be able to optimize and develop additional process conditions. Optimum reaction conditions may vary with the particular reactants or solvent used, but such conditions can be determined by one skilled in the art by routine optimization procedures.

[0408] The processes described herein can be monitored according to any suitable method known in the art. For example, product formation can be monitored by spectroscopic means, such as nuclear magnetic resonance spectroscopy (e.g., ¹H or ¹³C) infrared spectroscopy, spectrophotometry (e.g., UV-visible), or mass spectrometry, or by chromatography such as high performance liquid chromatography (HPLC) or thin layer chromatography.

[0409] Preparation of oncology-related polypeptides, oncology-related primary constructs, and oncology-related mmRNA molecules of the present invention can involve the protection and deprotection of various chemical groups. The need for protection and deprotection, and the selection of appropriate protecting groups can be readily determined by one skilled in the art. The chemistry of protecting groups can be found, for example, in Greene, et al., Protective Groups in Organic Synthesis, 2d. Ed., Wiley & Sons, 1991, which is incorporated herein by reference in its entirety.

[0410] The reactions of the processes described herein can be carried out in suitable solvents, which can be readily selected by one of skill in the art of organic synthesis. Suitable solvents can be substantially nonreactive with the starting materials (reactants), the intermediates, or products at the temperatures at which the reactions are carried out, i.e., temperatures which can range from the solvent's freezing temperature to the solvent's boiling temperature. A given reaction can be carried out in one solvent or a mixture of more than one solvent. Depending on the particular reaction step, suitable solvents for a particular reaction step can be selected.

[0411] Resolution of racemic mixtures of modified nucleosides and nucleotides (e.g., mmRNA molecules) can be carried out by any of numerous methods known in the art. An example method includes fractional recrystallization using a “chiral resolving acid” which is an optically active, salt-forming organic acid. Suitable resolving agents for fractional recrystallization methods are, for example, optically active acids, such as the D and L forms of tartaric acid, diacetyltartaric acid, dibenzoyltartaric acid, mandelic acid, malic acid, lactic acid or the various optically active camphorsulfonic acids. Resolution of racemic mixtures can also be carried out by elution on a column packed with an optically active resolving agent (e.g., dinitrobenzoylphenylglycine). Suitable elution solvent composition can be determined by one skilled in the art.

[0412] Modified nucleosides and nucleotides (e.g., building block molecules) can be prepared according to the synthetic methods described in Ogata et al., J. Org. Chem. 74:2585-2588 (2009); Purmal et al., Nucl. Acids Res. 22(1): 72-78, (1994); Fukuhara et al., Biochemistry, 1(4): 563-568 (1962); and Xu et al., Tetrahedron, 48(9): 1729-1740 (1992), each of which are incorporated by reference in their entirety.

[0413] The oncology-related polypeptides, oncology-related primary constructs, and oncology-related mmRNA of the invention may or may not be uniformly modified along the entire length of the molecule. For example, one or more or all types of nucleotide (e.g., purine or pyrimidine, or any one or more or all of A, G, U, C) may or may not be uniformly modified in an oncology-related polynucleotide of the invention, or in a given predetermined sequence region thereof (e.g. one or more of the sequence regions represented in FIG. 1). In some embodiments, all nucleotides X in an oncology-related polynucleotide of the invention (or in a given sequence region thereof) are modified, wherein X may any one of nucleotides A, G, U, C, or any one of the combinations A+G, A+U, A+C, G+U, G+C, U+C, A+G+U, A+G+C, G+U+C or A+G+C.

[0414] Different sugar modifications, nucleotide modifications, and/or internucleoside linkages (e.g., backbone structures) may exist at various positions in the oncology-related polynucleotide, oncology-related primary construct, or oncology-related mmRNA. One of ordinary skill in the art will appreciate that the nucleotide analogs or other modification(s) may be located at any position(s) of an oncology-related polynucleotide, oncology-related primary construct, or oncology-related mmRNA such that the function of the oncology-related polynucleotide, oncology-related primary construct, or oncology-related mmRNA is not substantially decreased. A modification may also be a 5′ or 3′ terminal modification. The oncology-related polynucleotide, oncology-related primary construct, or oncology-related mmRNA may contain from about 1% to about 100% modified nucleotides (either in relation to overall nucleotide content, or in relation to one or more types of nucleotide, i.e. any one or more of A, G, U or C) or any intervening percentage (e.g., from 1% to 20%, from 1% to 25%, from 1% to 50%, from 1% to 60%, from 1% to 70%, from 1% to 80%, from 1% to 90%, from 1% to 95%, from 10% to 20%, from 10% to 25%, from 10% to 50%, from 10% to 60%, from 10% to 70%, from 10% to 80%, from 10% to 90%, from 10% to 95%, from 10% to 100%, from 20% to 25%, from 20% to 50%, from 20% to 60%, from 20% to 70%, from 20% to 80%, from 20% to 90%, from 20% to 95%, from 20% to 100%, from 50% to 60%, from 50% to 70%, from 50% to 80%, from 50% to 90%, from 50% to 95%, from 50% to 100%, from 70% to 80%, from 70% to 90%, from 70% to 95%, from 70% to 100%, from 80% to 90%, from 80% to 95%, from 80% to 100%, from 90% to 95%, from 90% to 100%, and from 95% to 100%).

[0415] In some embodiments, the oncology-related polynucleotide, oncology-related primary construct, or oncology-related mmRNA includes a modified pyrimidine (e.g., a modified uracil/uridine/U or modified cytosine/cytidine/C). In some embodiments, the uracil or uridine (generally: U) in the oncology-related polynucleotide, oncology-related primary construct, or oncology-related mmRNA molecule may be replaced with from about 1% to about 100% of a modified uracil or modified uridine (e.g., from 1% to 20%, from 1% to 25%, from 1% to 50%, from 1% to 60%, from 1% to 70%, from 1% to 80%, from 1% to 90%, from 1% to 95%, from 10% to 20%, from 10% to 25%, from 10% to 50%, from 10% to 60%, from 10% to 70%, from 10% to 80%, from 10% to 90%, from 10% to 95%, from 10% to 100%, from 20% to 25%, from 20% to 50%, from 20% to 60%, from 20% to 70%, from 20% to 80%, from 20% to 90%, from 20% to 95%, from 20% to 100%, from 50% to 60%, from 50% to 70%, from 50% to 80%, from 50% to 90%, from 50% to 95%, from 50% to 100%, from 70% to 80%, from 70% to 90%, from 70% to 95%, from 70% to 100%, from 80% to 90%, from 80% to 95%, from 80% to 100%, from 90% to 95%, from 90% to 100%, and from 95% to 100% of a modified uracil or modified uridine). The modified uracil or uridine can be replaced by a compound having a single unique structure or by a plurality of compounds having different structures (e.g., 2, 3, 4 or more unique structures, as described herein). In some embodiments, the cytosine or cytidine (generally: C) in the oncology-related polynucleotide, oncology-related primary construct, or oncology-related mmRNA molecule may be replaced with from about 1% to about 100% of a modified cytosine or modified cytidine (e.g., from 1% to 20%, from 1% to 25%, from 1% to 50%, from 1% to 60%, from 1% to 70%, from 1% to 80%, from 1% to 90%, from 1% to 95%, from 10% to 20%, from 10% to 25%, from 10% to 50%, from 10% to 60%, from 10% to 70%, from 10% to 80%, from 10% to 90%, from 10% to 95%, from 10% to 100%, from 20% to 25%, from 20% to 50%, from 20% to 60%, from 20% to 70%, from 20% to 80%, from 20% to 90%, from 20% to 95%, from 20% to 100%, from 50% to 60%, from 50% to 70%, from 50% to 80%, from 50% to 90%, from 50% to 95%, from 50% to 100%, from 70% to 80%, from 70% to 90%, from 70% to 95%, from 70% to 100%, from 80% to 90%, from 80% to 95%, from 80% to 100%, from 90% to 95%, from 90% to 100%, and from 95% to 100% of a modified cytosine or modified cytidine). The modified cytosine or cytidine can be replaced by a compound having a single unique structure or by a plurality of compounds having different structures (e.g., 2, 3, 4 or more unique structures, as described herein).

[0416] In some embodiments, the present disclosure provides methods of synthesizing an oncology-related polynucleotide, oncology-related primary construct, or oncology-related mmRNA (e.g., the first region, first flanking region, or second flanking region) including n number of linked nucleosides having Formula (Ia-1):

[chemical structure]

comprising:
[0417] a) reacting a nucleotide of Formula (IV-1):

[chemical structure]

[0418] with a phosphoramidite compound of Formula (V-1):

[chemical structure]

[0419] wherein Y⁹ is H, hydroxy, phosphoryl, pyrophosphate, sulfate, amino, thiol, optionally substituted amino acid, or a peptide (e.g., including from 2 to 12 amino acids); and each P¹, P², and P³ is, independently, a suitable protecting group; and [symbol] denotes a solid support;
[0420] to provide an oncology-related polynucleotide, oncology-related primary construct, or oncology-related mmRNA of Formula (VI-1):

[chemical structure]

and
[0421] b) oxidizing or sulfurizing the oncology-related polynucleotide, oncology-related primary construct, or oncology-related mmRNA of Formula (V) to yield an oncology-related polynucleotide, oncology-related primary construct, or oncology-related mmRNA of Formula (VII-1):

[chemical structure]

and
[0422] c) removing the protecting groups to yield the oncology-related polynucleotide, oncology-related primary construct, or oncology-related mmRNA of Formula (Ia).

[0423] In some embodiments, steps a) and b) are repeated from 1 to about 10,000 times. In some embodiments, the methods further comprise a nucleotide (e.g., mmRNA molecule) selected from the group consisting of A, C, G and U adenosine, cytosine, guanosine, and uracil. In some embodiments, the nucleobase may be a pyrimidine or derivative thereof. In some embodiments, the oncology-related polynucleotide, oncology-related primary construct, or oncology-related mmRNA is translatable.

[0424] Other components of oncology-related polynucleotides, oncology-related primary constructs, and oncology-related mmRNA are optional, and are beneficial in some embodiments. For example, a 5′ untranslated region (UTR) and/or a 3′UTR are provided, wherein either or both may independently contain one or more different nucleotide modifications. In such embodiments, nucleotide modifications may also be present in the translatable region. Also provided are oncology-related polynucleotides, oncology-related primary constructs, and oncology-related mmRNA containing a Kozak sequence.

[0425] Exemplary syntheses of modified nucleotides, which are incorporated into an oncology-related modified nucleic acid or mmRNA, e.g., RNA or mRNA, are provided below in Scheme 1 through Scheme 11. Scheme 1 provides a general method for phosphorylation of nucleosides, including modified nucleosides.

[chemical structure]

[0426] Various protecting groups may be used to control the reaction. For example, Scheme 2 provides the use of multiple protecting and deprotecting steps to promote phosphorylation at the 5′ position of the sugar, rather than the 2′ and 3′ hydroxyl groups.

[chemical structure]

[0427] Modified nucleotides can be synthesized in any useful manner. Schemes 3, 4, and 7 provide exemplary methods for synthesizing modified nucleotides having a modified purine nucleobase; and Schemes 5 and 6 provide exemplary methods for synthesizing modified nucleotides having a modified pseudouridine or pseudoisocytidine, respectively.

[chemical structure]

[chemical structure]

[chemical structure]

[chemical structure]

[chemical structure]

[0428] Schemes 8 and 9 provide exemplary syntheses of modified nucleotides. Scheme 10 provides a non-limiting biocatalytic method for producing nucleotides.

[chemical structure]

[chemical structure]

[chemical structure]

[0429] Scheme 11 provides an exemplary synthesis of a modified uracil, where the N1 position is modified with R12b, as provided elsewhere, and the 5′-position of ribose is phosphorylated. T1, T2, R12a, R12b, and r are as provided herein. This synthesis, as well as optimized versions thereof, can be used to modify other pyrimidine nucleobases and purine nucleobases (see e.g., Formulas (b1)-(b43)) and/or to install one or more phosphate groups (e.g., at the 5′ position of the sugar). This alkylating reaction can also be used to include one or more optionally substituted alkyl group at any reactive group (e.g., amino group) in any nucleobase described herein (e.g., the amino groups in the Watson-Crick base-pairing face for cytosine, uracil, adenine, and guanine).

[chemical structure]

Combinations of Nucleotides in mmRNA

[0430] Further examples of modified nucleotides and modified nucleotide combinations are provided below in Table 10. These combinations of modified nucleotides can be used to form the oncology-related polypeptides, oncology-related primary constructs, or oncology-related mmRNA of the invention.

[0431] Unless otherwise noted, the modified nucleotides may be completely substituted for the natural nucleotides of the modified nucleic acids or mmRNA of the invention. As a non-limiting example, the natural nucleotide uridine may be substituted with a modified nucleoside described herein. In another non-limiting example, the natural nucleotide uridine may be partially substituted (e.g., about 0.1%, 1%, 5%, 10%, 15%, 20%, 25%, 30%, 35%, 40%, 45%, 50%, 55%, 60%, 65%, 70%, 75%, 80%, 85%, 90%, 95% or 99.9%) with at least one of the modified nucleoside disclosed herein.

TABLE 10

| Modified | |
|---|---|
| Nucleotide | Modified Nucleotide Combination |
| α-thio-cytidine | α-thio-cytidine/5-iodo-uridine |
| | α-thio-cytidine/N1-methyl-pseudouridine |
| | α-thio-cytidine/α-thio-uridine |
| | α-thio-cytidine/5-methyl-uridine |
| | α-thio-cytidine/pseudouridine |
| | about 50% of the cytosines are α-thio-cytidine |
| pseudoiso- | pseudoisocytidine/5-iodo-uridine |
| cytidine | pseudoisocytidine/N1-methyl-pseudouridine |
| | pseudoisocytidine/α-thio-uridine |
| | pseudoisocytidine/5-methyl-uridine |
| | pseudoisocytidine/pseudouridine |
| | about 25% of cytosines are pseudoisocytidine |
| | pseudoisocytidine/about 50% of uridines are N1-methyl- |
| | pseudouridine and about 50% of uridines are pseudo- |
| | uridine |
| | pseudoisocytidine/about 25% of uridines are N1-methyl- |
| | pseudouridine and about 25% of uridines are pseudo- |
| | uridine |
| pyrrolo- | pyrrolo-cytidine/5-iodo-uridine |
| cytidine | pyrrolo-cytidine/N1-methyl-pseudouridine |
| | pyrrolo-cytidine/α-thio-uridine |
| | pyrrolo-cytidine/5-methyl-uridine |
| | pyrrolo-cytidine/pseudouridine |
| | about 50% of the cytosines are pyrrolo-cytidine |
| 5-methyl- | 5-methyl-cytidine/5-iodo-uridine |
| cytidine | 5-methyl-cytidine/N1-methyl-pseudouridine |
| | 5-methyl-cytidine/α-thio-uridine |
| | 5-methyl-cytidine/5-methyl-uridine |
| | 5-methyl-cytidine/pseudouridine |
| | about 25% of cytosines are 5-methyl-cytidine |
| | about 50% of cytosines are 5-methyl-cytidine |
| | 5-methyl-cytidine/5-methoxy-uridine |
| | 5-methyl-cytidine/5-bromo-uridine |
| | 5-methyl-cytidine/2-thio-uridine |
| | 5-methyl-cytidine/about 50% of uridines are 2-thio- |
| | uridine |
| | about 50% of uridines are 5-methyl-cytidine/about 50% |
| | of uridines are 2-thio-uridine |
| N4-acetyl- | N4-acetyl-cytidine/5-iodo-uridine |
| cytidine | N4-acetyl-cytidine/N1-methyl-pseudouridine |
| | N4-acetyl-cytidine/α-thio-uridine |
| | N4-acetyl-cytidine/5-methyl-uridine |
| | N4-acetyl-cytidine/pseudouridine |
| | about 50% of cytosines are N4-acetyl-cytidine |
| | about 25% of cytosines are N4-acetyl-cytidine |
| | N4-acetyl-cytidine/5-methoxy-uridine |
| | N4-acetyl-cytidine/5-bromo-uridine |
| | N4-acetyl-cytidine/2-thio-uridine |
| | about 50% of cytosines are N4-acetyl-cytidine/about |
| | 50% of uridines are 2-thio-uridine |

[0432] Further examples of modified nucleotide combinations are provided below in Table 11. These combinations of modified nucleotides can be used to form the polypeptides, primary constructs, or mmRNA of the invention.

TABLE 11

| Modified | |
|---|---|
| Nucleotide | Modified Nucleotide Combination |
| modified cytidine | modified cytidine with (b10)/pseudouridine |
| having one or | modified cytidine with (b10)/N1-methyl-pseudouridine |
| more nucleobases | modified cytidine with (b10)/5-methoxy-uridine |
| of Formula (b10) | modified cytidine with (b10)/5-methyl-uridine |
| | modified cytidine with (b10)/5-bromo-uridine |
| | modified cytidine with (b10)/2-thio-uridine |
| | about 50% of cytidine substituted with modified |
| | cytidine (b10)/about 50% of uridines are 2-thio- |
| | uridine |
| modified cytidine | modified cytidine with (b32)/pseudouridine |
| having one or | modified cytidine with (b32)/N1-methyl-pseudouridine |
| more nucleobases | modified cytidine with (b32)/5-methoxy-uridine |
| of Formula (b32) | modified cytidine with (b32)/5-methyl-uridine |
| | modified cytidine with (b32)/5-bromo-uridine |
| | modified cytidine with (b32)/2-thio-uridine |
| | about 50% of cytidine substituted with modified |
| | cytidine (b32)/about 50% of uridines are 2-thio- |
| | uridine |
| modified uridine | modified uridine with (b1)/N4-acetyl-cytidine |
| having one or | modified uridine with (b1)/5-methyl-cytidine |
| more nucleobases | |
| of Formula (b1) | |
| modified uridine | modified uridine with (b8)/N4-acetyl-cytidine |
| having one or | modified uridine with (b8)/5-methyl-cytidine |
| more nucleobases | |
| of Formula (b8) | |
| modified uridine | modified uridine with (b28)/N4-acetyl-cytidine |
| having one or | modified uridine with (b28)/5-methyl-cytidine |
| more nucleobases | |
| of Formula (b28) | |
| modified uridine | modified uridine with (b29)/N4-acetyl-cytidine |
| having one or | modified uridine with (b29)/5-methyl-cytidine |
| more nucleobases | |
| of Formula (b29) | |
| modified uridine | modified uridine with (b30)/N4-acetyl-cytidine |
| having one or | modified uridine with (b30)/5-methyl-cytidine |
| more nucleobases | |
| of Formula (b30) | |

[0433] In some embodiments, at least 2500 of the cytosines are replaced by a compound of Formula (b10)-(b14) (e.g., at least about 30%, at least about 35%, at least about 40%, at least about 45%, at least about 50%, at least about 55%, at least about 60%, at least about 65%, at least about 70%, at least about 75% at least about 80%, at least about 85%, at least about 90%, at least about 95%, or about 100%).

[0434] In some embodiments, at least 25% of the uracils are replaced by a compound of Formula (b1)-(b9) (e.g., at least about 30%, at least about 35%, at least about 40%, at least about 45%, at least about 50%, at least about 55%, at least about 60%, at least about 65%, at least about 70%, at least about 75%, at least about 80%, at least about 85%, at least about 90%, at least about 95%, or about 100%).

[0435] In some embodiments, at least 25% of the cytosines are replaced by a compound of Formula (b10)-(b14), and at least 25% of the uracils are replaced by a compound of Formula (b1)-(b9) (e.g., at least about 30%, at least about 35%, at least about 40%, at least about 45%, at least about 50%, at least about 55%, at least about 60%, at least about 65%, at least about 70%, at least about 75%, at least about 80%, at least about 85%, at least about 90%, at least about 95%, or about 100%).

### IV. Pharmaceutical Compositions

### Formulation, Administration, Delivery and Dosing

[0436] The present invention provides oncology-related polynucleotides, oncology-related primary constructs and oncology-related mmRNA compositions and complexes in combination with one or more pharmaceutically acceptable excipients. Pharmaceutical compositions may optionally comprise one or more additional active substances, e.g. therapeutically and/or prophylactically active substances. General considerations in the formulation and/or manufacture of pharmaceutical agents may be found, for example, in Remington: The Science and Practice of Pharmacy 21^{st} ed., Lippincott Williams & Wilkins, 2005 (incorporated herein by reference).

[0437] In some embodiments, compositions are administered to humans, human patients or subjects. For the purposes of the present disclosure, the phrase “active ingredient” generally refers to oncology-related polynucleotides, oncology-related primary constructs and oncology-related mmRNA to be delivered as described herein.

[0438] Although the descriptions of pharmaceutical compositions provided herein are principally directed to pharmaceutical compositions which are suitable for administration to humans, it will be understood by the skilled artisan that such compositions are generally suitable for administration to any other animal, e.g., to non-human animals, e.g. non-human mammals. Modification of pharmaceutical compositions suitable for administration to humans in order to render the compositions suitable for administration to various animals is well understood, and the ordinarily skilled veterinary pharmacologist can design and/or perform such modification with merely ordinary, if any, experimentation. Subjects to which administration of the pharmaceutical compositions is contemplated include, but are not limited to, humans and/or other primates; mammals, including commercially relevant mammals such as cattle, pigs, horses, sheep, cats, dogs, mice, and/or rats; and/or birds, including commercially relevant birds such as poultry, chickens, ducks, geese, and/or turkeys.

[0439] Formulations of the pharmaceutical compositions described herein may be prepared by any method known or hereafter developed in the art of pharmacology. In general, such preparatory methods include the step of bringing the active ingredient into association with an excipient and/or one or more other accessory ingredients, and then, if necessary and/or desirable, dividing, shaping and/or packaging the product into a desired single- or multi-dose unit.

[0440] A pharmaceutical composition in accordance with the invention may be prepared, packaged, and/or sold in bulk, as a single unit dose, and/or as a plurality of single unit doses. As used herein, a “unit dose” is discrete amount of the pharmaceutical composition comprising a predetermined amount of the active ingredient. The amount of the active ingredient is generally equal to the dosage of the active ingredient which would be administered to a subject and/or a convenient fraction of such a dosage such as, for example, one-half or one-third of such a dosage.

[0441] Relative amounts of the active ingredient, the pharmaceutically acceptable excipient, and/or any additional ingredients in a pharmaceutical composition in accordance with the invention will vary, depending upon the identity, size, and/or condition of the subject treated and further depending upon the route by which the composition is to be administered. By way of example, the composition may comprise between 0.1% and 100%, e.g., between 0.5 and 50%, between 1-30%, between 5-80%, at least 80% (w/w) active ingredient.

### Formulations

[0442] The oncology-related polynucleotide, oncology-related primary construct, and oncology-related mmRNA of the invention can be formulated using one or more excipients to: (1) increase stability; (2) increase cell transfection; (3) permit the sustained or delayed release (e.g., from a depot formulation of the oncology-related polynucleotide, oncology-related primary construct, or mmRNA); (4) alter the biodistribution (e.g., target the oncology-related polynucleotide, oncology-related primary construct, or oncology-related mmRNA to specific tissues or cell types); (5) increase the translation of encoded protein in vivo; and/or (6) alter the release profile of encoded protein in vivo. In addition to traditional excipients such as any and all solvents, dispersion media, diluents, or other liquid vehicles, dispersion or suspension aids, surface active agents, isotonic agents, thickening or emulsifying agents, preservatives, excipients of the present invention can include, without limitation, lipidoids, liposomes, lipid nanoparticles, polymers, lipoplexes, core-shell nanoparticles, peptides, proteins, cells transfected with oncology-related polynucleotide, primary oncology-related construct, or oncology-related mmRNA (e.g., for transplantation into a subject), hyaluronidase, nanoparticle mimics and combinations thereof. Further, the oncology-related polynucleotide, oncology-related primary construct, or oncology-related mmRNA of the present invention may be formulated using self-assembled nucleic acid nanoparticles.

[0443] Accordingly, the formulations of the invention can include one or more excipients, each in an amount that together increases the stability of the oncology-related polynucleotide, oncology-related primary construct, or oncology-related mmRNA, increases cell transfection by the oncology-related polynucleotide, oncology-related primary construct, or oncology-related mmRNA, increases the expression of oncology-related polynucleotide, oncology-related primary construct, or oncology-related mmRNA encoded protein, and/or alters the release profile of oncology-related polynucleotide, oncology-related primary construct, or oncology-related mmRNA encoded proteins. Further, the oncology-related primary construct and oncology-related mmRNA of the present invention may be formulated using self-assembled nucleic acid nanoparticles.

[0444] Formulations of the pharmaceutical compositions described herein may be prepared by any method known or hereafter developed in the art of pharmacology. In general, such preparatory methods include the step of associating the active ingredient with an excipient and/or one or more other accessory ingredients.

[0445] A pharmaceutical composition in accordance with the present disclosure may be prepared, packaged, and/or sold in bulk, as a single unit dose, and/or as a plurality of single unit doses. As used herein, a “unit dose” refers to a discrete amount of the pharmaceutical composition comprising a predetermined amount of the active ingredient. The amount of the active ingredient may generally be equal to the dosage of the active ingredient which would be administered to a subject and/or a convenient fraction of such a dosage including, but not limited to, one-half or one-third of such a dosage.

[0446] Relative amounts of the active ingredient, the pharmaceutically acceptable excipient, and/or any additional ingredients in a pharmaceutical composition in accordance with the present disclosure may vary, depending upon the identity, size, and/or condition of the subject being treated and further depending upon the route by which the composition is to be administered. For example, the composition may comprise between 0.1% and 99% (w/w) of the active ingredient.

[0447] In some embodiments, the formulations described herein may contain at least one oncology-related mmRNA. As a non-limiting example, the formulations may contain 1, 2, 3, 4 or 5 oncology-related mmRNA. In one embodiment the formulation may contain modified mRNA encoding proteins selected from categories such as, oncology-related proteins. In one embodiment, the formulation contains at least three oncology-related modified mRNA encoding oncology-related proteins. In one embodiment, the formulation contains at least five oncology-related modified mRNA encoding oncology-related proteins.

[0448] Pharmaceutical formulations may additionally comprise a pharmaceutically acceptable excipient, which, as used herein, includes, but is not limited to, any and all solvents, dispersion media, diluents, or other liquid vehicles, dispersion or suspension aids, surface active agents, isotonic agents, thickening or emulsifying agents, preservatives, and the like, as suited to the particular dosage form desired. Various excipients for formulating pharmaceutical compositions and techniques for preparing the composition are known in the art (see Remington: The Science and Practice of Pharmacy, 21^{st} Edition, A. R. Gennaro, Lippincott, Williams & Wilkins, Baltimore, MD, 2006; incorporated herein by reference in its entirety). The use of a conventional excipient medium may be contemplated within the scope of the present disclosure, except insofar as any conventional excipient medium may be incompatible with a substance or its derivatives, such as by producing any undesirable biological effect or otherwise interacting in a deleterious manner with any other component(s) of the pharmaceutical composition.

[0449] In some embodiments, the particle size of the lipid nanoparticle may be increased and/or decreased. The change in particle size may be able to help counter biological reaction such as, but not limited to, inflammation or may increase the biological effect of the oncology-related modified mRNA delivered to mammals.

[0450] Pharmaceutically acceptable excipients used in the manufacture of pharmaceutical compositions include, but are not limited to, inert diluents, surface active agents and/or emulsifiers, preservatives, buffering agents, lubricating agents, and/or oils. Such excipients may optionally be included in the pharmaceutical formulations of the invention.

### Lipidoids

[0451] The synthesis of lipidoids has been extensively described and formulations containing these compounds are particularly suited for delivery of oncology-related polynucleotides, primary constructs or mmRNA (see Mahon et al., Bioconjug Chem. 2010 21:1448-1454; Schroeder et al., J Intern Med. 2010 267:9-21; Akinc et al., Nat Biotechnol. 2008 26:561-569; Love et al., Proc Natl Acad Sci USA. 2010 107:1864-1869; Siegwart et al., Proc Natl Acad Sci USA. 2011 108:12996-3001; all of which are incorporated herein in their entireties).

[0452] While these lipidoids have been used to effectively deliver double stranded small interfering RNA molecules in rodents and non-human primates (see Akinc et al., Nat Biotechnol. 2008 26:561-569; Frank-Kamenetsky et al., Proc Natl Acad Sci USA. 2008 105:11915-11920; Akinc et al., Mol Ther. 2009 17:872-879; Love et al., Proc Natl Acad Sci USA. 2010 107:1864-1869; Leuschner et al., Nat Biotechnol. 2011 29:1005-1010; all of which is incorporated herein in their entirety), the present disclosure describes their formulation and use in delivering single stranded oncology-related polynucleotides, primary constructs, or mmRNA. Complexes, micelles, liposomes or particles can be prepared containing these lipidoids and therefore, can result in an effective delivery of the oncology-related polynucleotide, primary construct, or mmRNA, as judged by the production of an encoded protein, following the injection of a lipidoid formulation via localized and/or systemic routes of administration. Lipidoid complexes of oncology-related polynucleotides, primary constructs, or mmRNA can be administered by various means including, but not limited to, intravenous, intramuscular, or subcutaneous routes.

[0453] In vivo delivery of nucleic acids may be affected by many parameters, including, but not limited to, the formulation composition, nature of particle PEGylation, degree of loading, oligonucleotide to lipid ratio, and biophysical parameters such as, but not limited to, particle size (Akinc et al., Mol Ther. 2009 17:872-879; herein incorporated by reference in its entirety). As an example, small changes in the anchor chain length of poly(ethylene glycol) (PEG) lipids may result in significant effects on in vivo efficacy. Formulations with the different lipidoids, including, but not limited to penta[3-(1-laurylaminopropionyl)]-triethylenetetramine hydrochloride (TETA-5LAP; aka 98N12-5, see Murugaiah et al., Analytical Biochemistry, 401:61 (2010); herein incorporated by reference in its entirety), C12-200 (including derivatives and variants), and MD1, can be tested for in vivo activity.

[0454] The lipidoid referred to herein as “98N12-5” is disclosed by Akinc et al., Mol Ther. 2009 17:872-879 and is incorporated by reference in its entirety. (See FIG. 2)

[0455] The lipidoid referred to herein as “C12-200” is disclosed by Love et al., Proc Natl Acad Sci USA. 2010 107:1864-1869 (see FIG. 2) and Liu and Huang, Molecular Therapy. 2010 669-670 (see FIG. 2); both of which are herein incorporated by reference in their entirety. The lipidoid formulations can include particles comprising either 3 or 4 or more components in addition to oncology-related polynucleotide, primary construct, or mmRNA. As an example, formulations with certain lipidoids, include, but are not limited to, 98N12-5 and may contain 42% lipidoid, 48% cholesterol and 10% PEG (C14 alkyl chain length). As another example, formulations with certain lipidoids, include, but are not limited to, C12-200 and may contain 50% lipidoid, 10% disteroylphosphatidyl choline, 38.5% cholesterol, and 1.5% PEG-DMG.

[0456] In one embodiment, a oncology-related polynucleotide, primary construct, or mmRNA formulated with a lipidoid for systemic intravenous administration can target the liver. For example, a final optimized intravenous formulation using a oncology-related polynucleotide, primary construct, or mmRNA, and comprising a lipid molar composition of 42% 98N12-5, 48% cholesterol, and 10% PEG-lipid with a final weight ratio of about 7.5 to 1 total lipid to oncology-related polynucleotide, primary construct, or mmRNA, and a C14 alkyl chain length on the PEG lipid, with a mean particle size of roughly 50-60 nm, can result in the distribution of the formulation to be greater than 90% to the liver. (see, Akinc et al., Mol Ther. 2009 17:872-879; herein incorporated by reference in its entirety). In another example, an intravenous formulation using a C12-200 (see U.S. provisional application 61/175,770 and published international application WO2010129709, each of which is herein incorporated by reference in their entirety) lipidoid may have a molar ratio of 50/10/38.5/1.5 of C12-200/disteroylphosphatidyl choline/cholesterol/PEG-DMG, with a weight ratio of 7 to 1 total lipid to oncology-related polynucleotide, primary construct, or mmRNA, and a mean particle size of 80 nm may be effective to deliver oncology-related polynucleotide, primary construct, or mmRNA to hepatocytes (see, Love et al., Proc Natl Acad Sci USA. 2010 107:1864-1869 herein incorporated by reference in its entirety). In another embodiment, an MID1 lipidoid-containing formulation may be used to effectively deliver oncology-related polynucleotide, primary construct, or mmRNA to hepatocytes in vivo. The characteristics of optimized lipidoid formulations for intramuscular or subcutaneous routes may vary significantly depending on the target cell type and the ability of formulations to diffuse through the extracellular matrix into the blood stream. While a particle size of less than 150 nm may be desired for effective hepatocyte delivery due to the size of the endothelial fenestrae (see, Akinc et al., Mol Ther. 2009 17:872-879 herein incorporated by reference in its entirety), use of a lipidoid-formulated oncology-related polynucleotide, primary construct, or mmRNA to deliver the formulation to other cells types including, but not limited to, endothelial cells, myeloid cells, and muscle cells may not be similarly size-limited. Use of lipidoid formulations to deliver siRNA in vivo to other non-hepatocyte cells such as myeloid cells and endothelium has been reported (see Akinc et al., Nat Biotechnol. 2008 26:561-569; Leuschner et al., Nat Biotechnol. 2011 29:1005-1010; Cho et al. Adv. Funct. Mater. 2009 19:3112-3118; 8^{th} International Judah Folkman Conference, Cambridge, MA Oct. 8-9, 2010; each of which is herein incorporated by reference in its entirety). Effective delivery to myeloid cells, such as monocytes, lipidoid formulations may have a similar component molar ratio. Different ratios of lipidoids and other components including, but not limited to, disteroylphosphatidyl choline, cholesterol and PEG-DMG, may be used to optimize the formulation of the oncology-related polynucleotide, primary construct, or mmRNA for delivery to different cell types including, but not limited to, hepatocytes, myeloid cells, muscle cells, etc. For example, the component molar ratio may include, but is not limited to, 50% C12-200, 10% disteroylphosphatidyl choline, 38.5% cholesterol, and %1.5 PEG-DMG (see Leuschner et al., Nat Biotechnol 2011 29:1005-1010; herein incorporated by reference in its entirety). The use of lipidoid formulations for the localized delivery of nucleic acids to cells (such as, but not limited to, adipose cells and muscle cells) via either subcutaneous or intramuscular delivery, may not require all of the formulation components desired for systemic delivery, and as such may comprise only the lipidoid and the oncology-related polynucleotide, primary construct, or mmRNA.

[0457] Combinations of different lipidoids may be used to improve the efficacy of oncology-related polynucleotide, primary construct, or mmRNA directed protein production as the lipidoids may be able to increase cell transfection by the oncology-related polynucleotide, primary construct, or mmRNA; and/or increase the translation of encoded protein (see Whitehead et al., Mol. Ther. 2011, 19:1688-1694, herein incorporated by reference in its entirety).

### Liposomes, Lipoplexes, and Lipid Nanoparticles

[0458] The oncology-related polynucleotide, primary construct, and mmRNA of the invention can be formulated using one or more liposomes, lipoplexes, or lipid nanoparticles. In one embodiment, pharmaceutical compositions of polynucleotide, primary construct, or mmRNA include liposomes. Liposomes are artificially-prepared vesicles which may primarily be composed of a lipid bilayer and may be used as a delivery vehicle for the administration of nutrients and pharmaceutical formulations. Liposomes can be of different sizes such as, but not limited to, a multilamellar vesicle (MLV) which may be hundreds of nanometers in diameter and may contain a series of concentric bilayers separated by narrow aqueous compartments, a small unicellular vesicle (SUV) which may be smaller than 50 nm in diameter, and a large unilamellar vesicle (LUV) which may be between 50 and 500 nm in diameter. Liposome design may include, but is not limited to, opsonins or ligands in order to improve the attachment of liposomes to unhealthy tissue or to activate events such as, but not limited to, endocytosis. Liposomes may contain a low or a high pH in order to improve the delivery of the pharmaceutical formulations.

[0459] The formation of liposomes may depend on the physicochemical characteristics such as, but not limited to, the pharmaceutical formulation entrapped and the liposomal ingredients, the nature of the medium in which the lipid vesicles are dispersed, the effective concentration of the entrapped substance and its potential toxicity, any additional processes involved during the application and/or delivery of the vesicles, the optimization size, polydispersity and the shelf-life of the vesicles for the intended application, and the batch-to-batch reproducibility and possibility of large-scale production of safe and efficient liposomal products.

[0460] In one embodiment, pharmaceutical compositions described herein may include, without limitation, liposomes such as those formed from 1,2-dioleyloxy-N,N-dimethylaminopropane (DODMA) liposomes, DiLa2 liposomes from Marina Biotech (Bothell, WA), 1,2-dilinoleyloxy-3-dimethylaminopropane (DLin-DMA), 2,2-dilinoleyl-4-(2-dimethylaminoethyl)-[1,3]-dioxolane (DLin-KC2-DMA), and MC3 (US20100324120; herein incorporated by reference in its entirety) and liposomes which may deliver small molecule drugs such as, but not limited to, DOXIL® from Janssen Biotech, Inc. (Horsham, PA).

[0461] In one embodiment, pharmaceutical compositions described herein may include, without limitation, liposomes such as those formed from the synthesis of stabilized plasmid-lipid particles (SPLP) or stabilized nucleic acid lipid particle (SNALP) that have been previously described and shown to be suitable for oligonucleotide delivery in vitro and in vivo (see Wheeler et al. Gene Therapy. 1999 6:271-281; Zhang et al. Gene Therapy. 1999 6:1438-1447; Jeffs et al. Pharm Res. 2005 22:362-372; Morrissey et al., Nat Biotechnol. 2005 2:1002-1007; Zimmermann et al., Nature. 2006 441:111-114; Heyes et al. J Contr Rel. 2005 107:276-287; Semple et al. Nature Biotech. 2010 28:172-176; Judge et al. J Clin Invest. 2009 119:661-673; deFougerolles Hum Gene Ther. 2008 19:125-132; all of which are incorporated herein in their entireties). The original manufacture method by Wheeler et al. was a detergent dialysis method, which was later improved by Jeffs et al. and is referred to as the spontaneous vesicle formation method. The liposome formulations are composed of 3 to 4 lipid components in addition to the oncology-related polynucleotide, primary construct, or mmRNA. As an example a liposome can contain, but is not limited to, 55% cholesterol, 20% disteroylphosphatidyl choline (DSPC), 10% PEG-S-DSG, and 15% 1,2-dioleyloxy-N,N-dimethylaminopropane (DODMA), as described by Jeffs et al. As another example, certain liposome formulations may contain, but are not limited to, 48% cholesterol, 20% DSPC, 2% PEG-c-DMA, and 30% cationic lipid, where the cationic lipid can be 1,2-distearloxy-N,N-dimethylaminopropane (DSDMA), DODMA, DLin-DMA, or 1,2-dilinolenyloxy-3-dimethylaminopropane (DLenDMA), as described by Heyes et al.

[0462] In one embodiment, pharmaceutical compositions may include liposomes which may be formed to deliver mmRNA which may encode at least one immunogen. The mmRNA may be encapsulated by the liposome and/or it may be contained in an aqueous core which may then be encapsulated by the liposome (see International Pub. Nos. WO2012031046, WO2012031043, WO2012030901 and WO2012006378; each of which is herein incorporated by reference in their entirety). In another embodiment, the mmRNA which may encode an immunogen may be formulated in a cationic oil-in-water emulsion where the emulsion particle comprises an oil core and a cationic lipid which can interact with the mmRNA anchoring the molecule to the emulsion particle (see International Pub. No. WO2012006380; herein incorporated by reference in its entirety). In yet another embodiment, the lipid formulation may include at least cationic lipid, a lipid which may enhance transfection and a least one lipid which contains a hydrophilic head group linked to a lipid moiety (International Pub. No. WO2011076807 and U.S. Pub. No. 20110200582; each of which is herein incorporated by reference in their entirety). In another embodiment, the oncology-related polynucleotides, primary constructs and/or mmRNA encoding an immunogen may be formulated in a lipid vesicle which may have crosslinks between functionalized lipid bilayers (see U.S. Pub. No. 20120177724, herein incorporated by reference in its entirety).

[0463] In one embodiment, the oncology-related polynucleotides, primary constructs and/or mmRNA may be formulated in a lipid vesicle which may have crosslinks between functionalized lipid bilayers.

[0464] In one embodiment, the oncology-related polynucleotides, primary constructs and/or mmRNA may be formulated in a liposome comprising a cationic lipid. The liposome may have a molar ratio of nitrogen atoms in the cationic lipid to the phophates in the RNA (N:P ratio) of between 1:1 and 20:1 as described in International Publication No. WO2013006825, herein incorporated by reference in its entirety. In another embodiment, the liposome may have a N:P ratio of greater than 20:1 or less than 1:1.

[0465] In one embodiment, the oncology-related polynucleotides, primary constructs and/or mmRNA may be formulated in a lipid-polycation complex. The formation of the lipid-polycation complex may be accomplished by methods known in the art and/or as described in U.S. Pub. No. 20120178702, herein incorporated by reference in its entirety. As a non-limiting example, the polycation may include a cationic peptide or a polypeptide such as, but not limited to, polylysine, polyornithine and/or polyarginine and the cationic peptides described in International Pub. No. WO2012013326; herein incorporated by reference in its entirety. In another embodiment, the oncology-related polynucleotides, primary constructs and/or mmRNA may be formulated in a lipid-polycation complex which may further include a neutral lipid such as, but not limited to, cholesterol or dioleoyl phosphatidylethanolamine (DOPE).

[0466] The liposome formulation may be influenced by, but not limited to, the selection of the cationic lipid component, the degree of cationic lipid saturation, the nature of the PEGylation, ratio of all components and biophysical parameters such as size. In one example by Semple et al. (Semple et al. Nature Biotech. 2010 28:172-176; herein incorporated by reference in its entirety), the liposome formulation was composed of 57.1% cationic lipid, 7.1% dipalmitoylphosphatidylcholine, 34.3% cholesterol, and 1.4% PEG-c-DMA. As another example, changing the composition of the cationic lipid could more effectively deliver siRNA to various antigen presenting cells (Basha et al. Mol Ther. 2011 19:2186-2200; herein incorporated by reference in its entirety).

[0467] In some embodiments, the ratio of PEG in the lipid nanoparticle (LNP) formulations may be increased or decreased and/or the carbon chain length of the PEG lipid may be modified from C14 to C18 to alter the pharmacokinetics and/or biodistribution of the LNP formulations. As a non-limiting example, LNP formulations may contain 1-5% of the lipid molar ratio of PEG-c-DOMG as compared to the cationic lipid, DSPC and cholesterol. In another embodiment the PEG-c-DOMG may be replaced with a PEG lipid such as, but not limited to, PEG-DSG (1,2-Distearoyl-sn-glycerol, methoxypolyethylene glycol) or PEG-DPG (1,2-Dipalmitoyl-sn-glycerol, methoxypolyethylene glycol). The cationic lipid may be selected from any lipid known in the art such as, but not limited to, DLin-MC3-DMA, DLin-DMA, C12-200 and DLin-KC2-DMA.

[0468] In one embodiment, the polynucleotides, primary constructs or mmRNA may be formulated in a lipid nanoparticle such as those described in International Publication No. WO2012170930, herein incorporated by reference in its entirety.

[0469] In one embodiment, the cationic lipid may be selected from, but not limited to, a cationic lipid described in International Publication Nos. WO2012040184, WO2011153120, WO2011149733, WO2011090965, WO2011043913, WO2011022460, WO2012061259, WO2012054365, WO2012044638, WO2010080724, WO201021865 and WO2008103276, U.S. Pat. Nos. 7,893,302, 7,404,969 and 8,283,333 and US Patent Publication No. US20100036115 and US20120202871; each of which is herein incorporated by reference in their entirety. In another embodiment, the cationic lipid may be selected from, but not limited to, formula A described in International Publication Nos. WO2012040184, WO2011153120, WO2011149733, WO2011090965, WO2011043913, WO2011022460, WO2012061259, WO2012054365 and WO2012044638; each of which is herein incorporated by reference in their entirety. In yet another embodiment, the cationic lipid may be selected from, but not limited to, formula CLI-CLXXIX of International Publication No. WO2008103276, formula CLI-CLXXIX of U.S. Pat. No. 7,893,302, formula CLI-CLXXXXII of U.S. Pat. No. 7,404,969 and formula I-VI of US Patent Publication No. US20100036115; each of which is herein incorporated by reference in their entirety. As a non-limiting example, the cationic lipid may be selected from (20Z,23Z)—N,N-dimethylnonacosa-20,23-dien-10-amine, (17Z,20Z)—N,N-dimemylhexacosa-17,20-dien-9-amine, (1Z,19Z)—N5N-dimethylpentacosa-16, 19-dien-8-amine, (13Z,16Z)—N,N-dimethyldocosa-13,16-dien-5-amine, (12Z,15Z)—N,N-dimethylhenicosa-12,15-dien-4-amine, (14Z,17Z)—N,N-dimethyltricosa-14,17-dien-6-amine, (15Z,18Z)—N,N-dimethyltetracosa-15,18-dien-7-amine, (18Z,21Z)—N,N-dimethylheptacosa-18,21-dien-10-amine, (15Z,18Z)—N,N-dimethyltetracosa-15,18-dien-5-amine, (14Z,17Z)—N,N-dimethyltricosa-14,17-dien-4-amine, (19Z,22Z)—N,N-dimeihyloctacosa-19,22-dien-9-amine, (18Z,21 Z)—N,N-dimethylheptacosa-18,21-dien-8-amine, (17Z,20Z)—N,N-dimethylhexacosa-17,20-dien-7-amine, (16Z,19Z)—N,N-dimethylpentacosa-16,19-dien-6-amine, (22Z,25Z)—N,N-dimethylhentriaconta-22,25-dien-10-amine, (21 Z,24Z)—N,N-dimethyltriaconta-21,24-dien-9-amine, (18Z)—N,N-dimetylheptacos-18-en-10-amine, (17Z)—N,N-dimethylhexacos-17-en-9-amine, (19Z,22Z)—N,N-dimethyloctacosa-19,22-dien-7-amine, N,N-dimethylheptacosan-10-amine, (20Z,23Z)—N-ethyl-N-methylnonacosa-20,23-dien-10-amine, 1-[(11Z,14Z)-1-nonylicosa-11,14-dien-l-yl]pyrrolidine, (20Z)—N,N-dimethylheptacos-20-en-1 0-amine, (15Z)—N,N-dimethyl eptacos-15-en-1 0-amine, (14Z)—N,N-dimethylnonacos-14-en-10-amine, (17Z)—N,N-dimethylnonacos-17-en-10-amine, (24Z)—N,N-dimethyltritriacont-24-en-10-amine, (20Z)—N,N-dimethylnonacos-20-en-1 O-amine, (22Z)—N,N-dimethylhentriacont-22-en-10-amine, (16Z)—N,N-dimethylpentacos-16-en-8-amine, (12Z,15Z)—N,N-dimethyl-2-nonylhenicosa-12,15-dien-1-amine, (13Z,16Z)—N,N-dimethyl-3-nonyldocosa-13,16-dien-1-amine, N,N-dimethyl-1-[(1S,2R)-2-octylcyclopropyl]eptadecan-8-amine, 1-[(1S,2R)-2-hexylcyclopropyl]-N,N-dimethylnonadecan-10-amine, N,N-dimethyl-1-[(1S,2R)-2-octylcyclopropyl]nonadecan-10-amine, N,N-dimethyl-21-[(1S,2R)-2-octylcyclopropyl]henicosan-10-amine,N,N-dimethyl-1-[(1S,2S)-2-{[(1R,2R)-2-pentylcyclopropyl]methyl}cyclopropyl]nonadecan-10-amine,N,N-dimethyl-1-[(1S,2R)-2-octylcyclopropyl]hexadecan-8-amine, N,N-dimethyl-[(1R,2S)-2-undecylcyclopropyl]tetradecan-5-amine, N,N-dimethyl-3-{7-[(1S,2R)-2-octylcyclopropyl]heptyl}dodecan-1-amine, 1-[(1R,2S)-2-heptylcyclopropyl]-N,N-dimethyloctadecan-9-amine, 1-[(1S,2R)-2-decylcyclopropyl]-N,N-dimethylpentadecan-6-amine, N,N-dimethyl-1-[(1S,2R)-2-octylcyclopropyl]pentadecan-8-amine, R—N,N-dimethyl-1-[(9Z,12Z)-octadeca-9,12-dien-1-yloxy]-3-(octyloxy)propan-2-amine, S—N,N-dimethyl-1-[(9Z,12Z)-octadeca-9,12-dien-1-yloxy]-3-(octyloxy)propan-2-amine, 1-{2-[(9Z,12Z)-octadeca-9,12-dien-1-yloxy]-1-[(octyloxy)methyl]ethyl}pyrrolidine, (2S)—N,N-dimethyl-1-[(9Z,12Z)-octadeca-9,12-dien-1-yloxy]-3-[(5Z)-oct-5-en-1-yloxy]propan-2-amine, 1-{2-[(9Z,12Z)-octadeca-9,12-dien-1-yloxy]-1-[(octyloxy)methyl]ethyl}azetidine, (2S)-1-(hexyloxy)-N,N-dimethyl-3-[(9Z,12Z)-octadeca-9,12-dien-1-yloxy]propan-2-amine, (2S)-1-(heptyloxy)-N,N-dimethyl-3-[(9Z,12Z)-octadeca-9,12-dien-1-yloxy]propan-2-amine, N,N-dimethyl-1-(nonyloxy)-3-[(9Z,12Z)-octadeca-9,12-dien-1-yloxy]propan-2-amine, N,N-dimethyl-1-[(9Z)-octadec-9-en-1-yloxy]-3-(octyloxy)propan-2-amine; (2S)—N,N-dimethyl-1-[(6Z,9Z,12Z)-octadeca-6,9,12-trien-1-yloxy]-3-(octyloxy)propan-2-amine, (2S)-1-[(11Z,14Z)-icosa-11,14-dien-1-yloxy]-N,N-dimethyl-3-(pentyloxy)propan-2-amine, (2S)-1-(hexyloxy)-3-[(11Z,14Z)-icosa-11,14-dien-1-yloxy]-N,N-dimethylpropan-2-amine, 1-[(11Z,14Z)-icosa-11,14-dien-1-yloxy]-N,N-dimethyl-3-(octyloxy)propan-2-amine, 1-[(13Z,16Z)-docosa-13,16-dien-1-yloxy]-N,N-dimethyl-3-(octyloxy)propan-2-amine, (2S)-1-[(13Z,16Z)-docosa-13,16-dien-1-yloxy]-3-(hexyloxy)-N,N-dimethylpropan-2-amine, (2S)-1-[(13Z)-docos-13-en-1-yloxy]-3-(hexyloxy)-N,N-dimethylpropan-2-amine, 1-[(13Z)-docos-13-en-1-yloxy]-N,N-dimethyl-3-(octyloxy)propan-2-amine, 1-[(9Z)-hexadec-9-en-1-yloxy]-N,N-dimethyl-3-(octyloxy)propan-2-amine, (2R)—N,N-dimethyl-H(1-metoyloctyl)oxy]-3-[(9Z,12Z)-octadeca-9,12-dien-1-yloxy]propan-2-amine, (2R)-1-[(3,7-dimethyloctyl)oxy]-N,N-dimethyl-3-[(9Z,12Z)-octadeca-9,12-dien-1-yloxy]propan-2-amine, N,N-dimethyl-1-(octyloxy)-3-({8-[(1S,2S)-2-{[(1R,2R)-2-pentylcyclopropyl]methyl}cyclopropyl]octyl}oxy)propan-2-amine, N,N-dimethyl-1-{[8-(2-oclylcyclopropyl)octyl]oxy}-3-(octyloxy)propan-2-amine and (1lE,20Z,23Z)—N,N-dimethylnonacosa-l1,20,2-trien-10-amine or a pharmaceutically acceptable salt or stereoisomer thereof.

[0470] In one embodiment, the lipid may be a cleavable lipid such as those described in International Publication No. WO2012170889, herein incorporated by reference in its entirety.

[0471] In one embodiment, the cationic lipid may be synthesized by methods known in the art and/or as described in International Publication Nos. WO2012040184, WO2011153120, WO2011149733, WO2011090965, WO2011043913, WO2011022460, WO2012061259, WO2012054365, WO2012044638, WO2010080724 and WO201021865; each of which is herein incorporated by reference in their entirety.

[0472] In one embodiment, the LNP formulations of the oncology-related polynucleotides, primary constructs and/or mmRNA may contain PEG-c-DOMG at 3% lipid molar ratio. In another embodiment, the LNP formulations polynucleotides, primary constructs and/or mmRNA may contain PEG-c-DOMG at 1.5% lipid molar ratio.

[0473] In one embodiment, the pharmaceutical compositions of the oncology-related polynucleotides, primary constructs and/or mmRNA may include at least one of the PEGylated lipids described in International Publication No. 2012099755, herein incorporated by reference.

[0474] In one embodiment, the LNP formulation may contain PEG-DMG 2000 (1,2-dimyristoyl-sn-glycero-3-phophoethanolamine-N-[methoxy(polyethylene glycol)-2000). In one embodiment, the LNP formulation may contain PEG-DMG 2000, a cationic lipid known in the art and at least one other component. In another embodiment, the LNP formulation may contain PEG-DMG 2000, a cationic lipid known in the art, DSPC and cholesterol. As a non-limiting example, the LNP formulation may contain PEG-DMG 2000, DLin-DMA, DSPC and cholesterol. As another non-limiting example the LNP formulation may contain PEG-DMG 2000, DLin-DMA, DSPC and cholesterol in a molar ratio of 2:40:10:48 (see e.g., Geall et al., Nonviral delivery of self-amplifying RNA vaccines, PNAS 2012; PMID: 22908294; herein incorporated by reference in its entirety). As another non-limiting example, modified RNA described herein may be formulated in a nanoparticle to be delivered by a parenteral route as described in U.S. Pub. No. 20120207845; herein incorporated by reference in its entirety.

[0475] In one embodiment, the LNP formulation may be formulated by the methods described in International Publication Nos. WO2011127255 or WO2008103276, each of which is herein incorporated by reference in their entirety. As a non-limiting example, modified RNA described herein may be encapsulated in LNP formulations as described in WO2011127255 and/or WO2008103276; each of which is herein incorporated by reference in their entirety.

[0476] In one embodiment, LNP formulations described herein may comprise a polycationic composition. As a non-limiting example, the polycationic composition may be selected from formula 1-60 of US Patent Publication No. US20050222064; herein incorporated by reference in its entirety. In another embodiment, the LNP formulations comprising a polycationic composition may be used for the delivery of the modified RNA described herein in vivo and/or in vitro.

[0477] In one embodiment, the LNP formulations described herein may additionally comprise a permeability enhancer molecule. Non-limiting permeability enhancer molecules are described in US Patent Publication No. US20050222064; herein incorporated by reference in its entirety.

[0478] In one embodiment, the pharmaceutical compositions may be formulated in liposomes such as, but not limited to, DiLa2 liposomes (Marina Biotech, Bothell, WA), SMARTICLES® (Marina Biotech, Bothell, WA), neutral DOPC (1,2-dioleoyl-sn-glycero-3-phosphocholine) based liposomes (e.g., siRNA delivery for ovarian cancer (Landen et al. Cancer Biology & Therapy 2006 5(12)1708-1713); herein incorporated by reference in its entirety) and hyaluronan-coated liposomes (Quiet Therapeutics, Israel).

[0479] The nanoparticle formulations may be a carbohydrate nanoparticle comprising a carbohydrate carrier and a modified nucleic acid molecule (e.g., mmRNA). As a non-limiting example, the carbohydrate carrier may include, but is not limited to, an anhydride-modified phytoglycogen or glycogen-type material, phtoglycogen octenyl succinate, phytoglycogen beta-dextrin, anhydride-modified phytoglycogen beta-dextrin. (See e.g., International Publication No. WO2012109121; herein incorporated by reference in its entirety).

[0480] Lipid nanoparticle formulations may be improved by replacing the cationic lipid with a biodegradable cationic lipid which is known as a rapidly eliminated lipid nanoparticle (reLNP). Ionizable cationic lipids, such as, but not limited to, DLinDMA, DLin-KC2-DMA, and DLin-MC3-DMA, have been shown to accumulate in plasma and tissues over time and may be a potential source of toxicity. The rapid metabolism of the rapidly eliminated lipids can improve the tolerability and therapeutic index of the lipid nanoparticles by an order of magnitude from a 1 mg/kg dose to a 10 mg/kg dose in rat. Inclusion of an enzymatically degraded ester linkage can improve the degradation and metabolism profile of the cationic component, while still maintaining the activity of the reLNP formulation. The ester linkage can be internally located within the lipid chain or it may be terminally located at the terminal end of the lipid chain. The internal ester linkage may replace any carbon in the lipid chain.

[0481] In one embodiment, the internal ester linkage may be located on either side of the saturated carbon. Non-limiting examples of reLNPs include,

[chemical structure]

[0482] In one embodiment, an immune response may be elicited by delivering a lipid nanoparticle which may include a nanospecies, a polymer and an immunogen. (U.S. Publication No. 20120189700 and International Publication No. WO2012099805; each of which is herein incorporated by reference in their entirety). The polymer may encapsulate the nanospecies or partially encapsulate the nanospecies. The immunogen may be a recombinant protein, a modified RNA and/or a primary construct described herein. In one embodiment, the lipid nanoparticle may be formulated for use in a vaccine such as, but not limited to, against a pathogen.

[0483] Lipid nanoparticles may be engineered to alter the surface properties of particles so the lipid nanoparticles may penetrate the mucosal barrier. Mucus is located on mucosal tissue such as, but not limited to, oral (e.g., the buccal and esophageal membranes and tonsil tissue), ophthalmic, gastrointestinal (e.g., stomach, small intestine, large intestine, colon, rectum), nasal, respiratory (e.g., nasal, pharyngeal, tracheal and bronchial membranes), genital (e.g., vaginal, cervical and urethral membranes). Nanoparticles larger than 10-200 nm which are preferred for higher drug encapsulation efficiency and the ability to provide the sustained delivery of a wide array of drugs have been thought to be too large to rapidly diffuse through mucosal barriers. Mucus is continuously secreted, shed, discarded or digested and recycled so most of the trapped particles may be removed from the mucosla tissue within seconds or within a few hours. Large polymeric nanoparticles (200 nm-500 nm in diameter) which have been coated densely with a low molecular weight polyethylene glycol (PEG) diffused through mucus only 4 to 6-fold lower than the same particles diffusing in water (Lai et al. PNAS 2007 104(5):1482-487; Lai et al. Adv Drug Deliv Rev. 2009 61(2): 158-171; each of which is herein incorporated by reference in their entirety). The transport of nanoparticles may be determined using rates of permeation and/or fluorescent microscopy techniques including, but not limited to, fluorescence recovery after photobleaching (FRAP) and high resolution multiple particle tracking (MPT). As a non-limiting example, compositions which can penetrate a mucosal barrier may be made as described in U.S. Pat. No. 8,241,670, herein incorporated by reference in its entirety.

[0484] The lipid nanoparticle engineered to penetrate mucus may comprise a polymeric material (i.e. a polymeric core) and/or a polymer-vitamin conjugate and/or a tri-block co-polymer. The polymeric material may include, but is not limited to, polyamines, polyethers, polyamides, polyesters, polycarbamates, polyureas, polycarbonates, poly(styrenes), polyimides, polysulfones, polyurethanes, polyacetylenes, polyethylenes, polyethyeneimines, polyisocyanates, polyacrylates, polymethacrylates, polyacrylonitriles, and polyarylates. The polymeric material may be biodegradable and/or biocompatible. The polymeric material may additionally be irradiated. As a non-limiting example, the polymeric material may be gamma irradiated (See e.g., International App. No. WO201282165, herein incorporated by reference in its entirety). Non-limiting examples of specific polymers include poly(caprolactone) (PCL), ethylene vinyl acetate polymer (EVA), poly(lactic acid) (PLA), poly(L-lactic acid) (PLLA), poly(glycolic acid) (PGA), poly(lactic acid-co-glycolic acid) (PLGA), poly(L-lactic acid-co-glycolic acid) (PLLGA), poly(D,L-lactide) (PDLA), poly(L-lactide) (PLLA), poly(D,L-lactide-co-caprolactone), poly(D,L-lactide-co-caprolactone-co-glycolide), poly(D,L-lactide-co-PEO-co-D,L-lactide), poly(D,L-lactide-co-PPO-co-D,L-lactide), polyalkyl cyanoacralate, polyurethane, poly-L-lysine (PLL), hydroxypropyl methacrylate (HPMA), polyethyleneglycol, poly-L-glutamic acid, poly(hydroxy acids), polyanhydrides, polyorthoesters, poly(ester amides), polyamides, poly(ester ethers), polycarbonates, polyalkylenes such as polyethylene and polypropylene, polyalkylene glycols such as poly(ethylene glycol) (PEG), polyalkylene oxides (PEO), polyalkylene terephthalates such as poly(ethylene terephthalate), polyvinyl alcohols (PVA), polyvinyl ethers, polyvinyl esters such as poly(vinyl acetate), polyvinyl halides such as poly(vinyl chloride) (PVC), polyvinylpyrrolidone, polysiloxanes, polystyrene (PS), polyurethanes, derivatized celluloses such as alkyl celluloses, hydroxyalkyl celluloses, cellulose ethers, cellulose esters, nitro celluloses, hydroxypropylcellulose, carboxymethylcellulose, polymers of acrylic acids, such as poly(methyl(meth)acrylate) (PMMA), poly(ethyl(meth)acrylate), poly(butyl(meth)acrylate), poly(isobutyl(meth)acrylate), poly(hexyl(meth)acrylate), poly(isodecyl(meth)acrylate), poly(lauryl(meth)acrylate), poly(phenyl(meth)acrylate), poly(methyl acrylate), poly(isopropyl acrylate), poly(isobutyl acrylate), poly(octadecyl acrylate) and copolymers and mixtures thereof, polydioxanone and its copolymers, polyhydroxyalkanoates, polypropylene fumarate, polyoxymethylene, poloxamers, poly(ortho)esters, poly(butyric acid), poly(valeric acid), poly(lactide-co-caprolactone), and trimethylene carbonate, polyvinylpyrrolidone. The lipid nanoparticle may be coated or associated with a co-polymer such as, but not limited to, a block co-polymer (such as, but not limited to, a branched polyether-polyamide block copolymer described in International Publication No. WO2013012476, herein incorporated by reference in its entirety), and (poly(ethylene glycol))-(poly(propylene oxide))-(poly(ethylene glycol)) triblock copolymer (see e.g., US Publication 20120121718 and US Publication 20100003337 and U.S. Pat. No. 8,263,665; each of which is herein incorporated by reference in their entirety). The co-polymer may be a polymer that is generally regarded as safe (GRAS) and the formation of the lipid nanoparticle may be in such a way that no new chemical entities are created. For example, the lipid nanoparticle may comprise poloxamers coating PLGA nanoparticles without forming new chemical entities which are still able to rapidly penetrate human mucus (Yang et al. Angew. Chem. Int. Ed. 2011 50:2597-2600; herein incorporated by reference in its entirety).

[0485] The vitamin of the polymer-vitamin conjugate may be vitamin E. The vitamin portion of the conjugate may be substituted with other suitable components such as, but not limited to, vitamin A, vitamin E, other vitamins, cholesterol, a hydrophobic moiety, or a hydrophobic component of other surfactants (e.g., sterol chains, fatty acids, hydrocarbon chains and alkylene oxide chains).

[0486] The lipid nanoparticle engineered to penetrate mucus may include surface altering agents such as, but not limited to, mmRNA, anionic proteins (e.g., bovine serum albumin), surfactants (e.g., cationic surfactants such as for example dimethyldioctadecyl-ammonium bromide), sugars or sugar derivatives (e.g., cyclodextrin), nucleic acids, polymers (e.g., heparin, polyethylene glycol and poloxamer), mucolytic agents (e.g., N-acetylcysteine, mugwort, bromelain, papain, clerodendrum, acetylcysteine, bromhexine, carbocisteine, eprazinone, mesna, ambroxol, sobrerol, domiodol, letosteine, stepronin, tiopronin, gelsolin, thymosin β4 dornase alfa, neltenexine, erdosteine) and various DNases including rhDNase. The surface altering agent may be embedded or enmeshed in the particle's surface or disposed (e.g., by coating, adsorption, covalent linkage, or other process) on the surface of the lipid nanoparticle. (see e.g., US Publication 20100215580 and US Publication 20080166414; each of which is herein incorporated by reference in their entirety).

[0487] The mucus penetrating lipid nanoparticles may comprise at least one mmRNA described herein. The mmRNA may be encapsulated in the lipid nanoparticle and/or disposed on the surface of the particle. The mmRNA may be covalently coupled to the lipid nanoparticle. Formulations of mucus penetrating lipid nanoparticles may comprise a plurality of nanoparticles. Further, the formulations may contain particles which may interact with the mucus and alter the structural and/or adhesive properties of the surrounding mucus to decrease mucoadhesion which may increase the delivery of the mucus penetrating lipid nanoparticles to the mucosal tissue.

[0488] In one embodiment, the oncology-related polynucleotide, primary construct, or mmRNA is formulated as a lipoplex, such as, without limitation, the ATUPLEX™ system, the DACC system, the DBTC system and other siRNA-lipoplex technology from Silence Therapeutics (London, United Kingdom), STEMFECT™ from STEMGENT® (Cambridge, MA), and polyethylenimine (PEI) or protamine-based targeted and non-targeted delivery of nucleic acids acids (Aleku et al. Cancer Res. 2008 68:9788-9798; Strumberg et al. Int J Clin Pharmacol Ther 2012 50:76-78; Santel et al., Gene Ther 2006 13:1222-1234; Santel et al., Gene Ther 2006 13:1360-1370; Gutbier et al., Pulm Pharmacol. Ther. 2010 23:334-344; Kaufmann et al. Microvasc Res 2010 80:286-293Weide et al. J Immunother. 2009 32:498-507; Weide et al. J Immunother. 2008 31:180-188; Pascolo Expert Opin. Biol. Ther. 4:1285-1294; Fotin-Mleczek et al., 2011 J. Immunother. 34:1-15; Song et al., Nature Biotechnol. 2005, 23:709-717; Peer et al., Proc Natl Acad Sci USA. 2007 6; 104:4095-4100; deFougerolles Hum Gene Ther. 2008 19:125-132; all of which are incorporated herein by reference in its entirety).

[0489] In one embodiment such formulations may also be constructed or compositions altered such that they passively or actively are directed to different cell types in vivo, including but not limited to hepatocytes, immune cells, tumor cells, endothelial cells, antigen presenting cells, and leukocytes (Akinc et al. Mol Ther. 2010 18:1357-1364; Song et al., Nat Biotechnol. 2005 23:709-717; Judge et al., J Clin Invest. 2009 119:661-673; Kaufmann et al., Microvasc Res 2010 80:286-293; Santel et al., Gene Ther 2006 13:1222-1234; Santel et al., Gene Ther 2006 13:1360-1370; Gutbier et al., Pulm Pharmacol. Ther. 2010 23:334-344; Basha et al., Mol. Ther. 2011 19:2186-2200; Fenske and Cullis, Expert Opin Drug Deliv. 2008 5:25-44; Peer et al., Science. 2008 319:627-630; Peer and Lieberman, Gene Ther. 2011 18:1127-1133; all of which are incorporated herein by reference in its entirety). One example of passive targeting of formulations to liver cells includes the DLin-DMA, DLin-KC2-DMA and DLin-MC3-DMA-based lipid nanoparticle formulations which have been shown to bind to apolipoprotein E and promote binding and uptake of these formulations into hepatocytes in vivo (Akinc et al. Mol Ther. 2010 18:1357-1364; herein incorporated by reference in its entirety). Formulations can also be selectively targeted through expression of different ligands on their surface as exemplified by, but not limited by, folate, transferrin, N-acetylgalactosamine (GalNAc), and antibody targeted approaches (Kolhatkar et al., Curr Drug Discov Technol. 2011 8:197-206; Musacchio and Torchilin, Front Biosci. 2011 16:1388-1412; Yu et al., Mol Membr Biol. 2010 27:286-298; Patil et al., Crit Rev Ther Drug Carrier Syst. 2008 25:1-61; Benoit et al., Biomacromolecules. 2011 12:2708-2714; Zhao et al., Expert Opin Drug Deliv. 2008 5:309-319; Akinc et al., Mol Ther. 2010 18:1357-1364; Srinivasan et al., Methods Mol Biol. 2012 820:105-116; Ben-Arie et al., Methods Mol Biol. 2012 757:497-507; Peer 2010 J Control Release. 20:63-68; Peer et al., Proc Natl Acad Sci USA. 2007 104:4095-4100; Kim et al., Methods Mol Biol. 2011 721:339-353; Subramanya et al., Mol Ther. 2010 18:2028-2037; Song et al., Nat Biotechnol. 2005 23:709-717; Peer et al., Science. 2008 319:627-630; Peer and Lieberman, Gene Ther. 2011 18:1127-1133; all of which are incorporated herein by reference in its entirety).

[0490] In one embodiment, the oncology-related polynucleotide, primary construct, or mmRNA is formulated as a solid lipid nanoparticle. A solid lipid nanoparticle (SLN) may be spherical with an average diameter between 10 to 1000 nm. SLN possess a solid lipid core matrix that can solubilize lipophilic molecules and may be stabilized with surfactants and/or emulsifiers. In a further embodiment, the lipid nanoparticle may be a self-assembly lipid-polymer nanoparticle (see Zhang et al., ACS Nano, 2008, 2 (8), pp 1696-1702; herein incorporated by reference in its entirety).

[0491] Liposomes, lipoplexes, or lipid nanoparticles may be used to improve the efficacy of polynucleotide, primary construct, or mmRNA directed protein production as these formulations may be able to increase cell transfection by the oncology-related polynucleotide, primary construct, or mmRNA; and/or increase the translation of encoded protein. One such example involves the use of lipid encapsulation to enable the effective systemic delivery of polyplex plasmid DNA (Heyes et al., Mol Ther. 2007 15:713-720; herein incorporated by reference in its entirety). The liposomes, lipoplexes, or lipid nanoparticles may also be used to increase the stability of the oncology-related polynucleotide, primary construct, or mmRNA.

[0492] In one embodiment, the the polynucleotides, primary constructs, and/or the mmRNA of the present invention can be formulated for controlled release and/or targeted delivery. As used herein, “controlled release” refers to a pharmaceutical composition or compound release profile that conforms to a particular pattern of release to effect a therapeutic outcome. In one embodiment, the polynucleotides, primary constructs or the mmRNA may be encapsulated into a delivery agent described herein and/or known in the art for controlled release and/or targeted delivery. As used herein, the term “encapsulate” means to enclose, surround or encase. As it relates to the formulation of the compounds of the invention, encapsulation may be substantial, complete or partial. The term “substantially encapsulated” means that at least greater than 50, 60, 70, 80, 85, 90, 95, 96, 97, 98, 99, 99.9, 99.9 or greater than 99.999% of the pharmaceutical composition or compound of the invention may be enclosed, surrounded or encased within the delivery agent. “Partially encapsulation” means that less than 10, 10, 20, 30, 40 50 or less of the pharmaceutical composition or compound of the invention may be enclosed, surrounded or encased within the delivery agent. Advantageously, encapsulation may be determined by measuring the escape or the activity of the pharmaceutical composition or compound of the invention using fluorescence and/or electron micrograph. For example, at least 1, 5, 10, 20, 30, 40, 50, 60, 70, 80, 85, 90, 95, 96, 97, 98, 99, 99.9, 99.99 or greater than 99.99% of the pharmaceutical composition or compound of the invention are encapsulated in the delivery agent.

[0493] In one embodiment, the controlled release formulation may include, but is not limited to, tri-block co-polymers. As a non-limiting example, the formulation may include two different types of tri-block co-polymers (International Pub. No. WO2012131104 and WO2012131106; each of which is herein incorporated by reference in its entirety).

[0494] In another embodiment, the the polynucleotides, primary constructs, or the mmRNA may be encapsulated into a lipid nanoparticle or a rapidly eliminated lipid nanoparticle and the lipid nanoparticles or a rapidly eliminated lipid nanoparticle may then be encapsulated into a polymer, hydrogel and/or surgical sealant described herein and/or known in the art. As a non-limiting example, the polymer, hydrogel or surgical sealant may be PLGA, ethylene vinyl acetate (EVAc), poloxamer, GELSITE® (Nanotherapeutics, Inc. Alachua, FL), HYLENEX® (Halozyme Therapeutics, San Diego CA), surgical sealants such as fibrinogen polymers (Ethicon Inc. Cornelia, GA), TISSELL® (Baxter International, Inc Deerfield, IL), PEG-based sealants, and COSEAL® (Baxter International, Inc Deerfield, IL).

[0495] In another embodiment, the lipid nanoparticle may be encapsulated into any polymer known in the art which may form a gel when injected into a subject. As another non-limiting example, the lipid nanoparticle may be encapsulated into a polymer matrix which may be biodegradable.

[0496] In one embodiment, the the oncology-related polynucleotide, primary construct, or mmRNA formulation for controlled release and/or targeted delivery may also include at least one controlled release coating. Controlled release coatings include, but are not limited to, OPADRY®, polyvinylpyrrolidone/vinyl acetate copolymer, polyvinylpyrrolidone, hydroxypropyl methylcellulose, hydroxypropyl cellulose, hydroxyethyl cellulose, EUDRAGIT RL®, EUDRAGIT RS® and cellulose derivatives such as ethylcellulose aqueous dispersions (AQUACOAT® and SURELEASE®).

[0497] In one embodiment, the controlled release and/or targeted delivery formulation may comprise at least one degradable polyester which may contain polycationic side chains. Degradeable polyesters include, but are not limited to, poly(serine ester), poly(L-lactide-co-L-lysine), poly(4-hydroxy-L-proline ester), and combinations thereof. In another embodiment, the degradable polyesters may include a PEG conjugation to form a PEGylated polymer.

[0498] In one embodiment, the the polynucleotides, primary constructs, and/or the mmRNA of the present invention may be encapsulated in a therapeutic nanoparticle. Therapeutic nanoparticles may be formulated by methods described herein and known in the art such as, but not limited to, International Pub Nos. WO2010005740, WO2010030763, WO2010005721, WO2010005723, WO2012054923, US Pub. Nos. US20110262491, US20100104645, US20100087337, US20100068285, US20110274759, US20100068286 and US20120288541 and U.S. Pat. Nos. 8,206,747, 8,293,276, 8,318,208 and 8,318,211 each of which is herein incorporated by reference in their entirety. In another embodiment, therapeutic polymer nanoparticles may be identified by the methods described in US Pub No. US20120140790, herein incorporated by reference in its entirety.

[0499] In one embodiment, the therapeutic nanoparticle may be formulated for sustained release. As used herein, “sustained release” refers to a pharmaceutical composition or compound that conforms to a release rate over a specific period of time. The period of time may include, but is not limited to, hours, days, weeks, months and years. As a non-limiting example, the sustained release nanoparticle may comprise a polymer and a therapeutic agent such as, but not limited to, the the polynucleotides, primary constructs, and mmRNA of the present invention (see International Pub No. 2010075072 and US Pub No. US20100216804, US20110217377 and US20120201859, each of which is herein incorporated by reference in their entirety).

[0500] In one embodiment, the therapeutic nanoparticles may be formulated to be target specific. As a non-limiting example, the therapeutic nanoparticles may include a corticosteroid (see International Pub. No. WO2011084518; herein incorporated by reference in its entirety). In one embodiment, the therapeutic nanoparticles may be formulated to be cancer specific. As a non-limiting example, the therapeutic nanoparticles may be formulated in nanoparticles described in International Pub No. WO2008121949, WO2010005726, WO2010005725, WO2011084521 and US Pub No. US20100069426, US20120004293 and US20100104655, each of which is herein incorporated by reference in their entirety.

[0501] In one embodiment, the nanoparticles of the present invention may comprise a polymeric matrix. As a non-limiting example, the nanoparticle may comprise two or more polymers such as, but not limited to, polyethylenes, polycarbonates, polyanhydrides, polyhydroxyacids, polypropylfumerates, polycaprolactones, polyamides, polyacetals, polyethers, polyesters, poly(orthoesters), polycyanoacrylates, polyvinyl alcohols, polyurethanes, polyphosphazenes, polyacrylates, polymethacrylates, polycyanoacrylates, polyureas, polystyrenes, polyamines, polylysine, poly(ethylene imine), poly(serine ester), poly(L-lactide-co-L-lysine), poly(4-hydroxy-L-proline ester) or combinations thereof.

[0502] In one embodiment, the therapeutic nanoparticle comprises a diblock copolymer. In one embodiment, the diblock copolymer may include PEG in combination with a polymer such as, but not limited to, polyethylenes, polycarbonates, polyanhydrides, polyhydroxyacids, polypropylfumerates, polycaprolactones, polyamides, polyacetals, polyethers, polyesters, poly(orthoesters), polycyanoacrylates, polyvinyl alcohols, polyurethanes, polyphosphazenes, polyacrylates, polymethacrylates, polycyanoacrylates, polyureas, polystyrenes, polyamines, polylysine, poly(ethylene imine), poly(serine ester), poly(L-lactide-co-L-lysine), poly(4-hydroxy-L-proline ester) or combinations thereof.

[0503] As a non-limiting example the therapeutic nanoparticle comprises a PLGA-PEG block copolymer (see US Pub. No. US20120004293 and U.S. Pat. No. 8,236,330, each of which is herein incorporated by reference in their entirety). In another non-limiting example, the therapeutic nanoparticle is a stealth nanoparticle comprising a diblock copolymer of PEG and PLA or PEG and PLGA (see U.S. Pat. No. 8,246,968 and International Publication No. WO2012166923, each of which is herein incorporated by reference in its entirety).

[0504] In one embodiment, the therapeutic nanoparticle may comprise a multiblock copolymer (See e.g., U.S. Pat. Nos. 8,263,665 and 8,287,910; each of which is herein incorporated by reference in its entirety).

[0505] In one embodiment, the block copolymers described herein may be included in a polyion complex comprising a non-polymeric micelle and the block copolymer. (See e.g., U.S. Pub. No. 20120076836; herein incorporated by reference in its entirety).

[0506] In one embodiment, the therapeutic nanoparticle may comprise at least one acrylic polymer. Acrylic polymers include but are not limited to, acrylic acid, methacrylic acid, acrylic acid and methacrylic acid copolymers, methyl methacrylate copolymers, ethoxyethyl methacrylates, cyanoethyl methacrylate, amino alkyl methacrylate copolymer, poly(acrylic acid), poly(methacrylic acid), polycyanoacrylates and combinations thereof.

[0507] In one embodiment, the therapeutic nanoparticles may comprise at least one cationic polymer described herein and/or known in the art.

[0508] In one embodiment, the therapeutic nanoparticles may comprise at least one amine-containing polymer such as, but not limited to polylysine, polyethylene imine, poly(amidoamine) dendrimers, poly(beta-amino esters) (See e.g., U.S. Pat. No. 8,287,849; herein incorporated by reference in its entirety) and combinations thereof.

[0509] In one embodiment, the therapeutic nanoparticles may comprise at least one degradable polyester which may contain polycationic side chains. Degradeable polyesters include, but are not limited to, poly(serine ester), poly(L-lactide-co-L-lysine), poly(4-hydroxy-L-proline ester), and combinations thereof. In another embodiment, the degradable polyesters may include a PEG conjugation to form a PEGylated polymer.

[0510] In another embodiment, the therapeutic nanoparticle may include a conjugation of at least one targeting ligand. The targeting ligand may be any ligand known in the art such as, but not limited to, a monoclonal antibody. (Kirpotin et al, Cancer Res. 2006 66:6732-6740; herein incorporated by reference in its entirety).

[0511] In one embodiment, the therapeutic nanoparticle may be formulated in an aqueous solution which may be used to target cancer (see International Pub No. WO2011084513 and US Pub No. US20110294717, each of which is herein incorporated by reference in their entirety).

[0512] In one embodiment, the polynucleotides, primary constructs, or mmRNA may be encapsulated in, linked to and/or associated with synthetic nanocarriers. Synthetic nanocarriers include, but are not limited to, those described in International Pub. Nos. WO2010005740, WO2010030763, WO201213501, WO2012149252, WO2012149255, WO2012149259, WO2012149265, WO2012149268, WO2012149282, WO2012149301, WO2012149393, WO2012149405, WO2012149411, WO2012149454 and WO2013019669 and US Pub. Nos. US20110262491, US20100104645, US20100087337 and US20120244222, each of which is herein incorporated by reference in their entirety. The synthetic nanocarriers may be formulated using methods known in the art and/or described herein. As a non-limiting example, the synthetic nanocarriers may be formulated by the methods described in International Pub Nos. WO2010005740, WO2010030763 and WO201213501 and US Pub. Nos. US20110262491, US20100104645, US20100087337 and US2012024422, each of which is herein incorporated by reference in their entirety. In another embodiment, the synthetic nanocarrier formulations may be lyophilized by methods described in International Pub. No. WO2011072218 and U.S. Pat. No. 8,211,473; each of which is herein incorporated by reference in their entirety.

[0513] In one embodiment, the synthetic nanocarriers may contain reactive groups to release the oncology-related polynucleotides, primary constructs and/or mmRNA described herein (see International Pub. No. WO20120952552 and US Pub No. US20120171229, each of which is herein incorporated by reference in their entirety).

[0514] In one embodiment, the synthetic nanocarriers may contain an immunostimulatory agent to enhance the immune response from delivery of the synthetic nanocarrier. As a non-limiting example, the synthetic nanocarrier may comprise a Th1 immunostimulatory agent which may enhance a Th1-based response of the immune system (see International Pub No. WO2010123569 and US Pub. No. US20110223201, each of which is herein incorporated by reference in its entirety).

[0515] In one embodiment, the synthetic nanocarriers may be formulated for targeted release. In one embodiment, the synthetic nanocarrier is formulated to release the oncology-related polynucleotides, primary constructs and/or mmRNA at a specified pH and/or after a desired time interval. As a non-limiting example, the synthetic nanoparticle may be formulated to release the oncology-related polynucleotides, primary constructs and/or mmRNA after 24 hours and/or at a pH of 4.5 (see International Pub. Nos. WO2010138193 and WO2010138194 and US Pub Nos. US20110020388 and US20110027217, each of which is herein incorporated by reference in their entireties).

[0516] In one embodiment, the synthetic nanocarriers may be formulated for controlled and/or sustained release of the oncology-related polynucleotides, primary constructs and/or mmRNA described herein. As a non-limiting example, the synthetic nanocarriers for sustained release may be formulated by methods known in the art, described herein and/or as described in International Pub No. WO2010138192 and US Pub No. 20100303850, each of which is herein incorporated by reference in their entirety.

[0517] In one embodiment, the synthetic nanocarrier may be formulated for use as a vaccine. In one embodiment, the synthetic nanocarrier may encapsulate at least one polynucleotide, primary construct and/or mmRNA which encode at least one antigen. As a non-limiting example, the synthetic nanocarrier may include at least one antigen and an excipient for a vaccine dosage form (see International Pub No. WO2011150264 and US Pub No. US20110293723, each of which is herein incorporated by reference in their entirety). As another non-limiting example, a vaccine dosage form may include at least two synthetic nanocarriers with the same or different antigens and an excipient (see International Pub No. WO2011150249 and US Pub No. US20110293701, each of which is herein incorporated by reference in their entirety). The vaccine dosage form may be selected by methods described herein, known in the art and/or described in International Pub No. WO2011150258 and US Pub No. US20120027806, each of which is herein incorporated by reference in their entirety).

[0518] In one embodiment, the synthetic nanocarrier may comprise at least one polynucleotide, primary construct and/or mmRNA which encodes at least one adjuvant. As non-limiting example, the adjuvant may comprise dimethyldioctadecylammonium-bromide, dimethyldioctadecylammonium-chloride, dimethyldioctadecylammonium-phosphate or dimethyldioctadecylammonium-acetate (DDA) and an apolar fraction or part of said apolar fraction of a total lipid extract of a mycobacterium (See e.g, U.S. Pat. No. 8,241,610; herein incorporated by reference in its entirety). In another embodiment, the synthetic nanocarrier may comprise at least one polynucleotide, primary construct and/or mmRNA and an adjuvant. As a non-limiting example, the synthetic nanocarrier comprising and adjuvant may be formulated by the methods described in International Pub No. WO2011150240 and US Pub No. US20110293700, each of which is herein incorporated by reference in its entirety.

[0519] In one embodiment, the synthetic nanocarrier may encapsulate at least one polynucleotide, primary construct and/or mmRNA which encodes a peptide, fragment or region from a virus. As a non-limiting example, the synthetic nanocarrier may include, but is not limited to, the nanocarriers described in International Pub No. WO2012024621, WO201202629, WO2012024632 and US Pub No. US20120064110, US20120058153 and US20120058154, each of which is herein incorporated by reference in their entirety.

[0520] In one embodiment, the synthetic nanocarrier may be coupled to a polynucleotide, primary construct or mmRNA which may be able to trigger a humoral and/or cytotoxic T lymphocyte (CTL) response (See e.g., International Publication No. WO2013019669, herein incorporated by reference in its entirety).

[0521] In one embodiment, the nanoparticle may be optimized for oral administration. The nanoparticle may comprise at least one cationic biopolymer such as, but not limited to, chitosan or a derivative thereof. As a non-limiting example, the nanoparticle may be formulated by the methods described in U.S. Pub. No. 20120282343; herein incorporated by reference in its entirety. Polymers, Biodegradable Nanoparticles, and Core-Shell Nanoparticles

[0522] The oncology-related polynucleotide, primary construct, and mmRNA of the invention can be formulated using natural and/or synthetic polymers. Non-limiting examples of polymers which may be used for delivery include, but are not limited to, DYNAMIC POLYCONJUGATE® (Arrowhead Reasearch Corp., Pasadena, CA) formulations from MIRUS® Bio (Madison, WI) and Roche Madison (Madison, WI), PHASERX® polymer formulations such as, without limitation, SMARTT POLYMER TECHNOLOGY™ (Seattle, WA), DMRI/DOPE, poloxamer, VAXFECTIN® adjuvant from Vical (San Diego, CA), chitosan, cyclodextrin from Calando Pharmaceuticals (Pasadena, CA), dendrimers and poly(lactic-co-glycolic acid) (PLGA) polymers. RONDEL™ (RNAi/Oligonucleotide Nanoparticle Delivery) polymers (Arrowhead Research Corporation, Pasadena, CA) and pH responsive co-block polymers such as, but not limited to, PHASERX® (Seattle, WA).

[0523] A non-limiting example of chitosan formulation includes a core of positively charged chitosan and an outer portion of negatively charged substrate (U.S. Pub. No. 20120258176; herein incorporated by reference in its entirety). Chitosan includes, but is not limited to N-trimethyl chitosan, mono-N-carboxymethyl chitosan (MCC), N-palmitoyl chitosan (NPCS), EDTA-chitosan, low molecular weight chitosan, chitosan derivatives, or combinations thereof.

[0524] In one embodiment, the polymers used in the present invention have undergone processing to reduce and/or inhibit the attachment of unwanted substances such as, but not limited to, bacteria, to the surface of the polymer. The polymer may be processed by methods known and/or described in the art and/or described in International Pub. No. WO2012150467, herein incorporated by reference in its entirety.

[0525] A non-limiting example of PLGA formulations include, but are not limited to, PLGA injectable depots (e.g., ELIGARD® which is formed by dissolving PLGA in 66% N-methyl-2-pyrrolidone (NMP) and the remainder being aqueous solvent and leuprolide. Once injected, the PLGA and leuprolide peptide precipitates into the subcutaneous space).

[0526] Many of these polymer approaches have demonstrated efficacy in delivering oligonucleotides in vivo into the cell cytoplasm (reviewed in deFougerolles Hum Gene Ther. 2008 19:125-132; herein incorporated by reference in its entirety). Two polymer approaches that have yielded robust in vivo delivery of nucleic acids, in this case with small interfering RNA (siRNA), are dynamic polyconjugates and cyclodextrin-based nanoparticles. The first of these delivery approaches uses dynamic polyconjugates and has been shown in vivo in mice to effectively deliver siRNA and silence endogenous target mRNA in hepatocytes (Rozema et al., Proc Natl Acad Sci USA. 2007 104:12982-12887; herein incorporated by reference in its entirety). This particular approach is a multicomponent polymer system whose key features include a membrane-active polymer to which nucleic acid, in this case siRNA, is covalently coupled via a disulfide bond and where both PEG (for charge masking) and N-acetylgalactosamine (for hepatocyte targeting) groups are linked via pH-sensitive bonds (Rozema et al., Proc Natl Acad Sci U S A. 2007 104:12982-12887; herein incorporated by reference in its entirety). On binding to the hepatocyte and entry into the endosome, the polymer complex disassembles in the low-pH environment, with the polymer exposing its positive charge, leading to endosomal escape and cytoplasmic release of the siRNA from the polymer. Through replacement of the N-acetylgalactosamine group with a mannose group, it was shown one could alter targeting from asialoglycoprotein receptor-expressing hepatocytes to sinusoidal endothelium and Kupffer cells. Another polymer approach involves using transferrin-targeted cyclodextrin-containing polycation nanoparticles. These nanoparticles have demonstrated targeted silencing of the EWS-FLI1 gene product in transferrin receptor-expressing Ewing's sarcoma tumor cells (Hu-Lieskovan et al., Cancer Res. 2005 65: 8984-8982; herein incorporated by reference in its entirety) and siRNA formulated in these nanoparticles was well tolerated in non-human primates (Heidel et al., Proc Natl Acad Sci USA 2007 104:5715-21; herein incorporated by reference in its entirety). Both of these delivery strategies incorporate rational approaches using both targeted delivery and endosomal escape mechanisms.

[0527] The polymer formulation can permit the sustained or delayed release of polynucleotide, primary construct, or mmRNA (e.g., following intramuscular or subcutaneous injection). The altered release profile for the oncology-related polynucleotide, primary construct, or mmRNA can result in, for example, translation of an encoded protein over an extended period of time. The polymer formulation may also be used to increase the stability of the oncology-related polynucleotide, primary construct, or mmRNA. Biodegradable polymers have been previously used to protect nucleic acids other than mmRNA from degradation and been shown to result in sustained release of payloads in vivo (Rozema et al., Proc Natl Acad Sci USA. 2007 104:12982-12887; Sullivan et al., Expert Opin Drug Deliv. 2010 7:1433-1446; Convertine et al., Biomacromolecules. 2010 Oct. 1; Chu et al., Acc Chem Res. 2012 Jan. 13; Manganiello et al., Biomaterials. 2012 33:2301-2309; Benoit et al., Biomacromolecules. 2011 12:2708-2714; Singha et al., Nucleic Acid Ther. 2011 2:133-147; deFougerolles Hum Gene Ther. 2008 19:125-132; Schaffert and Wagner, Gene Ther. 2008 16:1131-1138; Chaturvedi et al., Expert Opin Drug Deliv. 2011 8:1455-1468; Davis, Mol Pharm. 2009 6:659-668; Davis, Nature 2010 464:1067-1070; each of which is herein incorporated by reference in its entirety).

[0528] In one embodiment, the pharmaceutical compositions may be sustained release formulations. In a further embodiment, the sustained release formulations may be for subcutaneous delivery. Sustained release formulations may include, but are not limited to, PLGA microspheres, ethylene vinyl acetate (EVAc), poloxamer, GELSITE® (Nanotherapeutics, Inc. Alachua, FL), HYLENEX® (Halozyme Therapeutics, San Diego CA), surgical sealants such as fibrinogen polymers (Ethicon Inc. Cornelia, GA), TISSELL® (Baxter International, Inc Deerfield, IL), PEG-based sealants, and COSEAL® (Baxter International, Inc Deerfield, IL).

[0529] As a non-limiting example modified mRNA may be formulated in PLGA microspheres by preparing the PLGA microspheres with tunable release rates (e.g., days and weeks) and encapsulating the modified mRNA in the PLGA microspheres while maintaining the integrity of the modified mRNA during the encapsulation process. EVAc are non-biodegradeable, biocompatible polymers which are used extensively in pre-clinical sustained release implant applications (e.g., extended release products Ocusert a pilocarpine ophthalmic insert for glaucoma or progestasert a sustained release progesterone intrauterine device; transdermal delivery systems Testoderm, Duragesic and Selegiline; catheters). Poloxamer F-407 NF is a hydrophilic, non-ionic surfactant triblock copolymer of polyoxyethylene-polyoxypropylene-polyoxyethylene having a low viscosity at temperatures less than 5° C. and forms a solid gel at temperatures greater than 15° C. PEG-based surgical sealants comprise two synthetic PEG components mixed in a delivery device which can be prepared in one minute, seals in 3 minutes and is reabsorbed within 30 days. GELSITE® and natural polymers are capable of in-situ gelation at the site of administration. They have been shown to interact with protein and peptide therapeutic candidates through ionic interaction to provide a stabilizing effect.

[0530] Polymer formulations can also be selectively targeted through expression of different ligands as exemplified by, but not limited by, folate, transferrin, and N-acetylgalactosamine (GalNAc) (Benoit et al., Biomacromolecules. 2011 12:2708-2714; Rozema et al., Proc Natl Acad Sci USA. 2007 104:12982-12887; Davis, Mol Pharm. 2009 6:659-668; Davis, Nature 2010 464:1067-1070; each of which is herein incorporated by reference in its entirety).

[0531] The modified nucleic acid, and mmRNA of the invention may be formulated with or in a polymeric compound. The polymer may include at least one polymer such as, but not limited to, polyethenes, polyethylene glycol (PEG), poly(l-lysine)(PLL), PEG grafted to PLL, cationic lipopolymer, biodegradable cationic lipopolymer, polyethyleneimine (PEI), cross-linked branched poly(alkylene imines), a polyamine derivative, a modified poloxamer, a biodegradable polymer, elastic biodegradable polymer, biodegradable block copolymer, biodegradable random copolymer, biodegradable polyester copolymer, biodegradable polyester block copolymer, biodegradable polyester block random copolymer, multiblock copolymers, linear biodegradable copolymer, poly[α-(4-aminobutyl)-L-glycolic acid) (PAGA), biodegradable cross-linked cationic multi-block copolymers, polycarbonates, polyanhydrides, polyhydroxyacids, polypropylfumerates, polycaprolactones, polyamides, polyacetals, polyethers, polyesters, poly(orthoesters), polycyanoacrylates, polyvinyl alcohols, polyurethanes, polyphosphazenes, polyacrylates, polymethacrylates, polycyanoacrylates, polyureas, polystyrenes, polyamines, polylysine, poly(ethylene imine), poly(serine ester), poly(L-lactide-co-L-lysine), poly(4-hydroxy-L-proline ester), acrylic polymers, amine-containing polymers, dextran polymers, dextran polymer derivatives or or combinations thereof.

[0532] As a non-limiting example, the modified nucleic acid or mmRNA of the invention may be formulated with the polymeric compound of PEG grafted with PLL as described in U.S. Pat. No. 6,177,274; herein incorporated by reference in its entirety. The formulation may be used for transfecting cells in vitro or for in vivo delivery of the modified nucleic acid and mmRNA. In another example, the modified nucleic acid and mmRNA may be suspended in a solution or medium with a cationic polymer, in a dry pharmaceutical composition or in a solution that is capable of being dried as described in U.S. Pub. Nos. 20090042829 and 20090042825; each of which are herein incorporated by reference in their entireties.

[0533] As another non-limiting example the oncology-related polynucleotides, primary constructs or mmRNA of the invention may be formulated with a PLGA-PEG block copolymer (see US Pub. No. US20120004293 and U.S. Pat. No. 8,236,330, herein incorporated by reference in their entireties) or PLGA-PEG-PLGA block copolymers (See U.S. Pat. No. 6,004,573, herein incorporated by reference in its entirety). As a non-limiting example, the oncology-related polynucleotides, primary constructs or mmRNA of the invention may be formulated with a diblock copolymer of PEG and PLA or PEG and PLGA (see U.S. Pat. No. 8,246,968, herein incorporated by reference in its entirety).

[0534] A polyamine derivative may be used to deliver nucleic acids or to treat and/or prevent a disease or to be included in an implantable or injectable device (U.S. Pub. No. 20100260817 herein incorporated by reference in its entirety). As a non-limiting example, a pharmaceutical composition may include the modified nucleic acids and mmRNA and the polyamine derivative described in U.S. Pub. No. 20100260817 (the contents of which are incorporated herein by reference in its entirety. As a non-limiting example the oncology-related polynucleotides, primary constructs and mmRNA of the present invention may be delivered using a polyaminde polymer such as, but not limited to, a polymer comprising a 1,3-dipolar addition polymer prepared by combining a carbohydrate diazide monomer with a dilkyne unite comprising oligoamines (U.S. Pat. No. 8,236,280; herein incorporated by reference in its entirety).

[0535] In one embodiment, the oncology-related polynucleotides, primary constructs or mmRNA of the present invention may be formulated with at least one polymer and/or derivatives thereof described in International Publication Nos. WO2011115862, WO2012082574 and WO2012068187 and U.S. Pub. No. 20120283427, each of which are herein incorporated by reference in their entireties. In another embodiment, the modified nucleic acid or mmRNA of the present invention may be formulated with a polymer of formula Z as described in WO2011115862, herein incorporated by reference in its entirety. In yet another embodiment, the modified nucleic acid or mmRNA may be formulated with a polymer of formula Z, Z′ or Z″ as described in International Pub. Nos. WO2012082574 or WO2012068187 and U.S. Pub. No. 2012028342, each of which are herein incorporated by reference in their entireties. The polymers formulated with the modified RNA of the present invention may be synthesized by the methods described in International Pub. Nos. WO2012082574 or WO2012068187, each of which are herein incorporated by reference in their entireties.

[0536] The oncology-related polynucleotides, primary constructs or mmRNA of the invention may be formulated with at least one acrylic polymer. Acrylic polymers include but are not limited to, acrylic acid, methacrylic acid, acrylic acid and methacrylic acid copolymers, methyl methacrylate copolymers, ethoxyethyl methacrylates, cyanoethyl methacrylate, amino alkyl methacrylate copolymer, poly(acrylic acid), poly(methacrylic acid), polycyanoacrylates and combinations thereof.

[0537] Formulations of oncology-related polynucleotides, primary constructs or mmRNA of the invention may include at least one amine-containing polymer such as, but not limited to polylysine, polyethylene imine, poly(amidoamine) dendrimers or combinations thereof.

[0538] For example, the modified nucleic acid or mmRNA of the invention may be formulated in a pharmaceutical compound including a poly(alkylene imine), a biodegradable cationic lipopolymer, a biodegradable block copolymer, a biodegradable polymer, or a biodegradable random copolymer, a biodegradable polyester block copolymer, a biodegradable polyester polymer, a biodegradable polyester random copolymer, a linear biodegradable copolymer, PAGA, a biodegradable cross-linked cationic multi-block copolymer or combinations thereof. The biodegradable cationic lipopolymer may be made by methods known in the art and/or described in U.S. Pat. No. 6,696,038, U.S. App. Nos. 20030073619 and 20040142474 each of which is herein incorporated by reference in their entireties. The poly(alkylene imine) may be made using methods known in the art and/or as described in U.S. Pub. No. 20100004315, herein incorporated by reference in its entirety. The biodegradabale polymer, biodegradable block copolymer, the biodegradable random copolymer, biodegradable polyester block copolymer, biodegradable polyester polymer, or biodegradable polyester random copolymer may be made using methods known in the art and/or as described in U.S. Pat. Nos. 6,517,869 and 6,267,987, the contents of which are each incorporated herein by reference in their entirety. The linear biodegradable copolymer may be made using methods known in the art and/or as described in U.S. Pat. No. 6,652,886. The PAGA polymer may be made using methods known in the art and/or as described in U.S. Pat. No. 6,217,912 herein incorporated by reference in its entirety. The PAGA polymer may be copolymerized to form a copolymer or block copolymer with polymers such as but not limited to, poly-L-lysine, polyargine, polyornithine, histones, avidin, protamines, polylactides and poly(lactide-co-glycolides). The biodegradable cross-linked cationic multi-block copolymers may be made my methods known in the art and/or as described in U.S. Pat. No. 8,057,821 or U.S. Pub. No. 2012009145 each of which are herein incorporated by reference in their entireties. For example, the multi-block copolymers may be synthesized using linear polyethyleneimine (LPEI) blocks which have distinct patterns as compared to branched polyethyleneimines. Further, the composition or pharmaceutical composition may be made by the methods known in the art, described herein, or as described in U.S. Pub. No. 20100004315 or U.S. Pat. Nos. 6,267,987 and 6,217,912 each of which are herein incorporated by reference in their entireties.

[0539] The polynucleotides, primary constructs, and mmRNA of the invention may be formulated with at least one degradable polyester which may contain polycationic side chains. Degradeable polyesters include, but are not limited to, poly(serine ester), poly(L-lactide-co-L-lysine), poly(4-hydroxy-L-proline ester), and combinations thereof. In another embodiment, the degradable polyesters may include a PEG conjugation to form a PEGylated polymer.

[0540] The polynucleotides, primary construct, mmRNA of the invention may be formulated with at least one crosslinkable polyester. Crosslinkable polyesters include those known in the art and described in US Pub. No. 20120269761, herein incorporated by reference in its entirety.

[0541] In one embodiment, the polymers described herein may be conjugated to a lipid-terminating PEG. As a non-limiting example, PLGA may be conjugated to a lipid-terminating PEG forming PLGA-DSPE-PEG. As another non-limiting example, PEG conjugates for use with the present invention are described in International Publication No. WO2008103276, herein incorporated by reference in its entirety. The polymers may be conjugated using a ligand conjugate such as, but not limited to, the conjugates described in U.S. Pat. No. 8,273,363, herein incorporated by reference in its entirety.

[0542] In one embodiment, the modified RNA described herein may be conjugated with another compound. Non-limiting examples of conjugates are described in U.S. Pat. Nos. 7,964,578 and 7,833,992, each of which are herein incorporated by reference in their entireties. In another embodiment, modified RNA of the present invention may be conjugated with conjugates of formula 1-122 as described in U.S. Pat. Nos. 7,964,578 and 7,833,992, each of which are herein incorporated by reference in their entireties. The oncology-related polynucleotides, primary constructs and/or mmRNA described herein may be conjugated with a metal such as, but not limited to, gold. (See e.g., Giljohann et al. Journ. Amer. Chem. Soc. 2009 131(6): 2072-2073; herein incorporated by reference in its entirety). In another embodiment, the oncology-related polynucleotides, primary constructs and/or mmRNA described herein may be conjugated and/or encapsulated in gold-nanoparticles. (International Pub. No. WO201216269 and U.S. Pub. No. 20120302940; each of which is herein incorporated by reference in its entirety).

[0543] As described in U.S. Pub. No. 20100004313, herein incorporated by reference in its entirety, a gene delivery composition may include a nucleotide sequence and a poloxamer. For example, the modified nucleic acid and mmRNA of the present invention may be used in a gene delivery composition with the poloxamer described in U.S. Pub. No. 20100004313.

[0544] In one embodiment, the polymer formulation of the present invention may be stabilized by contacting the polymer formulation, which may include a cationic carrier, with a cationic lipopolymer which may be covalently linked to cholesterol and polyethylene glycol groups. The polymer formulation may be contacted with a cationic lipopolymer using the methods described in U.S. Pub. No. 20090042829 herein incorporated by reference in its entirety. The cationic carrier may include, but is not limited to, polyethylenimine, poly(trimethylenimine), poly(tetramethylenimine), polypropylenimine, aminoglycoside-polyamine, dideoxy-diamino-b-cyclodextrin, spermine, spermidine, poly(2-dimethylamino)ethyl methacrylate, poly(lysine), poly(histidine), poly(arginine), cationized gelatin, dendrimers, chitosan, 1,2-Dioleoyl-3-Trimethylammonium-Propane(DOTAP), N-[1-(2,3-dioleoyloxy)propyl]-N,N,N-trimethylammonium chloride (DOTMA), 1-[2-(oleoyloxy)ethyl]-2-oleyl-3-(2-hydroxyethyl)imidazolinium chloride (DOTIM), 2,3-dioleyloxy-N-[2(sperminecarboxamido)ethyl]-N,N-dimethyl-1-propanaminium trifluoroacetate (DOSPA), 3B—[N—(N′,N′-Dimethylaminoethane)-carbamoyl]Cholesterol Hydrochloride (DC-Cholesterol HCl) diheptadecylamidoglycyl spermidine (DOGS), N,N-distearyl-N,N-dimethylammonium bromide (DDAB), N-(1,2-dimyristyloxyprop-3-yl)-N,N-dimethyl-N-hydroxyethyl ammonium bromide (DMRIE), N,N-dioleyl-N,N-dimethylammonium chloride DODAC) and combinations thereof.

[0545] The oncology-related polynucleotides, primary constructs and/or mmRNA of the invention may be formulated in a polyplex of one or more polymers (U.S. Pub. No. 20120237565 and 20120270927; each of which is herein incorporated by reference in its entirety). In one embodiment, the polyplex comprises two or more cationic polymers. The catioinic polymer may comprise a poly(ethylene imine) (PEI) such as linear PEI.

[0546] The oncology-related polynucleotide, primary construct, and mmRNA of the invention can also be formulated as a nanoparticle using a combination of polymers, lipids, and/or other biodegradable agents, such as, but not limited to, calcium phosphate. Components may be combined in a core-shell, hybrid, and/or layer-by-layer architecture, to allow for fine-tuning of the nanoparticle so to delivery of the polynucleotide, primary construct and mmRNA may be enhanced (Wang et al., Nat Mater. 2006 5:791-796; Fuller et al., Biomaterials. 2008 29:1526-1532; DeKoker et al., Adv Drug Deliv Rev. 2011 63:748-761; Endres et al., Biomaterials. 2011 32:7721-7731; Su et al., Mol Pharm. 2011 Jun. 6; 8(3):774-87; herein incorporated by reference in its entirety). As a non-limiting example, the nanoparticle may comprise a plurality of polymers such as, but not limited to hydrophilic-hydrophobic polymers (e.g., PEG-PLGA), hydrophobic polymers (e.g., PEG) and/or hydrophilic polymers (International Pub. No. WO20120225129; herein incorporated by reference in its entirety).

[0547] Biodegradable calcium phosphate nanoparticles in combination with lipids and/or polymers have been shown to deliver polynucleotides, primary constructs and mmRNA in vivo. In one embodiment, a lipid coated calcium phosphate nanoparticle, which may also contain a targeting ligand such as anisamide, may be used to deliver the polynucleotide, primary construct and mmRNA of the present invention. For example, to effectively deliver siRNA in a mouse metastatic lung model a lipid coated calcium phosphate nanoparticle was used (Li et al., J Contr Rel. 2010 142: 416-421; Li et al., J Contr Rel. 2012 158:108-114; Yang et al., Mol Ther. 2012 20:609-615; herein incorporated by reference in its entirety). This delivery system combines both a targeted nanoparticle and a component to enhance the endosomal escape, calcium phosphate, in order to improve delivery of the siRNA.

[0548] In one embodiment, calcium phosphate with a PEG-polyanion block copolymer may be used to delivery polynucleotides, primary constructs and mmRNA (Kazikawa et al., J Contr Rel. 2004 97:345-356; Kazikawa et al., J Contr Rel. 2006 111:368-370; herein incorporated by reference in its entirety).

[0549] In one embodiment, a PEG-charge-conversional polymer (Pitella et al., Biomaterials. 2011 32:3106-3114) may be used to form a nanoparticle to deliver the oncology-related polynucleotides, primary constructs and mmRNA of the present invention. The PEG-charge-conversional polymer may improve upon the PEG-polyanion block copolymers by being cleaved into a polycation at acidic pH, thus enhancing endosomal escape.

[0550] The use of core-shell nanoparticles has additionally focused on a high-throughput approach to synthesize cationic cross-linked nanogel cores and various shells (Siegwart et al., Proc Natl Acad Sci USA. 2011 108:12996-13001). The complexation, delivery, and internalization of the polymeric nanoparticles can be precisely controlled by altering the chemical composition in both the core and shell components of the nanoparticle. For example, the core-shell nanoparticles may efficiently deliver siRNA to mouse hepatocytes after they covalently attach cholesterol to the nanoparticle.

[0551] In one embodiment, a hollow lipid core comprising a middle PLGA layer and an outer neutral lipid layer containg PEG may be used to delivery of the polynucleotide, primary construct and mmRNA of the present invention. As a non-limiting example, in mice bearing a luciferease-expressing tumor, it was determined that the lipid-polymer-lipid hybrid nanoparticle significantly suppressed luciferase expression, as compared to a conventional lipoplex (Shi et al, Angew Chem Int Ed. 2011 50:7027-7031; herein incorporated by reference in its entirety).

[0552] In one embodiment, the lipid nanoparticles may comprise a core of the modified nucleic acid molecules disclosed herein and a polymer shell. The polymer shell may be any of the polymers described herein and are known in the art. In an additional embodiment, the polymer shell may be used to protect the modified nucleic acids in the core.

[0553] Core-shell nanoparticles for use with the modified nucleic acid molecules of the present invention are described and may be formed by the methods described in U.S. Pat. No. 8,313,777 herein incorporated by reference in its entirety.

[0554] In one embodiment, the core-shell nanoparticles may comprise a core of the modified nucleic acid molecules disclosed herein and a polymer shell. The polymer shell may be any of the polymers described herein and are known in the art. In an additional embodiment, the polymer shell may be used to protect the modified nucleic acid molecules in the core. As a non-limiting example, the core-shell nanoparticle may be used to treat an eye disease or disorder (See e.g. US Publication No. 20120321719, herein incorporated by reference in its entirety).

[0555] In one embodiment, the polymer used with the formulations described herein may be a modified polymer (such as, but not limited to, a modified polyacetal) as described in International Publication No. WO2011120053, herein incorporated by reference in its entirety.

### Peptides and Proteins

[0556] The oncology-related polynucleotide, primary construct, and mmRNA of the invention can be formulated with peptides and/or proteins in order to increase transfection of cells by the oncology-related polynucleotide, primary construct, or mmRNA. In one embodiment, peptides such as, but not limited to, cell penetrating peptides and proteins and peptides that enable intracellular delivery may be used to deliver pharmaceutical formulations. A non-limiting example of a cell penetrating peptide which may be used with the pharmaceutical formulations of the present invention includes a cell-penetrating peptide sequence attached to polycations that facilitates delivery to the intracellular space, e.g., HIV-derived TAT peptide, penetratins, transportans, or hCT derived cell-penetrating peptides (see, e.g., Caron et al., Mol. Ther. 3(3):310-8 (2001); Langel, Cell-Penetrating Peptides: Processes and Applications (CRC Press, Boca Raton FL, 2002); El-Andaloussi et al., Curr. Pharm. Des. 11(28):3597-611 (2003); and Deshayes et al., Cell. Mol. Life Sci. 62(16):1839-49 (2005), all of which are incorporated herein by reference in their entirety). The compositions can also be formulated to include a cell penetrating agent, e.g., liposomes, which enhance delivery of the compositions to the intracellular space. Polynucleotides, primary constructs, and mmRNA of the invention may be complexed to peptides and/or proteins such as, but not limited to, peptides and/or proteins from Aileron Therapeutics (Cambridge, MA) and Permeon Biologics (Cambridge, MA) in order to enable intracellular delivery (Cronican et al., ACS Chem. Biol. 2010 5:747-752; McNaughton et al., Proc. Natl. Acad. Sci. USA 2009 106:6111-6116; Sawyer, Chem Biol Drug Des. 2009 73:3-6; Verdine and Hilinski, Methods Enzymol. 2012; 503:3-33; all of which are herein incorporated by reference in its entirety).

[0557] In one embodiment, the cell-penetrating polypeptide may comprise a first domain and a second domain. The first domain may comprise a supercharged polypeptide. The second domain may comprise a protein-binding partner. As used herein, “protein-binding partner” includes, but are not limited to, antibodies and functional fragments thereof, scaffold proteins, or peptides. The cell-penetrating polypeptide may further comprise an intracellular binding partner for the protein-binding partner. The cell-penetrating polypeptide may be capable of being secreted from a cell where the oncology-related polynucleotide, primary construct, or mmRNA may be introduced.

[0558] Formulations of the including peptides or proteins may be used to increase cell transfection by the oncology-related polynucleotide, primary construct, or mmRNA, alter the biodistribution of the oncology-related polynucleotide, primary construct, or mmRNA (e.g., by targeting specific tissues or cell types), and/or increase the translation of encoded protein. (See e.g., International Pub. No. WO2012110636; herein incorporated by reference in its entirety).

### Cells

[0559] The oncology-related polynucleotide, primary construct, and mmRNA of the invention can be transfected ex vivo into cells, which are subsequently transplanted into a subject. As non-limiting examples, the pharmaceutical compositions may include red blood cells to deliver modified RNA to liver and myeloid cells, virosomes to deliver modified RNA in virus-like particles (VLPs), and electroporated cells such as, but not limited to, from MAXCYTE® (Gaithersburg, MD) and from ERYTECH® (Lyon, France) to deliver modified RNA. Examples of use of red blood cells, viral particles and electroporated cells to deliver payloads other than mmRNA have been documented (Godfrin et al., Expert Opin Biol Ther. 2012 12:127-133; Fang et al., Expert Opin Biol Ther. 2012 12:385-389; Hu et al., Proc Natl Acad Sci USA. 2011 108:10980-10985; Lund et al., Pharm Res. 2010 27:400-420; Huckriede et al., J Liposome Res. 2007; 17:39-47; Cusi, Hum Vaccin. 2006 2:1-7; de Jonge et al., Gene Ther. 2006 13:400-411; all of which are herein incorporated by reference in its entirety).

[0560] The oncology-related polynucleotides, primary constructs and mmRNA may be delivered in synthetic VLPs synthesized by the methods described in International Pub No. WO2011085231 and US Pub No. 20110171248, each of which are herein incorporated by reference in their entireties.

[0561] Cell-based formulations of the oncology-related polynucleotide, primary construct, and mmRNA of the invention may be used to ensure cell transfection (e.g., in the cellular carrier), alter the biodistribution of the oncology-related polynucleotide, primary construct, or mmRNA (e.g., by targeting the cell carrier to specific tissues or cell types), and/or increase the translation of encoded protein.

[0562] A variety of methods are known in the art and suitable for introduction of nucleic acid into a cell, including viral and non-viral mediated techniques. Examples of typical non-viral mediated techniques include, but are not limited to, electroporation, calcium phosphate mediated transfer, nucleofection, sonoporation, heat shock, magnetofection, liposome mediated transfer, microinjection, microprojectile mediated transfer (nanoparticles), cationic polymer mediated transfer (DEAE-dextran, polyethylenimine, polyethylene glycol (PEG) and the like) or cell fusion.

[0563] The technique of sonoporation, or cellular sonication, is the use of sound (e.g., ultrasonic frequencies) for modifying the permeability of the cell plasma membrane. Sonoporation methods are known to those in the art and are used to deliver nucleic acids in vivo (Yoon and Park, Expert Opin Drug Deliv. 2010 7:321-330; Postema and Gilja, Curr Pharm Biotechnol. 2007 8:355-361; Newman and Bettinger, Gene Ther. 2007 14:465-475; all herein incorporated by reference in their entirety). Sonoporation methods are known in the art and are also taught for example as it relates to bacteria in US Patent Publication 20100196983 and as it relates to other cell types in, for example, US Patent Publication 20100009424, each of which are incorporated herein by reference in their entirety.

[0564] Electroporation techniques are also well known in the art and are used to deliver nucleic acids in vivo and clinically (Andre et al., Curr Gene Ther. 2010 10:267-280; Chiarella et al., Curr Gene Ther. 2010 10:281-286; Hojman, Curr Gene Ther. 2010 10:128-138; all herein incorporated by reference in their entirety). In one embodiment, polynucleotides, primary constructs or mmRNA may be delivered by electroporation as described in Example 8.

### Hyaluronidase

[0565] The intramuscular or subcutaneous localized injection of polynucleotide, primary construct, or mmRNA of the invention can include hyaluronidase, which catalyzes the hydrolysis of hyaluronan. By catalyzing the hydrolysis of hyaluronan, a constituent of the interstitial barrier, hyaluronidase lowers the viscosity of hyaluronan, thereby increasing tissue permeability (Frost, Expert Opin. Drug Deliv. (2007) 4:427-440; herein incorporated by reference in its entirety). It is useful to speed their dispersion and systemic distribution of encoded proteins produced by transfected cells. Alternatively, the hyaluronidase can be used to increase the number of cells exposed to a oncology-related polynucleotide, primary construct, or mmRNA of the invention administered intramuscularly or subcutaneously.

### Nanoparticle Mimics

[0566] The oncology-related polynucleotide, primary construct or mmRNA of the invention may be encapsulated within and/or absorbed to a nanoparticle mimic. A nanoparticle mimic can mimic the delivery function organisms or particles such as, but not limited to, pathogens, viruses, bacteria, fungus, parasites, prions and cells. As a non-limiting example the oncology-related polynucleotide, primary construct or mmRNA of the invention may be encapsulated in a non-viron particle which can mimic the delivery function of a virus (see International Pub. No. WO2012006376 herein incorporated by reference in its entirety).

### Nanotubes

[0567] The oncology-related polynucleotides, primary constructs or mmRNA of the invention can be attached or otherwise bound to at least one nanotube such as, but not limited to, rosette nanotubes, rosette nanotubes having twin bases with a linker, carbon nanotubes and/or single-walled carbon nanotubes, The oncology-related polynucleotides, primary constructs or mmRNA may be bound to the nanotubes through forces such as, but not limited to, steric, ionic, covalent and/or other forces.

[0568] In one embodiment, the nanotube can release one or more polynucleotides, primary constructs or mmRNA into cells. The size and/or the surface structure of at least one nanotube may be altered so as to govern the interaction of the nanotubes within the body and/or to attach or bind to the oncology-related polynucleotides, primary constructs or mmRNA disclosed herein. In one embodiment, the building block and/or the functional groups attached to the building block of the at least one nanotube may be altered to adjust the dimensions and/or properties of the nanotube. As a non-limiting example, the length of the nanotubes may be altered to hinder the nanotubes from passing through the holes in the walls of normal blood vessels but still small enough to pass through the larger holes in the blood vessels of tumor tissue.

[0569] In one embodiment, at least one nanotube may also be coated with delivery enhancing compounds including polymers, such as, but not limited to, polyethylene glycol. In another embodiment, at least one nanotube and/or the oncology-related polynucleotides, primary constructs or mmRNA may be mixed with pharmaceutically acceptable excipients and/or delivery vehicles.

[0570] In one embodiment, the oncology-related polynucleotides, primary constructs or mmRNA are attached and/or otherwise bound to at least one rosette nanotube. The rosette nanotubes may be formed by a process known in the art and/or by the process described in International Publication No. WO2012094304, herein incorporated by reference in its entirety. At least one polynucleotide, primary construct and/or mmRNA may be attached and/or otherwise bound to at least one rosette nanotube by a process as described in International Publication No. WO2012094304, herein incorporated by reference in its entirety, where rosette nanotubes or modules forming rosette nanotubes are mixed in aqueous media with at least one polynucleotide, primary construct and/or mmRNA under conditions which may cause at least one polynucleotide, primary construct or mmRNA to attach or otherwise bind to the rosette nanotubes.

[0571] In one embodiment, the oncology-related polynucleotides, primary constructs or mmRNA may be attached to and/or otherwise bound to at least one carbon nanotube. As a non-limiting example, the oncology-related polynucleotides, primary constructs or mmRNA may be bound to a linking agent and the linked agent may be bound to the carbon nanotube (See e.g., U.S. Pat. No. 8,246,995; herein incorporated by reference in its entirety). The carbon nanotube may be a single-walled nanotube (See e.g., U.S. Pat. No. 8,246,995; herein incorporated by reference in its entirety).

### Conjugates

[0572] The polynucleotides, primary constructs, and mmRNA of the invention include conjugates, such as a oncology-related polynucleotide, primary construct, or mmRNA covalently linked to a carrier or targeting group, or including two encoding regions that together produce a fusion protein (e.g., bearing a targeting group and therapeutic protein or peptide).

[0573] The conjugates of the invention include a naturally occurring substance, such as a protein (e.g., human serum albumin (HSA), low-density lipoprotein (LDL), high-density lipoprotein (HDL), or globulin); an carbohydrate (e.g., a dextran, pullulan, chitin, chitosan, inulin, cyclodextrin or hyaluronic acid); or a lipid. The ligand may also be a recombinant or synthetic molecule, such as a synthetic polymer, e.g., a synthetic polyamino acid, an oligonucleotide (e.g. an aptamer). Examples of polyamino acids include polyamino acid is a polylysine (PLL), poly L-aspartic acid, poly L-glutamic acid, styrene-maleic acid anhydride copolymer, poly(L-lactide-co-glycolied) copolymer, divinyl ether-maleic anhydride copolymer, N-(2-hydroxypropyl)methacrylamide copolymer (HMPA), polyethylene glycol (PEG), polyvinyl alcohol (PVA), polyurethane, poly(2-ethylacryllic acid), N-isopropylacrylamide polymers, or polyphosphazine. Example of polyamines include: polyethylenimine, polylysine (PLL), spermine, spermidine, polyamine, pseudopeptide-polyamine, peptidomimetic polyamine, dendrimer polyamine, arginine, amidine, protamine, cationic lipid, cationic porphyrin, quaternary salt of a polyamine, or an alpha helical peptide.

[0574] Representative U.S. patents that teach the preparation of polynucleotide conjugates, particularly to RNA, include, but are not limited to, U.S. Pat. Nos. 4,828,979; 4,948,882; 5,218,105; 5,525,465; 5,541,313; 5,545,730; 5,552,538; 5,578,717, 5,580,731; 5,591,584; 5,109,124; 5,118,802; 5,138,045; 5,414,077; 5,486,603; 5,512,439; 5,578,718; 5,608,046; 4,587,044; 4,605,735; 4,667,025; 4,762,779; 4,789,737; 4,824,941; 4,835,263; 4,876,335; 4,904,582; 4,958,013; 5,082,830; 5,112,963; 5,214,136; 5,082,830; 5,112,963; 5,214,136; 5,245,022; 5,254,469; 5,258,506; 5,262,536; 5,272,250; 5,292,873; 5,317,098; 5,371,241, 5,391,723; 5,416,203, 5,451,463; 5,510,475; 5,512,667; 5,514,785; 5,565,552; 5,567,810; 5,574,142; 5,585,481; 5,587,371; 5,595,726; 5,597,696; 5,599,923; 5,599,928 and 5,688,941; 6,294,664; 6,320,017; 6,576,752; 6,783,931; 6,900,297; 7,037,646; each of which is herein incorporated by reference in their entireties.

[0575] In one embodiment, the conjugate of the present invention may function as a carrier for the modified nucleic acids and mmRNA of the present invention. The conjugate may comprise a cationic polymer such as, but not limited to, polyamine, polylysine, polyalkylenimine, and polyethylenimine which may be grafted to with poly(ethylene glycol). As a non-limiting example, the conjugate may be similar to the polymeric conjugate and the method of synthesizing the polymeric conjugate described in U.S. Pat. No. 6,586,524 herein incorporated by reference in its entirety.

[0576] The conjugates can also include targeting groups, e.g., a cell or tissue targeting agent, e.g., a lectin, glycoprotein, lipid or protein, e.g., an antibody, that binds to a specified cell type such as a kidney cell. A targeting group can be a thyrotropin, melanotropin, lectin, glycoprotein, surfactant protein A, Mucin carbohydrate, multivalent lactose, multivalent galactose, N-acetyl-galactosamine, N-acetyl-gulucosamine multivalent mannose, multivalent fucose, glycosylated polyaminoacids, multivalent galactose, transferrin, bisphosphonate, polyglutamate, polyaspartate, a lipid, cholesterol, a steroid, bile acid, folate, vitamin B12, biotin, an RGD peptide, an RGD peptide mimetic or an aptamer.

[0577] Targeting groups can be proteins, e.g., glycoproteins, or peptides, e.g., molecules having a specific affinity for a co-ligand, or antibodies e.g., an antibody, that binds to a specified cell type such as a cancer cell, endothelial cell, or bone cell. Targeting groups may also include hormones and hormone receptors. They can also include non-peptidic species, such as lipids, lectins, carbohydrates, vitamins, cofactors, multivalent lactose, multivalent galactose, N-acetyl-galactosamine, N-acetyl-gulucosamine multivalent mannose, multivalent fucose, or aptamers. The ligand can be, for example, a lipopolysaccharide, or an activator of p38 MAP kinase.

[0578] The targeting group can be any ligand that is capable of targeting a specific receptor. Examples include, without limitation, folate, GalNAc, galactose, mannose, mannose-6P, apatamers, integrin receptor ligands, chemokine receptor ligands, transferrin, biotin, serotonin receptor ligands, PSMA, endothelin, GCPII, somatostatin, LDL, and HDL ligands. In particular embodiments, the targeting group is an aptamer. The aptamer can be unmodified or have any combination of modifications disclosed herein.

[0579] In one embodiment, pharmaceutical compositions of the present invention may include chemical modifications such as, but not limited to, modifications similar to locked nucleic acids.

[0580] Representative U.S. Patents that teach the preparation of locked nucleic acid (LNA) such as those from Santaris, include, but are not limited to, the following: U.S. Pat. Nos. 6,268,490; 6,670,461; 6,794,499; 6,998,484; 7,053,207; 7,084,125; and 7,399,845, each of which is herein incorporated by reference in its entirety.

[0581] Representative U.S. patents that teach the preparation of PNA compounds include, but are not limited to, U.S. Pat. Nos. 5,539,082; 5,714,331; and 5,719,262, each of which is herein incorporated by reference. Further teaching of PNA compounds can be found, for example, in Nielsen et al., Science, 1991, 254, 1497-1500.

[0582] Some embodiments featured in the invention include polynucleotides, primary constructs or mmRNA with phosphorothioate backbones and oligonucleosides with other modified backbones, and in particular —CH₂—NH—CH₂—, —CH₂—N(CH₃)—O—CH₂—[known as a methylene (methylimino) or MMI backbone], —CH₂—O—N(CH₃)—CH₂—, —CH₂—N(CH₃)—N(CH₃)—CH₂— and —N(CH₃)—CH₂—CH₂—[wherein the native phosphodiester backbone is represented as —O—P(O)₂—O—CH₂—] of the above-referenced U.S. Pat. No. 5,489,677, and the amide backbones of the above-referenced U.S. Pat. No. 5,602,240. In some embodiments, the polynucleotides featured herein have morpholino backbone structures of the above-referenced U.S. Pat. No. 5,034,506.

[0583] Modifications at the 2′ position may also aid in delivery. Preferably, modifications at the 2′ position are not located in a polypeptide-coding sequence, i.e., not in a translatable region. Modifications at the 2′ position may be located in a 5′UTR, a 3′UTR and/or a tailing region. Modifications at the 2′ position can include one of the following at the 2′ position: H (i.e., 2′-deoxy); F; O—, S—, or N-alkyl; O—, S—, or N-alkenyl; O—, S- or N-alkynyl; or O-alkyl-O-alkyl, wherein the alkyl, alkenyl and alkynyl may be substituted or unsubstituted C₁ to C₁₀ alkyl or C₂ to C₁₀ alkenyl and alkynyl. Exemplary suitable modifications include O[(CH₂)ₙO]ₘCH₃, O(CH₂)·ₙOCH₃, O(CH₂)ₙNH₂, O(CH₂) ₙCH₃, O(CH₂)ONH₂, and O(CH₂)ₙON[(CH₂)ₙCH₃)]₂, where n and m are from 1 to about 10. In other embodiments, the oncology-related polynucleotides, primary constructs or mmRNA include one of the following at the 2′ position: C₁ to C₁₀ lower alkyl, substituted lower alkyl, alkaryl, aralkyl, O-alkaryl or O-aralkyl, SH, SCH₃, OCN, Cl, Br, CN, CF₃, OCF₃, SOCH₃, SO₂CH₃, ONO₂, NO₂, N₃, NH₂, heterocycloalkyl, heterocycloalkaryl, aminoalkylamino, polyalkylamino, substituted silyl, an RNA cleaving group, a reporter group, an intercalator, a group for improving the pharmacokinetic properties, or a group for improving the pharmacodynamic properties, and other substituents having similar properties. In some embodiments, the modification includes a 2′-methoxyethoxy (2′-O—CH₂CH₂OCH₃, also known as 2′-O-(2-methoxyethyl) or 2′-MOE) (Martin et al., Helv. Chim. Acta, 1995, 78:486-504) i.e., an alkoxy-alkoxy group. Another exemplary modification is 2′-dimethylaminooxyethoxy, i.e., a O(CH₂)₂ON(CH₃)₂ group, also known as 2′-DMAOE, as described in examples herein below, and 2′-dimethylaminoethoxyethoxy (also known in the art as 2′-O-dimethylaminoethoxyethyl or 2′-DMAEOE), i.e., 2′-O—CH₂——O—CH₂—N(CH₂)₂, also described in examples herein below. Other modifications include 2′-methoxy (2′-OCH₃), 2′-aminopropoxy (2′-OCH₂CH₂CH₂NH₂) and 2′-fluoro (2′-F). Similar modifications may also be made at other positions, particularly the 3′ position of the sugar on the 3′ terminal nucleotide or in 2′-5′ linked dsRNAs and the 5′ position of 5′ terminal nucleotide. Polynucleotides of the invention may also have sugar mimetics such as cyclobutyl moieties in place of the pentofuranosyl sugar. Representative U.S. patents that teach the preparation of such modified sugar structures include, but are not limited to, U.S. Pat. Nos. 4,981,957; 5,118,800; 5,319,080; 5,359,044; 5,393,878; 5,446,137; 5,466,786; 5,514,785; 5,519,134; 5,567,811; 5,576,427; 5,591,722; 5,597,909; 5,610,300; 5,627,053; 5,639,873; 5,646,265; 5,658,873; 5,670,633; and 5,700,920 and each of which is herein incorporated by reference.

[0584] In still other embodiments, the oncology-related polynucleotide, primary construct, or mmRNA is covalently conjugated to a cell penetrating polypeptide. The cell-penetrating peptide may also include a signal sequence. The conjugates of the invention can be designed to have increased stability; increased cell transfection; and/or altered the biodistribution (e.g., targeted to specific tissues or cell types).

[0585] In one embodiment, the polynucleotides, primary constructs or mmRNA may be conjugated to an agent to enhance delivery. As a non-limiting example, the agent may be a monomer or polymer such as a targeting monomer or a polymer having targeting blocks as described in International Publication No. WO2011062965, herein incorporated by reference in its entirety. In another non-limiting example, the agent may be a transport agent covalently coupled to the polynucleotides, primary constructs or mmRNA of the present invention (See e.g., U.S. Pat. Nos. 6,835.393 and 7,374,778, each of which is herein incorporated by reference in its entirety). In yet another non-limiting example, the agent may be a membrane barrier transport enhancing agent such as those described in U.S. Pat. Nos. 7,737,108 and 8,003,129, each of which is herein incorporated by reference in its entirety.

[0586] In another embodiment, polynucleotides, primary constructs or mmRNA may be conjugated to SMARTT POLYMER TECHNOLOGY® (PHASERX®, Inc. Seattle, WA).

### Self-Assembled Nanoparticles

### Nucleic Acid Self-Assembled Nanoparticles

[0587] Self-assembled nanoparticles have a well-defined size which may be precisely controlled as the nucleic acid strands may be easily reprogrammable. For example, the optimal particle size for a cancer-targeting nanodelivery carrier is 20-100 nm as a diameter greater than 20 nm avoids renal clearance and enhances delivery to certain tumors through enhanced permeability and retention effect. Using self-assembled nucleic acid nanoparticles a single uniform population in size and shape having a precisely controlled spatial orientation and density of cancer-targeting ligands for enhanced delivery. As a non-limiting example, oligonucleotide nanoparticles were prepared using programmable self-assembly of short DNA fragments and therapeutic siRNAs. These nanoparticles are molecularly identical with controllable particle size and target ligand location and density. The DNA fragments and siRNAs self-assembled into a one-step reaction to generate DNA/siRNA tetrahedral nanoparticles for targeted in vivo delivery. (Lee et al., Nature Nanotechnology 2012 7:389-393; herein incorporated by reference in its entirety).

[0588] In one embodiment, the oncology-related polynucleotides, primary constructs and/or mmRNA disclosed herein may be formulated as self-assembled nanoparticles. As a non-limiting example, nucleic acids may be used to make nanoparticles which may be used in a delivery system for the oncology-related polynucleotides, primary constructs and/or mmRNA of the present invention (See e.g., International Pub. No. WO2012125987; herein incorporated by reference in its entirety).

[0589] In one embodiment, the nucleic acid self-assembled nanoparticles may comprise a core of the oncology-related polynucleotides, primary constructs or mmRNA disclosed herein and a polymer shell. The polymer shell may be any of the polymers described herein and are known in the art. In an additional embodiment, the polymer shell may be used to protect the polynucleotides, primary constructs and mmRNA in the core.

### Polymer-Based Self-Assembled Nanoparticles

[0590] Polymers may be used to form sheets which self-assembled into nanoparticles. These nanoparticles may be used to deliver the oncology-related polynucleotides, primary constructs and mmRNA of the present invention. In one embodiment, these self-assembled nanoparticles may be microsponges formed of long polymers of RNA hairpins which form into crystalline ‘pleated’ sheets before self-assembling into microsponges. These microsponges are densely-packed sponge like microparticles which may function as an efficient carrier and may be able to deliver cargo to a cell. The microsponges may be from 1 um to 300 nm in diameter. The microsponges may be complexed with other agents known in the art to form larger microsponges. As a non-limiting example, the microsponge may be complexed with an agent to form an outer layer to promote cellular uptake such as polycation polyethyleneime (PEI). This complex can form a 250-nm diameter particle that can remain stable at high temperatures (150° C.) (Grabow and Jaegar, Nature Materials 2012, 11:269-269; herein incorporated by reference in its entirety). Additionally these microsponges may be able to exhibit an extraordinary degree of protection from degradation by ribonucleases.

[0591] In another embodiment, the polymer-based self-assembled nanoparticles such as, but not limited to, microsponges, may be fully programmable nanoparticles. The geometry, size and stoichiometry of the nanoparticle may be precisely controlled to create the optimal nanoparticle for delivery of cargo such as, but not limited to, polynucleotides, primary constructs and/or mmRNA.

[0592] In one embodiment, the polymer based nanoparticles may comprise a core of the oncology-related polynucleotides, primary constructs and/or mmRNA disclosed herein and a polymer shell. The polymer shell may be any of the polymers described herein and are known in the art. In an additional embodiment, the polymer shell may be used to protect the polynucleotides, primary construct and/or mmRNA in the core.

[0593] In yet another embodiment, the polymer based nanoparticle may comprise a non-nucleic acid polymer comprising a plurality of heterogenous monomers such as those described in International Publication No. WO2013009736, herein incorporated by reference in its entirety.

### Inorganic Nanoparticles

[0594] The oncology-related polynucleotides, primary constructs and/or mmRNAs of the present invention may be formulated in inorganic nanoparticles (U.S. Pat. No. 8,257,745, herein incorporated by reference in its entirety). The inorganic nanoparticles may include, but are not limited to, clay substances that are water swellable. As a non-limiting example, the inorganic nanoparticle may include synthetic smectite clays which are made from simple silicates (See e.g., U.S. Pat. Nos. 5,585,108 and 8,257,745 each of which are herein incorporated by reference in their entirety).

[0595] In one embodiment, the inorganic nanoparticles may comprise a core of the modified nucleic acids disclosed herein and a polymer shell. The polymer shell may be any of the polymers described herein and are known in the art. In an additional embodiment, the polymer shell may be used to protect the modified nucleic acids in the core.

### Semi-Conductive and Metallic Nanoparticles

[0596] The oncology-related polynucleotides, primary constructs and/or mmRNAs of the present invention may be formulated in water-dispersible nanoparticle comprising a semiconductive or metallic material (U.S. Pub. No. 20120228565; herein incorporated by reference in its entirety) or formed in a magnetic nanoparticle (U.S. Pub. No. 20120265001 and 20120283503; each of which is herein incorporated by reference in its entirety). The water-dispersible nanoparticles may be hydrophobic nanoparticles or hydrophilic nanoparticles.

[0597] In one embodiment, the semi-conductive and/or metallic nanoparticles may comprise a core of the oncology-related polynucleotides, primary constructs and/or mmRNA disclosed herein and a polymer shell. The polymer shell may be any of the polymers described herein and are known in the art. In an additional embodiment, the polymer shell may be used to protect the oncology-related polynucleotides, primary constructs and/or mmRNA in the core.

### Gels and Hydrogels

[0598] In one embodiment, the oncology-related polynucleotides, primary constructs and/or mmRNA disclosed herein may be encapsulated into any hydrogel known in the art which may form a gel when injected into a subject. Hydrogels are a network of polymer chains that are hydrophilic, and are sometimes found as a colloidal gel in which water is the dispersion medium. Hydrogels are highly absorbent (they can contain over 99% water) natural or synthetic polymers. Hydrogels also possess a degree of flexibility very similar to natural tissue, due to their significant water content. The hydrogel described herein may used to encapsulate lipid nanoparticles which are biocompatible, biodegradable and/or porous.

[0599] As a non-limiting example, the hydrogel may be an aptamer-functionalized hydrogel. The aptamer-functionalized hydrogel may be programmed to release one or more polynucleotides, primary constructs and/or mmRNA using nucleic acid hybridization. (Battig et al., J. Am. Chem. Society. 2012 134:12410-12413; herein incorporated by reference in its entirety).

[0600] As another non-limiting example, the hydrogel may be a shaped as an inverted opal.

The opal hydrogels exhibit higher swelling ratios and the swelling kinetics is an order of magnitude faster as well. Methods of producing opal hydrogels and description of opal hydrogels are described in International Pub. No. WO2012148684, herein incorporated by reference in its entirety.

[0601] In yet another non-limiting example, the hydrogel may be an antibacterial hydrogel. The antibacterial hydrogel may comprise a pharmaceutical acceptable salt or organic material such as, but not limited to pharmaceutical grade and/or medical grade silver salt and aloe vera gel or extract. (International Pub. No. WO2012151438, herein incorporated by reference in its entirety).

[0602] In one embodiment, the modified mRNA may be encapsulated in a lipid nanoparticle and then the lipid nanoparticle may be encapsulated into a hydrogel.

[0603] In one embodiment, the oncology-related polynucleotides, primary constructs and/or mmRNA disclosed herein may be encapsulated into any gel known in the art. As a non-limiting example the gel may be a fluorouracil injectable gel or a fluorouracil injectable gel containing a chemical compound and/or drug known in the art. As another example, the oncology-related polynucleotides, primary constructs and/or mmRNA may be encapsulated in a fluorouracil gel containing epinephrine (See e.g., Smith et al. Cancer Chemotherapty and Pharmacology, 1999 44(4):267-274; herein incorporated by reference in its entirety).

[0604] In one embodiment, the oncology-related polynucleotides, primary constructs and/or mmRNA disclosed herein may be encapsulated into a fibrin gel, fibrin hydrogel or fibrin glue. In another embodiment, the oncology-related polynucleotides, primary constructs and/or mmRNA may be formulated in a lipid nanoparticle or a rapidly eliminated lipid nanoparticle prior to being encapsulated into a fibrin gel, fibrin hydrogel or a fibrin glue. In yet another embodiment, the oncology-related polynucleotides, primary constructs and/or mmRNA may be formulated as a lipoplex prior to being encapsulated into a fibrin gel, hydrogel or a fibrin glue. Fibrin gels, hydrogels and glues comprise two components, a fibrinogen solution and a thrombin solution which is rich in calcium (See e.g., Spicer and Mikos, Journal of Controlled Release 2010. 148: 49-55; Kidd et al. Journal of Controlled Release 2012. 157:80-85; each of which is herein incorporated by reference in its entirety). The concentration of the components of the fibrin gel, hydrogel and/or glue can be altered to change the characteristics, the network mesh size, and/or the degradation characteristics of the gel, hydrogel and/or glue such as, but not limited to changing the release characteristics of the fibrin gel, hydrogel and/or glue. (See e.g., Spicer and Mikos, Journal of Controlled Release 2010. 148: 49-55; Kidd et al. Journal of Controlled Release 2012. 157:80-85; Catelas et al. Tissue Engineering 2008. 14:119-128; each of which is herein incorporated by reference in its entirety). This feature may be advantageous when used to deliver the modified mRNA disclosed herein. (See e.g., Kidd et al. Journal of Controlled Release 2012. 157:80-85; Catelas et al. Tissue Engineering 2008. 14:119-128; each of which is herein incorporated by reference in its entirety).

### Cations and Anions

[0605] Formulations of polynucleotides, primary constructs and/or mmRNA disclosed herein may include cations or anions. In one embodiment, the formulations include metal cations such as, but not limited to, Zn2+, Ca2+, Cu2+, Mg+ and combinations thereof. As a non-limiting example, formulations may include polymers and a polynucleotides, primary constructs and/or mmRNA complexed with a metal cation (See e.g., U.S. Pat. Nos. 6,265,389 and 6,555,525, each of which is herein incorporated by reference in its entirety).

### Molded Nanoparticles and Microparticles

[0606] The oncology-related polynucleotides, primary constructs and/or mmRNA disclosed herein may be formulated in nanoparticles and/or microparticles. These nanoparticles and/or microparticles may be molded into any size shape and chemistry. As an example, the nanoparticles and/or microparticles may be made using the PRINT® technology by LIQUIDA TECHNOLOGIES® (Morrisville, NC) (See e.g., International Pub. No. WO2007024323; herein incorporated by reference in its entirety).

[0607] In one embodiment, the molded nanoparticles may comprise a core of the oncology-related polynucleotides, primary constructs and/or mmRNA disclosed herein and a polymer shell. The polymer shell may be any of the polymers described herein and are known in the art. In an additional embodiment, the polymer shell may be used to protect the polynucleotides, primary construct and/or mmRNA in the core.

### NanoJackets and NanoLiposomes

[0608] The oncology-related polynucleotides, primary constructs and/or mmRNA disclosed herein may be formulated in NanoJackets and NanoLiposomes by Keystone Nano (State College, PA). NanoJackets are made of compounds that are naturally found in the body including calcium, phosphate and may also include a small amount of silicates. Nanojackets may range in size from 5 to 50 nm and may be used to deliver hydrophilic and hydrophobic compounds such as, but not limited to, polynucleotides, primary constructs and/or mmRNA.

[0609] NanoLiposomes are made of lipids such as, but not limited to, lipids which naturally occur in the body. NanoLiposomes may range in size from 60-80 nm and may be used to deliver hydrophilic and hydrophobic compounds such as, but not limited to, polynucleotides, primary constructs and/or mmRNA. In one aspect, the oncology-related polynucleotides, primary constructs and/or mmRNA disclosed herein are formulated in a NanoLiposome such as, but not limited to, Ceramide NanoLiposomes.

### Excipients

[0610] Pharmaceutical formulations may additionally comprise a pharmaceutically acceptable excipient, which, as used herein, includes any and all solvents, dispersion media, diluents, or other liquid vehicles, dispersion or suspension aids, surface active agents, isotonic agents, thickening or emulsifying agents, preservatives, solid binders, lubricants and the like, as suited to the particular dosage form desired. Remington's The Science and Practice of Pharmacy, 21^{st} Edition, A. R. Gennaro (Lippincott, Williams & Wilkins, Baltimore, MD, 2006; incorporated herein by reference in its entirety) discloses various excipients used in formulating pharmaceutical compositions and known techniques for the preparation thereof. Except insofar as any conventional excipient medium is incompatible with a substance or its derivatives, such as by producing any undesirable biological effect or otherwise interacting in a deleterious manner with any other component(s) of the pharmaceutical composition, its use is contemplated to be within the scope of this invention.

[0611] In some embodiments, a pharmaceutically acceptable excipient is at least 95%, at least 96%, at least 97%, at least 98%, at least 99%, or 100% pure. In some embodiments, an excipient is approved for use in humans and for veterinary use. In some embodiments, an excipient is approved by United States Food and Drug Administration. In some embodiments, an excipient is pharmaceutical grade. In some embodiments, an excipient meets the standards of the United States Pharmacopoeia (USP), the European Pharmacopoeia (EP), the British Pharmacopoeia, and/or the International Pharmacopoeia.

[0612] Pharmaceutically acceptable excipients used in the manufacture of pharmaceutical compositions include, but are not limited to, inert diluents, dispersing and/or granulating agents, surface active agents and/or emulsifiers, disintegrating agents, binding agents, preservatives, buffering agents, lubricating agents, and/or oils. Such excipients may optionally be included in pharmaceutical compositions.

[0613] Exemplary diluents include, but are not limited to, calcium carbonate, sodium carbonate, calcium phosphate, dicalcium phosphate, calcium sulfate, calcium hydrogen phosphate, sodium phosphate lactose, sucrose, cellulose, microcrystalline cellulose, kaolin, mannitol, sorbitol, inositol, sodium chloride, dry starch, cornstarch, powdered sugar, etc., and/or combinations thereof.

[0614] Exemplary granulating and/or dispersing agents include, but are not limited to, potato starch, corn starch, tapioca starch, sodium starch glycolate, clays, alginic acid, guar gum, citrus pulp, agar, bentonite, cellulose and wood products, natural sponge, cation-exchange resins, calcium carbonate, silicates, sodium carbonate, cross-linked poly(vinyl-pyrrolidone) (crospovidone), sodium carboxymethyl starch (sodium starch glycolate), carboxymethyl cellulose, cross-linked sodium carboxymethyl cellulose (croscarmellose), methylcellulose, pregelatinized starch (starch 1500), microcrystalline starch, water insoluble starch, calcium carboxymethyl cellulose, magnesium aluminum silicate (VEEGUM®), sodium lauryl sulfate, quaternary ammonium compounds, etc., and/or combinations thereof.

[0615] Exemplary surface active agents and/or emulsifiers include, but are not limited to, natural emulsifiers (e.g. acacia, agar, alginic acid, sodium alginate, tragacanth, chondrux, cholesterol, xanthan, pectin, gelatin, egg yolk, casein, wool fat, cholesterol, wax, and lecithin), colloidal clays (e.g. bentonite [aluminum silicate] and VEEGUM® [magnesium aluminum silicate]), long chain amino acid derivatives, high molecular weight alcohols (e.g. stearyl alcohol, cetyl alcohol, oleyl alcohol, triacetin monostearate, ethylene glycol distearate, glyceryl monostearate, and propylene glycol monostearate, polyvinyl alcohol), carbomers (e.g. carboxy polymethylene, polyacrylic acid, acrylic acid polymer, and carboxyvinyl polymer), carrageenan, cellulosic derivatives (e.g. carboxymethylcellulose sodium, powdered cellulose, hydroxymethyl cellulose, hydroxypropyl cellulose, hydroxypropyl methylcellulose, methylcellulose), sorbitan fatty acid esters (e.g. polyoxyethylene sorbitan monolaurate [TWEEN®20], polyoxyethylene sorbitan [TWEENn®60], polyoxyethylene sorbitan monooleate [TWEEN®80], sorbitan monopalmitate [SPAN®40], sorbitan monostearate [SPAN®60], sorbitan tristearate [SPAN®65], glyceryl monooleate, sorbitan monooleate [SPAN®80]), polyoxyethylene esters (e.g. polyoxyethylene monostearate [MYRJ®45], polyoxyethylene hydrogenated castor oil, polyethoxylated castor oil, polyoxymethylene stearate, and SOLUTOL®), sucrose fatty acid esters, polyethylene glycol fatty acid esters (e.g. CREMOPHOR®), polyoxyethylene ethers, (e.g. polyoxyethylene lauryl ether [BRIJ®30]), poly(vinyl-pyrrolidone), diethylene glycol monolaurate, triethanolamine oleate, sodium oleate, potassium oleate, ethyl oleate, oleic acid, ethyl laurate, sodium lauryl sulfate, PLUORINC® F 68, POLOXAMER®188, cetrimonium bromide, cetylpyridinium chloride, benzalkonium chloride, docusate sodium, etc. and/or combinations thereof.

[0616] Exemplary binding agents include, but are not limited to, starch (e.g. cornstarch and starch paste); gelatin; sugars (e.g. sucrose, glucose, dextrose, dextrin, molasses, lactose, lactitol, mannitol); natural and synthetic gums (e.g. acacia, sodium alginate, extract of Irish moss, panwar gum, ghatti gum, mucilage of isapol husks, carboxymethylcellulose, methylcellulose, ethylcellulose, hydroxyethylcellulose, hydroxypropyl cellulose, hydroxypropyl methylcellulose, microcrystalline cellulose, cellulose acetate, poly(vinyl-pyrrolidone), magnesium aluminum silicate (Veegum®), and larch arabogalactan); alginates; polyethylene oxide; polyethylene glycol; inorganic calcium salts; silicic acid; polymethacrylates; waxes; water; alcohol; etc.; and combinations thereof.

[0617] Exemplary preservatives may include, but are not limited to, antioxidants, chelating agents, antimicrobial preservatives, antifungal preservatives, alcohol preservatives, acidic preservatives, and/or other preservatives. Exemplary antioxidants include, but are not limited to, alpha tocopherol, ascorbic acid, acorbyl palmitate, butylated hydroxyanisole, butylated hydroxytoluene, monothioglycerol, potassium metabisulfite, propionic acid, propyl gallate, sodium ascorbate, sodium bisulfite, sodium metabisulfite, and/or sodium sulfite. Exemplary chelating agents include ethylenediaminetetraacetic acid (EDTA), citric acid monohydrate, disodium edetate, dipotassium edetate, edetic acid, fumaric acid, malic acid, phosphoric acid, sodium edetate, tartaric acid, and/or trisodium edetate. Exemplary antimicrobial preservatives include, but are not limited to, benzalkonium chloride, benzethonium chloride, benzyl alcohol, bronopol, cetrimide, cetylpyridinium chloride, chlorhexidine, chlorobutanol, chlorocresol, chloroxylenol, cresol, ethyl alcohol, glycerin, hexetidine, imidurea, phenol, phenoxyethanol, phenylethyl alcohol, phenylmercuric nitrate, propylene glycol, and/or thimerosal. Exemplary antifungal preservatives include, but are not limited to, butyl paraben, methyl paraben, ethyl paraben, propyl paraben, benzoic acid, hydroxybenzoic acid, potassium benzoate, potassium sorbate, sodium benzoate, sodium propionate, and/or sorbic acid. Exemplary alcohol preservatives include, but are not limited to, ethanol, polyethylene glycol, phenol, phenolic compounds, bisphenol, chlorobutanol, hydroxybenzoate, and/or phenylethyl alcohol. Exemplary acidic preservatives include, but are not limited to, vitamin A, vitamin C, vitamin E, beta-carotene, citric acid, acetic acid, dehydroacetic acid, ascorbic acid, sorbic acid, and/or phytic acid. Other preservatives include, but are not limited to, tocopherol, tocopherol acetate, deteroxime mesylate, cetrimide, butylated hydroxyanisol (BHA), butylated hydroxytoluened (BHT), ethylenediamine, sodium lauryl sulfate (SLS), sodium lauryl ether sulfate (SLES), sodium bisulfite, sodium metabisulfite, potassium sulfite, potassium metabisulfite, GLYDANT PLUS®, PHENONIP®, methylparaben, GERMALL®115, GERMABEN® II, NEOLONE™, KATHON™, and/or EUXYL®.

[0618] Exemplary buffering agents include, but are not limited to, citrate buffer solutions, acetate buffer solutions, phosphate buffer solutions, ammonium chloride, calcium carbonate, calcium chloride, calcium citrate, calcium glubionate, calcium gluceptate, calcium gluconate, D-gluconic acid, calcium glycerophosphate, calcium lactate, propanoic acid, calcium levulinate, pentanoic acid, dibasic calcium phosphate, phosphoric acid, tribasic calcium phosphate, calcium hydroxide phosphate, potassium acetate, potassium chloride, potassium gluconate, potassium mixtures, dibasic potassium phosphate, monobasic potassium phosphate, potassium phosphate mixtures, sodium acetate, sodium bicarbonate, sodium chloride, sodium citrate, sodium lactate, dibasic sodium phosphate, monobasic sodium phosphate, sodium phosphate mixtures, tromethamine, magnesium hydroxide, aluminum hydroxide, alginic acid, pyrogen-free water, isotonic saline, Ringer's solution, ethyl alcohol, etc., and/or combinations thereof.

[0619] Exemplary lubricating agents include, but are not limited to, magnesium stearate, calcium stearate, stearic acid, silica, talc, malt, glyceryl behanate, hydrogenated vegetable oils, polyethylene glycol, sodium benzoate, sodium acetate, sodium chloride, leucine, magnesium lauryl sulfate, sodium lauryl sulfate, etc., and combinations thereof.

[0620] Exemplary oils include, but are not limited to, almond, apricot kernel, avocado, babassu, bergamot, black current seed, borage, cade, camomile, canola, caraway, carnauba, castor, cinnamon, cocoa butter, coconut, cod liver, coffee, corn, cotton seed, emu, eucalyptus, evening primrose, fish, flaxseed, geraniol, gourd, grape seed, hazel nut, hyssop, isopropyl myristate, jojoba, kukui nut, lavandin, lavender, lemon, litsea cubeba, macademia nut, mallow, mango seed, meadowfoam seed, mink, nutmeg, olive, orange, orange roughy, palm, palm kernel, peach kernel, peanut, poppy seed, pumpkin seed, rapeseed, rice bran, rosemary, safflower, sandalwood, sasquana, savoury, sea buckthorn, sesame, shea butter, silicone, soybean, sunflower, tea tree, thistle, tsubaki, vetiver, walnut, and wheat germ oils. Exemplary oils include, but are not limited to, butyl stearate, caprylic triglyceride, capric triglyceride, cyclomethicone, diethyl sebacate, dimethicone 360, isopropyl myristate, mineral oil, octyldodecanol, oleyl alcohol, silicone oil, and/or combinations thereof.

[0621] Excipients such as cocoa butter and suppository waxes, coloring agents, coating agents, sweetening, flavoring, and/or perfuming agents can be present in the composition, according to the judgment of the formulator.

### Delivery

[0622] The present disclosure encompasses the delivery of oncology-related polynucleotides, primary constructs or mmRNA for any of therapeutic, pharmaceutical, diagnostic or imaging by any appropriate route taking into consideration likely advances in the sciences of drug delivery. Delivery may be naked or formulated.

### Naked Delivery

[0623] The oncology-related polynucleotides, primary constructs or mmRNA of the present invention may be delivered to a cell naked. As used herein in, “naked” refers to delivering polynucleotides, primary constructs or mmRNA free from agents which promote transfection. For example, the oncology-related polynucleotides, primary constructs or mmRNA delivered to the cell may contain no modifications. The naked polynucleotides, primary constructs or mmRNA may be delivered to the cell using routes of administration known in the art and described herein.

### Formulated Delivery

[0624] The oncology-related polynucleotides, primary constructs or mmRNA of the present invention may be formulated, using the methods described herein. The formulations may contain polynucleotides, primary constructs or mmRNA which may be modified and/or unmodified. The formulations may further include, but are not limited to, cell penetration agents, a pharmaceutically acceptable carrier, a delivery agent, a bioerodible or biocompatible polymer, a solvent, and a sustained-release delivery depot. The formulated polynucleotides, primary constructs or mmRNA may be delivered to the cell using routes of administration known in the art and described herein.

[0625] The compositions may also be formulated for direct delivery to an organ or tissue in any of several ways in the art including, but not limited to, direct soaking or bathing, via a catheter, by gels, powder, ointments, creams, gels, lotions, and/or drops, by using substrates such as fabric or biodegradable materials coated or impregnated with the compositions, and the like.

### Administration

[0626] The oncology-related polynucleotides, primary constructs or mmRNA of the present invention may be administered by any route which results in a therapeutically effective outcome. These include, but are not limited to enteral, gastroenteral, epidural, oral, transdermal, epidural (peridural), intracerebral (into the cerebrum), intracerebroventricular (into the cerebral ventricles), epicutaneous (application onto the skin), intradermal, (into the skin itself), subcutaneous (under the skin), nasal administration (through the nose), intravenous (into a vein), intraarterial (into an artery), intramuscular (into a muscle), intracardiac (into the heart), intraosseous infusion (into the bone marrow), intrathecal (into the spinal canal), intraperitoneal, (infusion or injection into the peritoneum), intravesical infusion, intravitreal, (through the eye), intracavernous injection, (into the base of the penis), intravaginal administration, intrauterine, extra-amniotic administration, transdermal (diffusion through the intact skin for systemic distribution), transmucosal (diffusion through a mucous membrane), insufflation (snorting), sublingual, sublabial, enema, eye drops (onto the conjunctiva), or in ear drops. In specific embodiments, compositions may be administered in a way which allows them cross the blood-brain barrier, vascular barrier, or other epithelial barrier. Non-limiting routes of administration for the oncology-related polynucleotides, primary constructs or mmRNA of the present invention are described below.

### Parenteral and Injectible Administration

[0627] Liquid dosage forms for parenteral administration include, but are not limited to, pharmaceutically acceptable emulsions, microemulsions, solutions, suspensions, syrups, and/or elixirs. In addition to active ingredients, liquid dosage forms may comprise inert diluents commonly used in the art such as, for example, water or other solvents, solubilizing agents and emulsifiers such as ethyl alcohol, isopropyl alcohol, ethyl carbonate, ethyl acetate, benzyl alcohol, benzyl benzoate, propylene glycol, 1,3-butylene glycol, dimethylformamide, oils (in particular, cottonseed, groundnut, corn, germ, olive, castor, and sesame oils), glycerol, tetrahydrofurfuryl alcohol, polyethylene glycols and fatty acid esters of sorbitan, and mixtures thereof. Besides inert diluents, oral compositions can include adjuvants such as wetting agents, emulsifying and suspending agents, sweetening, flavoring, and/or perfuming agents. In certain embodiments for parenteral administration, compositions are mixed with solubilizing agents such as CREMOPHOR®, alcohols, oils, modified oils, glycols, polysorbates, cyclodextrins, polymers, and/or combinations thereof.

[0628] Injectable preparations, for example, sterile injectable aqueous or oleaginous suspensions may be formulated according to the known art using suitable dispersing agents, wetting agents, and/or suspending agents. Sterile injectable preparations may be sterile injectable solutions, suspensions, and/or emulsions in nontoxic parenterally acceptable diluents and/or solvents, for example, as a solution in 1,3-butanediol. Among the acceptable vehicles and solvents that may be employed are water, Ringer's solution, U.S.P., and isotonic sodium chloride solution. Sterile, fixed oils are conventionally employed as a solvent or suspending medium. For this purpose any bland fixed oil can be employed including synthetic mono- or diglycerides. Fatty acids such as oleic acid can be used in the preparation of injectables.

[0629] Injectable formulations can be sterilized, for example, by filtration through a bacterial-retaining filter, and/or by incorporating sterilizing agents in the form of sterile solid compositions which can be dissolved or dispersed in sterile water or other sterile injectable medium prior to use.

[0630] In order to prolong the effect of an active ingredient, it is often desirable to slow the absorption of the active ingredient from subcutaneous or intramuscular injection. This may be accomplished by the use of a liquid suspension of crystalline or amorphous material with poor water solubility. The rate of absorption of the drug then depends upon its rate of dissolution which, in turn, may depend upon crystal size and crystalline form. Alternatively, delayed absorption of a parenterally administered drug form is accomplished by dissolving or suspending the drug in an oil vehicle. Injectable depot forms are made by forming microencapsule matrices of the drug in biodegradable polymers such as polylactide-polyglycolide. Depending upon the ratio of drug to polymer and the nature of the particular polymer employed, the rate of drug release can be controlled. Examples of other biodegradable polymers include poly(orthoesters) and poly(anhydrides). Depot injectable formulations are prepared by entrapping the drug in liposomes or microemulsions which are compatible with body tissues.

### Rectal and Vaginal Administration

[0631] Compositions for rectal or vaginal administration are typically suppositories which can be prepared by mixing compositions with suitable non-irritating excipients such as cocoa butter, polyethylene glycol or a suppository wax which are solid at ambient temperature but liquid at body temperature and therefore melt in the rectum or vaginal cavity and release the active ingredient.

### Oral Administration

[0632] Liquid dosage forms for oral administration include, but are not limited to, pharmaceutically acceptable emulsions, microemulsions, solutions, suspensions, syrups, and/or elixirs. In addition to active ingredients, liquid dosage forms may comprise inert diluents commonly used in the art such as, for example, water or other solvents, solubilizing agents and emulsifiers such as ethyl alcohol, isopropyl alcohol, ethyl carbonate, ethyl acetate, benzyl alcohol, benzyl benzoate, propylene glycol, 1,3-butylene glycol, dimethylformamide, oils (in particular, cottonseed, groundnut, corn, germ, olive, castor, and sesame oils), glycerol, tetrahydrofurfuryl alcohol, polyethylene glycols and fatty acid esters of sorbitan, and mixtures thereof. Besides inert diluents, oral compositions can include adjuvants such as wetting agents, emulsifying and suspending agents, sweetening, flavoring, and/or perfuming agents. In certain embodiments for parenteral administration, compositions are mixed with solubilizing agents such as CREMOPHOR®, alcohols, oils, modified oils, glycols, polysorbates, cyclodextrins, polymers, and/or combinations thereof.

[0633] Solid dosage forms for oral administration include capsules, tablets, pills, powders, and granules. In such solid dosage forms, an active ingredient is mixed with at least one inert, pharmaceutically acceptable excipient such as sodium citrate or dicalcium phosphate and/or fillers or extenders (e.g. starches, lactose, sucrose, glucose, mannitol, and silicic acid), binders (e.g. carboxymethylcellulose, alginates, gelatin, polyvinylpyrrolidinone, sucrose, and acacia), humectants (e.g. glycerol), disintegrating agents (e.g. agar, calcium carbonate, potato or tapioca starch, alginic acid, certain silicates, and sodium carbonate), solution retarding agents (e.g. paraffin), absorption accelerators (e.g. quaternary ammonium compounds), wetting agents (e.g. cetyl alcohol and glycerol monostearate), absorbents (e.g. kaolin and bentonite clay), and lubricants (e.g. talc, calcium stearate, magnesium stearate, solid polyethylene glycols, sodium lauryl sulfate), and mixtures thereof. In the case of capsules, tablets and pills, the dosage form may comprise buffering agents.

### Topical or Transdermal Administration

[0634] As described herein, compositions containing the oncology-related polynucleotides, primary constructs or mmRNA of the invention may be formulated for administration topically. The skin may be an ideal target site for delivery as it is readily accessible. Gene expression may be restricted not only to the skin, potentially avoiding nonspecific toxicity, but also to specific layers and cell types within the skin.

[0635] The site of cutaneous expression of the delivered compositions will depend on the route of nucleic acid delivery. Three routes are commonly considered to deliver polynucleotides, primary constructs or mmRNA to the skin: (i) topical application (e.g. for local/regional treatment and/or oncology-related applications); (ii) intradermal injection (e.g. for local/regional treatment and/or oncology-related applications); and (iii) systemic delivery (e.g. for treatment of dermatologic diseases that affect both cutaneous and extracutaneous regions). Polynucleotides, primary constructs or mmRNA can be delivered to the skin by several different approaches known in the art. Most topical delivery approaches have been shown to work for delivery of DNA, such as but not limited to, topical application of non-cationic liposome-DNA complex, cationic liposome-DNA complex, particle-mediated (gene gun), puncture-mediated gene transfections, and viral delivery approaches. After delivery of the nucleic acid, gene products have been detected in a number of different skin cell types, including, but not limited to, basal keratinocytes, sebaceous gland cells, dermal fibroblasts and dermal macrophages.

[0636] In one embodiment, the invention provides for a variety of dressings (e.g., wound dressings) or bandages (e.g., adhesive bandages) for conveniently and/or effectively carrying out methods of the present invention. Typically dressing or bandages may comprise sufficient amounts of pharmaceutical compositions and/or polynucleotides, primary constructs or mmRNA described herein to allow a user to perform multiple treatments of a subject(s).

[0637] In one embodiment, the invention provides for the oncology-related polynucleotides, primary constructs or mmRNA compositions to be delivered in more than one injection.

[0638] In one embodiment, before topical and/or transdermal administration at least one area of tissue, such as skin, may be subjected to a device and/or solution which may increase permeability. In one embodiment, the tissue may be subjected to an abrasion device to increase the permeability of the skin (see U.S. Patent Publication No. 20080275468, herein incorporated by reference in its entirety). In another embodiment, the tissue may be subjected to an ultrasound enhancement device. An ultrasound enhancement device may include, but is not limited to, the devices described in U.S. Publication No. 20040236268 and U.S. Pat. Nos. 6,491,657 and 6,234,990; each of which are herein incorporated by reference in their entireties. Methods of enhancing the permeability of tissue are described in U.S. Publication Nos. 20040171980 and 20040236268 and U.S. Pat. No. 6,190,315; each of which are herein incorporated by reference in their entireties.

[0639] In one embodiment, a device may be used to increase permeability of tissue before delivering formulations of modified mRNA described herein. The permeability of skin may be measured by methods known in the art and/or described in U.S. Pat. No. 6,190,315, herein incorporated by reference in its entirety. As a non-limiting example, a modified mRNA formulation may be delivered by the drug delivery methods described in U.S. Pat. No. 6,190,315, herein incorporated by reference in its entirety.

[0640] In another non-limiting example tissue may be treated with a eutectic mixture of local anesthetics (EMLA) cream before, during and/or after the tissue may be subjected to a device which may increase permeability. Katz et al. (Anesth Analg (2004); 98:371-76; herein incorporated by reference in its entirety) showed that using the EMLA cream in combination with a low energy, an onset of superficial cutaneous analgesia was seen as fast as 5 minutes after a pretreatment with a low energy ultrasound.

[0641] In one embodiment, enhancers may be applied to the tissue before, during, and/or after the tissue has been treated to increase permeability. Enhancers include, but are not limited to, transport enhancers, physical enhancers, and cavitation enhancers. Non-limiting examples of enhancers are described in U.S. Pat. No. 6,190,315, herein incorporated by reference in its entirety.

[0642] In one embodiment, a device may be used to increase permeability of tissue before delivering formulations of modified mRNA described herein, which may further contain a substance that invokes an immune response. In another non-limiting example, a formulation containing a substance to invoke an immune response may be delivered by the methods described in U.S. Publication Nos. 20040171980 and 20040236268; each of which are herein incorporated by reference in their entireties.

[0643] Dosage forms for topical and/or transdermal administration of a composition may include ointments, pastes, creams, lotions, gels, powders, solutions, sprays, inhalants and/or patches. Generally, an active ingredient is admixed under sterile conditions with a pharmaceutically acceptable excipient and/or any needed preservatives and/or buffers as may be required. Additionally, the present invention contemplates the use of transdermal patches, which often have the added advantage of providing controlled delivery of a compound to the body. Such dosage forms may be prepared, for example, by dissolving and/or dispensing the compound in the proper medium. Alternatively or additionally, rate may be controlled by either providing a rate controlling membrane and/or by dispersing the compound in a polymer matrix and/or gel.

[0644] Formulations suitable for topical administration include, but are not limited to, liquid and/or semi liquid preparations such as liniments, lotions, oil in water and/or water in oil emulsions such as creams, ointments and/or pastes, and/or solutions and/or suspensions.

[0645] Topically-administrable formulations may, for example, comprise from about 0.1% to about 10% (w/w) active ingredient, although the concentration of active ingredient may be as high as the solubility limit of the active ingredient in the solvent. Formulations for topical administration may further comprise one or more of the additional ingredients described herein.

### Depot Administration

[0646] As described herein, in some embodiments, the composition is formulated in depots for extended release. Generally, a specific organ or tissue (a “target tissue”) is targeted for administration.

[0647] In some aspects of the invention, the oncology-related polynucleotides, primary constructs or mmRNA are spatially retained within or proximal to a target tissue. Provided are method of providing a composition to a target tissue of a mammalian subject by contacting the target tissue (which contains one or more target cells) with the composition under conditions such that the composition, in particular the nucleic acid component(s) of the composition, is substantially retained in the target tissue, meaning that at least 10, 20, 30, 40, 50, 60, 70, 80, 85, 90, 95, 96, 97, 98, 99, 99.9, 99.99 or greater than 99.99% of the composition is retained in the target tissue. Advantageously, retention is determined by measuring the amount of the nucleic acid present in the composition that enters one or more target cells. For example, at least 1, 5, 10, 20, 30, 40, 50, 60, 70, 80, 85, 90, 95, 96, 97, 98, 99, 99.9, 99.99 or greater than 99.99% of the nucleic acids administered to the subject are present intracellularly at a period of time following administration. For example, intramuscular injection to a mammalian subject is performed using an aqueous composition containing a ribonucleic acid and a transfection reagent, and retention of the composition is determined by measuring the amount of the ribonucleic acid present in the muscle cells.

[0648] Aspects of the invention are directed to methods of providing a composition to a target tissue of a mammalian subject, by contacting the target tissue (containing one or more target cells) with the composition under conditions such that the composition is substantially retained in the target tissue. The composition contains an effective amount of a polynucleotides, primary constructs or mmRNA such that the polypeptide of interest is produced in at least one target cell. The compositions generally contain a cell penetration agent, although “naked” nucleic acid (such as nucleic acids without a cell penetration agent or other agent) is also contemplated, and a pharmaceutically acceptable carrier.

[0649] In some circumstances, the amount of a protein produced by cells in a tissue is desirably increased. Preferably, this increase in protein production is spatially restricted to cells within the target tissue. Thus, provided are methods of increasing production of a protein of interest in a tissue of a mammalian subject. A composition is provided that contains polynucleotides, primary constructs or mmRNA characterized in that a unit quantity of composition has been determined to produce the polypeptide of interest in a substantial percentage of cells contained within a predetermined volume of the target tissue.

[0650] In some embodiments, the composition includes a plurality of different polynucleotides, primary constructs or mmRNA, where one or more than one of the oncology-related polynucleotides, primary constructs or mmRNA encodes a polypeptide of interest. Optionally, the composition also contains a cell penetration agent to assist in the intracellular delivery of the composition. A determination is made of the dose of the composition required to produce the polypeptide of interest in a substantial percentage of cells contained within the predetermined volume of the target tissue (generally, without inducing significant production of the polypeptide of interest in tissue adjacent to the predetermined volume, or distally to the target tissue). Subsequent to this determination, the determined dose is introduced directly into the tissue of the mammalian subject.

[0651] In one embodiment, the invention provides for the oncology-related polynucleotides, primary constructs or mmRNA to be delivered in more than one injection or by split dose injections.

[0652] In one embodiment, the invention may be retained near target tissue using a small disposable drug reservoir, patch pump or osmotic pump. Non-limiting examples of patch pumps include those manufactured and/or sold by BD® (Franklin Lakes, NJ), Insulet Corporation (Bedford, MA), SteadyMed Therapeutics (San Francisco, CA), Medtronic (Minneapolis, MN) (e.g., MiniMed), UniLife (York, PA), Valeritas (Bridgewater, NJ), and SpringLeaf Therapeutics (Boston, MA). A non-limiting example of an osmotic pump include those manufactured by DURECT® (Cupertino, CA) (e.g., DUROS® and ALZET @).

### Pulmonary Administration

[0653] A pharmaceutical composition may be prepared, packaged, and/or sold in a formulation suitable for pulmonary administration via the buccal cavity. Such a formulation may comprise dry particles which comprise the active ingredient and which have a diameter in the range from about 0.5 nm to about 7 nm or from about 1 nm to about 6 nm. Such compositions are suitably in the form of dry powders for administration using a device comprising a dry powder reservoir to which a stream of propellant may be directed to disperse the powder and/or using a self propelling solvent/powder dispensing container such as a device comprising the active ingredient dissolved and/or suspended in a low-boiling propellant in a sealed container. Such powders comprise particles wherein at least 98% of the particles by weight have a diameter greater than 0.5 nm and at least 95% of the particles by number have a diameter less than 7 nm. Alternatively, at least 95% of the particles by weight have a diameter greater than 1 nm and at least 90% of the particles by number have a diameter less than 6 nm. Dry powder compositions may include a solid fine powder diluent such as sugar and are conveniently provided in a unit dose form.

[0654] Low boiling propellants generally include liquid propellants having a boiling point of below 65° F. at atmospheric pressure. Generally the propellant may constitute 50% to 99.9% (w/w) of the composition, and active ingredient may constitute 0.1% to 20% (w/w) of the composition. A propellant may further comprise additional ingredients such as a liquid non-ionic and/or solid anionic surfactant and/or a solid diluent (which may have a particle size of the same order as particles comprising the active ingredient).

[0655] As a non-limiting example, the oncology-related polynucleotides, primary constructs and/or mmRNA described herein may be formulated for pulmonary delivery by the methods described in U.S. Pat. No. 8,257,685; herein incorporated by reference in its entirety.

[0656] Pharmaceutical compositions formulated for pulmonary delivery may provide an active ingredient in the form of droplets of a solution and/or suspension. Such formulations may be prepared, packaged, and/or sold as aqueous and/or dilute alcoholic solutions and/or suspensions, optionally sterile, comprising active ingredient, and may conveniently be administered using any nebulization and/or atomization device. Such formulations may further comprise one or more additional ingredients including, but not limited to, a flavoring agent such as saccharin sodium, a volatile oil, a buffering agent, a surface active agent, and/or a preservative such as methylhydroxybenzoate. Droplets provided by this route of administration may have an average diameter in the range from about 0.1 nm to about 200 nm.

### Intranasal, Nasal and Buccal Administration

[0657] Formulations described herein as being useful for pulmonary delivery are useful for intranasal delivery of a pharmaceutical composition. Another formulation suitable for intranasal administration is a coarse powder comprising the active ingredient and having an average particle from about 0.2 μm to 500 μm. Such a formulation is administered in the manner in which snuff is taken, i.e. by rapid inhalation through the nasal passage from a container of the powder held close to the nose.

[0658] Formulations suitable for nasal administration may, for example, comprise from about as little as 0.1% (w/w) and as much as 100% (w/w) of active ingredient, and may comprise one or more of the additional ingredients described herein. A pharmaceutical composition may be prepared, packaged, and/or sold in a formulation suitable for buccal administration. Such formulations may, for example, be in the form of tablets and/or lozenges made using conventional methods, and may, for example, 0.1% to 20% (w/w) active ingredient, the balance comprising an orally dissolvable and/or degradable composition and, optionally, one or more of the additional ingredients described herein. Alternately, formulations suitable for buccal administration may comprise a powder and/or an aerosolized and/or atomized solution and/or suspension comprising active ingredient. Such powdered, aerosolized, and/or aerosolized formulations, when dispersed, may have an average particle and/or droplet size in the range from about 0.1 nm to about 200 nm, and may further comprise one or more of any additional ingredients described herein.

### Ophthalmic Administration

[0659] A pharmaceutical composition may be prepared, packaged, and/or sold in a formulation suitable for ophthalmic administration. Such formulations may, for example, be in the form of eye drops including, for example, a 0.1/1.0% (w/w) solution and/or suspension of the active ingredient in an aqueous or oily liquid excipient. Such drops may further comprise buffering agents, salts, and/or one or more other of any additional ingredients described herein. Other ophthalmically-administrable formulations which are useful include those which comprise the active ingredient in microcrystalline form and/or in a liposomal preparation. Ear drops and/or eye drops are contemplated as being within the scope of this invention. A multilayer thin film device may be prepared to contain a pharmaceutical composition for delivery to the eye and/or surrounding tissue.

### Payload Administration: Detectable Agents and Therapeutic Agents

[0660] The oncology-related polynucleotides, primary constructs or mmRNA described herein can be used in a number of different scenarios in which delivery of a substance (the “payload”) to a biological target is desired, for example delivery of detectable substances for detection of the target, or delivery of a therapeutic agent. Detection methods can include, but are not limited to, both imaging in vitro and in vivo imaging methods, e.g., immunohistochemistry, bioluminescence imaging (BLI), Magnetic Resonance Imaging (MRI), positron emission tomography (PET), electron microscopy, X-ray computed tomography, Raman imaging, optical coherence tomography, absorption imaging, thermal imaging, fluorescence reflectance imaging, fluorescence microscopy, fluorescence molecular tomographic imaging, nuclear magnetic resonance imaging, X-ray imaging, ultrasound imaging, photoacoustic imaging, lab assays, or in any situation where tagging/staining/imaging is required.

[0661] The oncology-related polynucleotides, primary constructs or mmRNA can be designed to include both a linker and a payload in any useful orientation. For example, a linker having two ends is used to attach one end to the payload and the other end to the nucleobase, such as at the C-7 or C-8 positions of the deaza-adenosine or deaza-guanosine or to the N-3 or C-5 positions of cytosine or uracil. The polynucleotide of the invention can include more than one payload (e.g., a label and a transcription inhibitor), as well as a cleavable linker. In one embodiment, the modified nucleotide is a modified 7-deaza-adenosine triphosphate, where one end of a cleavable linker is attached to the C7 position of 7-deaza-adenine, the other end of the linker is attached to an inhibitor (e.g., to the C5 position of the nucleobase on a cytidine), and a label (e.g., Cy5) is attached to the center of the linker (see, e.g., compound 1 of A*pCp C5 Parg Capless in FIG. 5 and columns 9 and 10 of U.S. Pat. No. 7,994,304, incorporated herein by reference). Upon incorporation of the modified 7-deaza-adenosine triphosphate to an encoding region, the resulting polynucleotide having a cleavable linker attached to a label and an inhibitor (e.g., a polymerase inhibitor). Upon cleavage of the linker (e.g., with reductive conditions to reduce a linker having a cleavable disulfide moiety), the label and inhibitor are released. Additional linkers and payloads (e.g., therapeutic agents, detectable labels, and cell penetrating payloads) are described herein.

[0662] Scheme 12 below depicts an exemplary modified nucleotide wherein the nucleobase, adenine, is attached to a linker at the C-7 carbon of 7-deaza adenine. In addition, Scheme 12 depicts the modified nucleotide with the linker and payload, e.g., a detectable agent, incorporated onto the 3′ end of the mRNA. Disulfide cleavage and 1,2-addition of the thiol group onto the propargyl ester releases the detectable agent. The remaining structure (depicted, for example, as pApC5Parg in Scheme 12) is the inhibitor. The rationale for the structure of the modified nucleotides is that the tethered inhibitor sterically interferes with the ability of the polymerase to incorporate a second base. Thus, it is critical that the tether be long enough to affect this function and that the inhibiter be in a stereochemical orientation that inhibits or prohibits second and follow on nucleotides into the growing polynucleotide strand.

[chemical structure]

[chemical structure]

[0663] For example, the oncology-related polynucleotides, primary constructs or mmRNA described herein can be used in reprogramming induced pluripotent stem cells (iPS cells), which can directly track cells that are transfected compared to total cells in the cluster. In another example, a drug that may be attached to the oncology-related polynucleotides, primary constructs or mmRNA via a linker and may be fluorescently labeled can be used to track the drug in vivo, e.g. intracellularly. Other examples include, but are not limited to, the use of a polynucleotides, primary constructs or mmRNA in reversible drug delivery into cells.

[0664] The oncology-related polynucleotides, primary constructs or mmRNA described herein can be used in intracellular targeting of a payload, e.g., detectable or therapeutic agent, to specific organelle. Exemplary intracellular targets can include, but are not limited to, the nuclear localization for advanced mRNA processing, or a nuclear localization sequence (NLS) linked to the mRNA containing an inhibitor.

[0665] In addition, the oncology-related polynucleotides, primary constructs or mmRNA described herein can be used to deliver therapeutic agents to cells or tissues, e.g., in living animals. For example, the oncology-related polynucleotides, primary constructs or mmRNA described herein can be used to deliver highly polar chemotherapeutics agents to kill cancer cells. The oncology-related polynucleotides, primary constructs or mmRNA attached to the therapeutic agent through a linker can facilitate member permeation allowing the therapeutic agent to travel into a cell to reach an intracellular target.

[0666] In one example, the linker is attached at the 2′-position of the ribose ring and/or at the 3′ and/or 5′ position of the polynucleotides, primary constructs mmRNA (See e.g., International Pub. No. WO2012030683, herein incorporated by reference in its entirety). The linker may be any linker disclosed herein, known in the art and/or disclosed in International Pub. No. WO2012030683, herein incorporated by reference in its entirety.

[0667] In another example, the oncology-related polynucleotides, primary constructs or mmRNA can be attached to the oncology-related polynucleotides, primary constructs or mmRNA a viral inhibitory peptide (VIP) through a cleavable linker. The cleavable linker can release the VIP and dye into the cell. In another example, the oncology-related polynucleotides, primary constructs or mmRNA can be attached through the linker to an ADP-ribosylate, which is responsible for the actions of some bacterial toxins, such as cholera toxin, diphtheria toxin, and pertussis toxin. These toxin proteins are ADP-ribosyltransferases that modify target proteins in human cells. For example, cholera toxin ADP-ribosylates G proteins modifies human cells by causing massive fluid secretion from the lining of the small intestine, which results in life-threatening diarrhea.

[0668] In some embodiments, the payload may be a therapeutic agent such as a cytotoxin, radioactive ion, chemotherapeutic, or other therapeutic agent. A cytotoxin or cytotoxic agent includes any agent that may be detrimental to cells. Examples include, but are not limited to, taxol, cytochalasin B, gramicidin D, ethidium bromide, emetine, mitomycin, etoposide, teniposide, vincristine, vinblastine, colchicine, doxorubicin, daunorubicin, dihydroxyanthracinedione, mitoxantrone, mithramycin, actinomycin D, 1-dehydrotestosterone, glucocorticoids, procaine, tetracaine, lidocaine, propranolol, puromycin, maytansinoids, e.g., maytansinol (see U.S. Pat. No. 5,208,020 incorporated herein in its entirety), rachelmycin (CC-1065, see U.S. Pat. Nos. 5,475,092, 5,585,499, and 5,846,545, all of which are incorporated herein by reference), and analogs or homologs thereof. Radioactive ions include, but are not limited to iodine (e.g., iodine 125 or iodine 131), strontium 89, phosphorous, palladium, cesium, iridium, phosphate, cobalt, yttrium 90, samarium 153, and praseodymium. Other therapeutic agents include, but are not limited to, antimetabolites (e.g., methotrexate, 6-mercaptopurine, 6-thioguanine, cytarabine, 5-fluorouracil decarbazine), alkylating agents (e.g., mechlorethamine, thiotepa chlorambucil, rachelmycin (CC-1065), melphalan, carmustine (BSNU), lomustine (CCNU), cyclophosphamide, busulfan, dibromomannitol, streptozotocin, mitomycin C, and cis-dichlorodiamine platinum (II) (DDP) cisplatin), anthracyclines (e.g., daunorubicin (formerly daunomycin) and doxorubicin), antibiotics (e.g., dactinomycin (formerly actinomycin), bleomycin, mithramycin, and anthramycin (AMC)), and anti-mitotic agents (e.g., vincristine, vinblastine, taxol and maytansinoids).

[0669] In some embodiments, the payload may be a detectable agent, such as various organic small molecules, inorganic compounds, nanoparticles, enzymes or enzyme substrates, fluorescent materials, luminescent materials (e.g., luminol), bioluminescent materials (e.g., luciferase, luciferin, and aequorin), chemiluminescent materials, radioactive materials (e.g., ¹⁸F, ⁶⁷Ga, ^{81m}Kr, ⁸²Rb, ¹¹¹In, ¹²³J ¹³³Xe, ²⁰¹Tl, ¹²⁵I, ³⁵S, ¹⁴C, ³H, or ^{99m}Tc (e.g., as pertechnetate (technetate(VII), TcO₄⁻)), and contrast agents (e.g., gold (e.g., gold nanoparticles), gadolinium (e.g., chelated Gd), iron oxides (e.g., superparamagnetic iron oxide (SPIO), monocrystalline iron oxide nanoparticles (MIONs), and ultrasmall superparamagnetic iron oxide (USPIO)), manganese chelates (e.g., Mn-DPDP), barium sulfate, iodinated contrast media (iohexol), microbubbles, or perfluorocarbons). Such optically-detectable labels include for example, without limitation, 4-acetamido-4′-isothiocyanatostilbene-2,2′disulfonic acid; acridine and derivatives (e.g., acridine and acridine isothiocyanate); 5-(2′-aminoethyl)aminonaphthalene-1-sulfonic acid (EDANS); 4-amino-N-[3-vinylsulfonyl)phenyl]naphthalimide-3,5 disulfonate; N-(4-anilino-l-naphthyl)maleimide; anthranilamide; BODIPY; Brilliant Yellow; coumarin and derivatives (e.g., coumarin, 7-amino-4-methylcoumarin (AMC, Coumarin 120), and 7-amino-4-trifluoromethylcoumarin (Coumarin 151)); cyanine dyes; cyanosine; 4′,6-diaminidino-2-phenylindole (DAPI); 5′ 5″-dibromopyrogallol-sulfonaphthalein (Bromopyrogallol Red); 7-diethylamino-3-(4′-isothiocyanatophenyl)-4-methylcoumarin; diethylenetriamine pentaacetate; 4,4′-diisothiocyanatodihydro-stilbene-2,2′-disulfonic acid; 4,4′-diisothiocyanatostilbene-2,2′-disulfonic acid; 5-[dimethylamino]-naphthalene-1-sulfonyl chloride (DNS, dansylchloride); 4-dimethylaminophenylazophenyl-4′-isothiocyanate (DABITC); eosin and derivatives (e.g., eosin and eosin isothiocyanate); erythrosin and derivatives (e.g., erythrosin B and erythrosin isothiocyanate); ethidium; fluorescein and derivatives (e.g., 5-carboxyfluorescein (FAM), 5-(4,6-dichlorotriazin-2-yl)aminofluorescein (DTAF), 2′,7′-dimethoxy-4′5′-dichloro-6-carboxyfluorescein, fluorescein, fluorescein isothiocyanate, X-rhodamine-5-(and -6)-isothiocyanate (QFITC or XRITC), and fluorescamine); 2-[2-[3-[[1,3-dihydro-1,1-dimethyl-3-(3-sulfopropyl)-2H-benz[e]indol-2-ylidene]ethylidene]-2-[4-(ethoxycarbonyl)-1-piperazinyl]-1-cyclopenten-1-yl]ethenyl]-1,1-dimethyl-3-(3-sulforpropyl)-1H-benz[e]indolium hydroxide, inner salt, compound with n,n-diethylethanamine(1:1) (IR144); 5-chloro-2-[2-[3-[(5-chloro-3-ethyl-2(3H)-benzothiazol-ylidene)ethylidene]-2-(diphenylamino)-1-cyclopenten-1-yl]ethenyl]-3-ethyl benzothiazolium perchlorate (IR140); Malachite Green isothiocyanate; 4-methylumbelliferone orthocresolphthalein; nitrotyrosine; pararosaniline; Phenol Red; B-phycoerythrin; o-phthaldialdehyde; pyrene and derivatives(e.g., pyrene, pyrene butyrate, and succinimidyl 1-pyrene); butyrate quantum dots; Reactive Red 4 (CIBACRON™ Brilliant Red 3B-A); rhodamine and derivatives (e.g., 6-carboxy-X-rhodamine (ROX), 6-carboxyrhodamine (R6G), lissamine rhodamine B sulfonyl chloride rhodarnine (Rhod), rhodamine B, rhodamine 123, rhodamine X isothiocyanate, sulforhodamine B, sulforhodamine 101, sulfonyl chloride derivative of sulforhodamine 101 (Texas Red), N,N,N′,N′tetramethyl-6-carboxyrhodamine (TAMRA) tetramethyl rhodamine, and tetramethyl rhodamine isothiocyanate (TRITC)); riboflavin; rosolic acid; terbium chelate derivatives; Cyanine-3 (Cy3); Cyanine-5 (Cy5); cyanine-5.5 (Cy5.5), Cyanine-7 (Cy7); TRD 700; IRD 800; Alexa 647; La Jolta Blue; phthalo cyanine; and naphthalo cyanine.

[0670] In some embodiments, the detectable agent may be a non-detectable pre-cursor that becomes detectable upon activation (e.g., fluorogenic tetrazine-fluorophore constructs (e.g., tetrazine-BODIPY FL, tetrazine-Oregon Green 488, or tetrazine-BODIPY TMR-X) or enzyme activatable fluorogenic agents (e.g., PROSENSE® (VisEn Medical))). In vitro assays in which the enzyme labeled compositions can be used include, but are not limited to, enzyme linked immunosorbent assays (ELISAs), immunoprecipitation assays, immunofluorescence, enzyme immunoassays (EIA), radioimmunoassays (RIA), and Western blot analysis.

### Combinations

[0671] The oncology-related polynucleotides, primary constructs or mmRNA may be used in combination with one or more other therapeutic, prophylactic, diagnostic, or imaging agents. By “in combination with,” it is not intended to imply that the agents must be administered at the same time and/or formulated for delivery together, although these methods of delivery are within the scope of the present disclosure. Compositions can be administered concurrently with, prior to, or subsequent to, one or more other desired therapeutics or medical procedures. In general, each agent will be administered at a dose and/or on a time schedule determined for that agent. In some embodiments, the present disclosure encompasses the delivery of pharmaceutical, prophylactic, diagnostic, or imaging compositions in combination with agents that may improve their bioavailability, reduce and/or modify their metabolism, inhibit their excretion, and/or modify their distribution within the body. As a non-limiting example, the nucleic acids or mmRNA may be used in combination with a pharmaceutical agent for the treatment of cancer or to control hyperproliferative cells. In U.S. Pat. No. 7,964,571, herein incorporated by reference in its entirety, a combination therapy for the treatment of solid primary or metastasized tumor is described using a pharmaceutical composition including a DNA plasmid encoding for interleukin-12 with a lipopolymer and also administering at least one anticancer agent or chemotherapeutic. Further, the nucleic acids and mmRNA of the present invention that encodes anti-proliferative molecules may be in a pharmaceutical composition with a lipopolymer (see e.g., U.S. Pub. No. 20110218231, herein incorporated by reference in its entirety, claiming a pharmaceutical composition comprising a DNA plasmid encoding an anti-proliferative molecule and a lipopolymer) which may be administered with at least one chemotherapeutic or anticancer agent.

[0672] It will further be appreciated that therapeutically, prophylactically, diagnostically, or imaging active agents utilized in combination may be administered together in a single composition or administered separately in different compositions. In general, it is expected that agents utilized in combination with be utilized at levels that do not exceed the levels at which they are utilized individually. In some embodiments, the levels utilized in combination will be lower than those utilized individually. In one embodiment, the combinations, each or together may be administered according to the split dosing regimens described herein.

### Dosing

[0673] The present invention provides methods comprising administering modified mRNAs and their encoded proteins or complexes in accordance with the invention to a subject in need thereof. Nucleic acids, proteins or complexes, or pharmaceutical, imaging, diagnostic, or prophylactic compositions thereof, may be administered to a subject using any amount and any route of administration effective for preventing, treating, diagnosing, or imaging a disease, disorder, and/or condition (e.g., a disease, disorder, and/or condition relating to working memory deficits). The exact amount required will vary from subject to subject, depending on the species, age, and general condition of the subject, the severity of the disease, the particular composition, its mode of administration, its mode of activity, and the like. Compositions in accordance with the invention are typically formulated in dosage unit form for ease of administration and uniformity of dosage. It will be understood, however, that the total daily usage of the compositions of the present invention may be decided by the attending physician within the scope of sound medical judgment. The specific therapeutically effective, prophylactically effective, or appropriate imaging dose level for any particular patient will depend upon a variety of factors including the disorder being treated and the severity of the disorder; the activity of the specific compound employed; the specific composition employed; the age, body weight, general health, sex and diet of the patient; the time of administration, route of administration, and rate of excretion of the specific compound employed; the duration of the treatment; drugs used in combination or coincidental with the specific compound employed; and like factors well known in the medical arts.

[0674] In certain embodiments, compositions in accordance with the present invention may be administered at dosage levels sufficient to deliver from about 0.0001 mg/kg to about 100 mg/kg, from about 0.001 mg/kg to about 0.05 mg/kg, from about 0.005 mg/kg to about 0.05 mg/kg, from about 0.001 mg/kg to about 0.005 mg/kg, from about 0.05 mg/kg to about 0.5 mg/kg, from about 0.01 mg/kg to about 50 mg/kg, from about 0.1 mg/kg to about 40 mg/kg, from about 0.5 mg/kg to about 30 mg/kg, from about 0.01 mg/kg to about 10 mg/kg, from about 0.1 mg/kg to about 10 mg/kg, or from about 1 mg/kg to about 25 mg/kg, of subject body weight per day, one or more times a day, to obtain the desired therapeutic, diagnostic, prophylactic, or imaging effect. The desired dosage may be delivered three times a day, two times a day, once a day, every other day, every third day, every week, every two weeks, every three weeks, or every four weeks. In certain embodiments, the desired dosage may be delivered using multiple administrations (e.g., two, three, four, five, six, seven, eight, nine, ten, eleven, twelve, thirteen, fourteen, or more administrations). When multiple administrations are employed, split dosing regimens such as those described herein may be used.

[0675] According to the present invention, it has been discovered that administration of mmRNA in split-dose regimens produce higher levels of proteins in mammalian subjects. As used herein, a “split dose” is the division of single unit dose or total daily dose into two or more doses, e.g, two or more administrations of the single unit dose. As used herein, a “single unit dose” is a dose of any therapeutic administered in one dose/at one time/single route/single point of contact, i.e., single administration event. As used herein, a “total daily dose” is an amount given or prescribed in 24 hr period. It may be administered as a single unit dose. In one embodiment, the mmRNA of the present invention are administered to a subject in split doses. The mmRNA may be formulated in buffer only or in a formulation described herein.

### Dosage Forms

[0676] A pharmaceutical composition described herein can be formulated into a dosage form described herein, such as a topical, intranasal, intratracheal, or injectable (e.g., intravenous, intraocular, intravitreal, intramuscular, intracardiac, intraperitoneal, subcutaneous).

### Liquid Dosage Forms

[0677] Liquid dosage forms for parenteral administration include, but are not limited to, pharmaceutically acceptable emulsions, microemulsions, solutions, suspensions, syrups, and/or elixirs. In addition to active ingredients, liquid dosage forms may comprise inert diluents commonly used in the art including, but not limited to, water or other solvents, solubilizing agents and emulsifiers such as ethyl alcohol, isopropyl alcohol, ethyl carbonate, ethyl acetate, benzyl alcohol, benzyl benzoate, propylene glycol, 1,3-butylene glycol, dimethylformamide, oils (in particular, cottonseed, groundnut, corn, germ, olive, castor, and sesame oils), glycerol, tetrahydrofurfuryl alcohol, polyethylene glycols and fatty acid esters of sorbitan, and mixtures thereof. In certain embodiments for parenteral administration, compositions may be mixed with solubilizing agents such as CREMOPHOR®, alcohols, oils, modified oils, glycols, polysorbates, cyclodextrins, polymers, and/or combinations thereof.

### Injectable

[0678] Injectable preparations, for example, sterile injectable aqueous or oleaginous suspensions may be formulated according to the known art and may include suitable dispersing agents, wetting agents, and/or suspending agents. Sterile injectable preparations may be sterile injectable solutions, suspensions, and/or emulsions in nontoxic parenterally acceptable diluents and/or solvents, for example, a solution in 1,3-butanediol. Among the acceptable vehicles and solvents that may be employed include, but are not limited to, water, Ringer's solution, U.S.P., and isotonic sodium chloride solution. Sterile, fixed oils are conventionally employed as a solvent or suspending medium. For this purpose any bland fixed oil can be employed including synthetic mono- or diglycerides. Fatty acids such as oleic acid can be used in the preparation of injectables.

[0679] Injectable formulations can be sterilized, for example, by filtration through a bacterial-retaining filter, and/or by incorporating sterilizing agents in the form of sterile solid compositions which can be dissolved or dispersed in sterile water or other sterile injectable medium prior to use.

[0680] In order to prolong the effect of an active ingredient, it may be desirable to slow the absorption of the active ingredient from subcutaneous or intramuscular injection. This may be accomplished by the use of a liquid suspension of crystalline or amorphous material with poor water solubility. The rate of absorption of the polynucleotide, primary construct or mmRNA then depends upon its rate of dissolution which, in turn, may depend upon crystal size and crystalline form. Alternatively, delayed absorption of a parenterally administered polynucleotide, primary construct or mmRNA may be accomplished by dissolving or suspending the polynucleotide, primary construct or mmRNA in an oil vehicle. Injectable depot forms are made by forming microencapsule matrices of the polynucleotide, primary construct or mmRNA in biodegradable polymers such as polylactide-polyglycolide. Depending upon the ratio of polynucleotide, primary construct or mmRNA to polymer and the nature of the particular polymer employed, the rate of polynucleotide, primary construct or mmRNA release can be controlled. Examples of other biodegradable polymers include, but are not limited to, poly(orthoesters) and poly(anhydrides). Depot injectable formulations may be prepared by entrapping the polynucleotide, primary construct or mmRNA in liposomes or microemulsions which are compatible with body tissues.

### Pulmonary

[0681] Formulations described herein as being useful for pulmonary delivery may also be used for intranasal delivery of a pharmaceutical composition. Another formulation suitable for intranasal administration may be a coarse powder comprising the active ingredient and having an average particle from about 0.2 μm to 500 μm. Such a formulation may be administered in the manner in which snuff is taken, i.e. by rapid inhalation through the nasal passage from a container of the powder held close to the nose.

[0682] Formulations suitable for nasal administration may, for example, comprise from about as little as 0.1% (w/w) and as much as 100% (w/w) of active ingredient, and may comprise one or more of the additional ingredients described herein. A pharmaceutical composition may be prepared, packaged, and/or sold in a formulation suitable for buccal administration. Such formulations may, for example, be in the form of tablets and/or lozenges made using conventional methods, and may, for example, contain about 0.1% to 20% (w/w) active ingredient, where the balance may comprise an orally dissolvable and/or degradable composition and, optionally, one or more of the additional ingredients described herein. Alternately, formulations suitable for buccal administration may comprise a powder and/or an aerosolized and/or atomized solution and/or suspension comprising active ingredient. Such powdered, aerosolized, and/or aerosolized formulations, when dispersed, may have an average particle and/or droplet size in the range from about 0.1 nm to about 200 nm, and may further comprise one or more of any additional ingredients described herein.

[0683] General considerations in the formulation and/or manufacture of pharmaceutical agents may be found, for example, in Remington: The Science and Practice of Pharmacy 21^{st} ed., Lippincott Williams & Wilkins, 2005 (incorporated herein by reference in its entirety).

### Coatings or Shells

[0684] Solid dosage forms of tablets, dragees, capsules, pills, and granules can be prepared with coatings and shells such as enteric coatings and other coatings well known in the pharmaceutical formulating art. They may optionally comprise opacifying agents and can be of a composition that they release the active ingredient(s) only, or preferentially, in a certain part of the intestinal tract, optionally, in a delayed manner. Examples of embedding compositions which can be used include polymeric substances and waxes. Solid compositions of a similar type may be employed as fillers in soft and hard-filled gelatin capsules using such excipients as lactose or milk sugar as well as high molecular weight polyethylene glycols and the like.

### Properties of Pharmaceutical Compositions

[0685] The pharmaceutical compositions described herein can be characterized by one or more of bioavailability, therapeutic window and/or volume of distribution.

### Bioavailability

[0686] The oncology-related polynucleotides, primary constructs or mmRNA, when formulated into a composition with a delivery agent as described herein, can exhibit an increase in bioavailability as compared to a composition lacking a delivery agent as described herein. As used herein, the term “bioavailability” refers to the systemic availability of a given amount of oncology-related polynucleotides, primary constructs or mmRNA administered to a mammal. Bioavailability can be assessed by measuring the area under the curve (AUC) or the maximum serum or plasma concentration (Cₘax) of the unchanged form of a compound following administration of the compound to a mammal. AUC is a determination of the area under the curve plotting the serum or plasma concentration of a compound along the ordinate (Y-axis) against time along the abscissa (X-axis). Generally, the AUC for a particular compound can be calculated using methods known to those of ordinary skill in the art and as described in G. S. Banker, Modern Pharmaceutics, Drugs and the Pharmaceutical Sciences, v. 72, Marcel Dekker, New York, Inc., 1996, herein incorporated by reference in its entirety.

[0687] The Cₘₐₓ value is the maximum concentration of the compound achieved in the serum or plasma of a mammal following administration of the compound to the mammal. The Cₘₐₓ value of a particular compound can be measured using methods known to those of ordinary skill in the art. The phrases “increasing bioavailability” or “improving the pharmacokinetics,” as used herein mean that the systemic availability of a first polynucleotide, primary construct or mmRNA, measured as AUC, Cₘₐₓ, or Cₘᵢₙ in a mammal is greater, when co-administered with a delivery agent as described herein, than when such co-administration does not take place. In some embodiments, the bioavailability of the polynucleotide, primary construct or mmRNA can increase by at least about 2%, at least about 5%, at least about 10%, at least about 15%, at least about 20%, at least about 25%, at least about 30%, at least about 35%, at least about 40%, at least about 45%, at least about 50%, at least about 55%, at least about 60%, at least about 65%, at least about 70%, at least about 75%, at least about 80%, at least about 85%, at least about 90%, at least about 95%, or about 100%.

### Therapeutic Window

[0688] The oncology-related polynucleotides, primary constructs or mmRNA, when formulated into a composition with a delivery agent as described herein, can exhibit an increase in the therapeutic window of the administered polynucleotide, primary construct or mmRNA composition as compared to the therapeutic window of the administered polynucleotide, primary construct or mmRNA composition lacking a delivery agent as described herein. As used herein “therapeutic window” refers to the range of plasma concentrations, or the range of levels of therapeutically active substance at the site of action, with a high probability of eliciting a therapeutic effect. In some embodiments, the therapeutic window of the polynucleotide, primary construct or mmRNA when co-administered with a delivery agent as described herein can increase by at least about 2%, at least about 5%, at least about 10%, at least about 15%, at least about 20%, at least about 25%, at least about 30%, at least about 35%, at least about 40%, at least about 45%, at least about 50%, at least about 55%, at least about 60%, at least about 65%, at least about 70%, at least about 75%, at least about 80%, at least about 85%, at least about 90%, at least about 95%, or about 100%.

### Volume of Distribution

[0689] The oncology-related polynucleotides, primary constructs or mmRNA, when formulated into a composition with a delivery agent as described herein, can exhibit an improved volume of distribution (V_{dist}), e.g., reduced or targeted, relative to a composition lacking a delivery agent as described herein. The volume of distribution (V_{dist}) relates the amount of the drug in the body to the concentration of the drug in the blood or plasma. As used herein, the term “volume of distribution” refers to the fluid volume that would be required to contain the total amount of the drug in the body at the same concentration as in the blood or plasma: V_{dist} equals the amount of drug in the body/concentration of drug in blood or plasma. For example, for a 10 mg dose and a plasma concentration of 10 mg/L, the volume of distribution would be 1 liter. The volume of distribution reflects the extent to which the drug is present in the extravascular tissue. A large volume of distribution reflects the tendency of a compound to bind to the tissue components compared with plasma protein binding. In a clinical setting, V_{dist} can be used to determine a loading dose to achieve a steady state concentration. In some embodiments, the volume of distribution of the polynucleotide, primary construct or mmRNA when co-administered with a delivery agent as described herein can decrease at least about 2%, at least about 5%, at least about 10%, at least about 15%, at least about 20%, at least about 25%, at least about 30%, at least about 35%, at least about 40%, at least about 45%, at least about 50%, at least about 55%, at least about 60%, at least about 65%, at least about 70%.

### Biological Effect

[0690] In one embodiment, the biological effect of the modified mRNA delivered to the animals may be categorized by analyzing the protein expression in the animals. The protein expression may be determined from analyzing a biological sample collected from a mammal administered the modified mRNA of the present invention. In one embodiment, the expression protein encoded by the modified mRNA administered to the mammal of at least 50 μg/ml may be preferred. For example, a protein expression of 50-200 μg/ml for the protein encoded by the modified mRNA delivered to the mammal may be seen as a therapeutically effective amount of protein in the mammal.

### Detection of Modified Nucleic Acids by Mass Spectrometry

[0691] Mass spectrometry (MS) is an analytical technique that can provide structural and molecular mass/concentration information on molecules after their conversion to ions. The molecules are first ionized to acquire positive or negative charges and then they travel through the mass analyzer to arrive at different areas of the detector according to their mass/charge (m/z) ratio.

[0692] Mass spectrometry is performed using a mass spectrometer which includes an ion source for ionizing the fractionated sample and creating charged molecules for further analysis. For example ionization of the sample may be performed by electrospray ionization (ESI), atmospheric pressure chemical ionization (APCI), photoionization, electron ionization, fast atom bombardment (FAB)/liquid secondary ionization (LSIMS), matrix assisted laser desorption/ionization (MALDI), field ionization, field desorption, thermospray/plasmaspray ionization, and particle beam ionization. The skilled artisan will understand that the choice of ionization method can be determined based on the analyte to be measured, type of sample, the type of detector, the choice of positive versus negative mode, etc.

[0693] After the sample has been ionized, the positively charged or negatively charged ions thereby created may be analyzed to determine a mass-to-charge ratio (i.e., m/z). Suitable analyzers for determining mass-to-charge ratios include quadropole analyzers, ion traps analyzers, and time-of-flight analyzers. The ions may be detected using several detection modes. For example, selected ions may be detected (i.e., using a selective ion monitoring mode (SIM)), or alternatively, ions may be detected using a scanning mode, e.g., multiple reaction monitoring (MRM) or selected reaction monitoring (SRM).

[0694] Liquid chromatography-multiple reaction monitoring (LC-MS/MRM) coupled with stable isotope labeled dilution of peptide standards has been shown to be an effective method for protein verification (e.g., Keshishian et al., Mol Cell Proteomics 2009 8: 2339-2349; Kuhn et al., Clin Chem 2009 55:1108-1117; Lopez et al., Clin Chem 2010 56:281-290; each of which are herein incorporated by reference in its entirety). Unlike untargeted mass spectrometry frequently used in biomarker discovery studies, targeted MS methods are peptide sequence-based modes of MS that focus the full analytical capacity of the instrument on tens to hundreds of selected peptides in a complex mixture. By restricting detection and fragmentation to only those peptides derived from proteins of interest, sensitivity and reproducibility are improved dramatically compared to discovery-mode MS methods. This method of mass spectrometry-based multiple reaction monitoring (MRM) quantitation of proteins can dramatically impact the discovery and quantitation of biomarkers via rapid, targeted, multiplexed protein expression profiling of clinical samples.

[0695] In one embodiment, a biological sample which may contain at least one protein encoded by at least one modified mRNA of the present invention may be analyzed by the method of MRM-MS. The quantification of the biological sample may further include, but is not limited to, isotopically labeled peptides or proteins as internal standards.

[0696] According to the present invention, the biological sample, once obtained from the subject, may be subjected to enzyme digestion. As used herein, the term “digest” means to break apart into shorter peptides. As used herein, the phrase “treating a sample to digest proteins” means manipulating a sample in such a way as to break down proteins in a sample. These enzymes include, but are not limited to, trypsin, endoproteinase Glu-C and chymotrypsin. In one embodiment, a biological sample which may contain at least one protein encoded by at least one modified mRNA of the present invention may be digested using enzymes.

[0697] In one embodiment, a biological sample which may contain protein encoded by modified mRNA of the present invention may be analyzed for protein using electrospray ionization. Electrospray ionization (ESI) mass spectrometry (ESIMS) uses electrical energy to aid in the transfer of ions from the solution to the gaseous phase before they are analyzed by mass spectrometry. Samples may be analyzed using methods known in the art (e.g., Ho et al., Clin Biochem Rev. 2003 24(1):3-12; herein incorporated by reference in its entirety). The ionic species contained in solution may be transferred into the gas phase by dispersing a fine spray of charge droplets, evaporating the solvent and ejecting the ions from the charged droplets to generate a mist of highly charged droplets. The mist of highly charged droplets may be analyzed using at least 1, at least 2, at least 3 or at least 4 mass analyzers such as, but not limited to, a quadropole mass analyzer. Further, the mass spectrometry method may include a purification step. As a non-limiting example, the first quadrapole may be set to select a single m/z ratio so it may filter out other molecular ions having a different m/z ratio which may eliminate complicated and time-consuming sample purification procedures prior to MS analysis.

[0698] In one embodiment, a biological sample which may contain protein encoded by modified mRNA of the present invention may be analyzed for protein in a tandem ESIMS system (e.g., MS/MS). As non-limiting examples, the droplets may be analyzed using a product scan (or daughter scan) a precursor scan (parent scan) a neutral loss or a multiple reaction monitoring.

[0699] In one embodiment, a biological sample which may contain protein encoded by modified mRNA of the present invention may be analyzed using matrix-assisted laser desorption/ionization (MALDI) mass spectrometry (MALDIMS). MALDI provides for the nondestructive vaporization and ionization of both large and small molecules, such as proteins. In MALDI analysis, the analyte is first co-crystallized with a large molar excess of a matrix compound, which may also include, but is not limited to, an ultraviolet absorbing weak organic acid. Non-limiting examples of matrices used in MALDI are α-cyano-4-hydroxycinnamic acid, 3,5-dimethoxy-4-hydroxycinnamic acid and 2,5-dihydroxybenzoic acid. Laser radiation of the analyte-matrix mixture may result in the vaporization of the matrix and the analyte. The laser induced desorption provides high ion yields of the intact analyte and allows for measurement of compounds with high accuracy. Samples may be analyzed using methods known in the art (e.g., Lewis, Wei and Siuzdak, Encyclopedia of Analytical Chemistry 2000:5880-5894; herein incorporated by reference in its entirety). As non-limiting examples, mass analyzers used in the MALDI analysis may include a linear time-of-flight (TOF), a TOF reflectron or a Fourier transform mass analyzer.

[0700] In one embodiment, the analyte-matrix mixture may be formed using the dried-droplet method. A biologic sample is mixed with a matrix to create a saturated matrix solution where the matrix-to-sample ratio is approximately 5000:1. An aliquot (approximately 0.5-2.0 uL) of the saturated matrix solution is then allowed to dry to form the analyte-matrix mixture.

[0701] In one embodiment, the analyte-matrix mixture may be formed using the thin-layer method. A matrix homogeneous film is first formed and then the sample is then applied and may be absorbed by the matrix to form the analyte-matrix mixture.

[0702] In one embodiment, the analyte-matrix mixture may be formed using the thick-layer method. A matrix homogeneous film is formed with a nitro-cellulose matrix additive. Once the uniform nitro-cellulose matrix layer is obtained the sample is applied and absorbed into the matrix to form the analyte-matrix mixture.

[0703] In one embodiment, the analyte-matrix mixture may be formed using the sandwich method. A thin layer of matrix crystals is prepared as in the thin-layer method followed by the addition of droplets of aqueous trifluoroacetic acid, the sample and matrix. The sample is then absorbed into the matrix to form the analyte-matrix mixture.

### V. Uses of Oncology-Related Polynucleotides, Oncology-Related Primary Constructs and Oncology-Related mmRNA of the Invention

[0704] The oncology-related polynucleotides, oncology-related primary constructs and oncology-related mmRNA of the present invention are designed, in preferred embodiments, to provide for avoidance or evasion of deleterious bio-responses such as the immune response and/or degradation pathways, overcoming the threshold of expression and/or improving protein production capacity, improved expression rates or translation efficiency, improved drug or protein half life and/or protein concentrations, optimized protein localization, to improve one or more of the stability and/or clearance in tissues, receptor uptake and/or kinetics, cellular access by the compositions, engagement with translational machinery, secretion efficiency (when applicable), accessibility to circulation, and/or modulation of a cell's status, function and/or activity.

### Therapeutics

### Therapeutic Agents

[0705] The oncology-related polynucleotides, oncology-related primary constructs or oncology-related mmRNA of the present invention, such as modified nucleic acids and modified RNAs, and the proteins translated from them described herein can be used as therapeutic or prophylactic agents. They are provided for use in medicine. For example, an oncology-related polynucleotide, oncology-related primary construct or oncology-related mmRNA described herein can be administered to a subject, wherein the oncology-related polynucleotide, oncology-related primary construct or oncology-related mmRNA is translated in vivo to produce a therapeutic or prophylactic oncology-related polypeptide in the subject. Provided are compositions, methods, kits, and reagents for diagnosis, treatment or prevention of a disease or condition in humans and other mammals. The active therapeutic agents of the invention include oncology-related polynucleotides, oncology-related primary constructs or oncology-related mmRNA, cells containing oncology-related polynucleotides, oncology-related primary constructs or oncology-related mmRNA or polypeptides translated from the oncology-related polynucleotides, oncology-related primary constructs or oncology-related mmRNA.

[0706] In certain embodiments, provided herein are combination therapeutics containing one or more oncology-related polynucleotide, oncology-related primary construct or oncology-related mmRNA containing translatable regions that encode for a protein or proteins that boost a mammalian subject's immunity along with a protein that induces antibody-dependent cellular toxicity. For example, provided herein are therapeutics containing one or more nucleic acids that encode trastuzumab and granulocyte-colony stimulating factor (G-CSF). In particular, such combination therapeutics are useful in Her2+ breast cancer patients who develop induced resistance to trastuzumab. (See, e.g., Albrecht, Immunotherapy. 2(6):795-8 (2010)).

[0707] Provided herein are methods of inducing translation of a recombinant polypeptide in a cell population using the oncology-related polynucleotide, oncology-related primary construct or oncology-related mmRNA described herein. Such translation can be in vivo, ex vivo, in culture, or in vitro. The cell population is contacted with an effective amount of a composition containing an oncology-related nucleic acid that has at least one nucleoside modification, and a translatable region encoding the recombinant oncology-related polypeptide. The population is contacted under conditions such that the oncology-related nucleic acid is localized into one or more cells of the cell population and the recombinant oncology-related polypeptide is translated in the cell from the oncology-related nucleic acid.

[0708] An “effective amount” of the composition is provided based, at least in part, on the target tissue, target cell type, means of administration, physical characteristics of the nucleic acid (e.g., size, and extent of modified nucleosides), and other determinants. In general, an effective amount of the composition provides efficient protein production in the cell, preferably more efficient than a composition containing a corresponding unmodified nucleic acid. Increased efficiency may be demonstrated by increased cell transfection (i.e., the percentage of cells transfected with the nucleic acid), increased protein translation from the nucleic acid, decreased nucleic acid degradation (as demonstrated, e.g., by increased duration of protein translation from a modified nucleic acid), or reduced innate immune response of the host cell.

[0709] Aspects of the invention are directed to methods of inducing in vivo translation of a recombinant polypeptide in a mammalian subject in need thereof. Therein, an effective amount of a composition containing a nucleic acid that has at least one structural or chemical modification and a translatable region encoding the recombinant polypeptide is administered to the subject using the delivery methods described herein. The nucleic acid is provided in an amount and under other conditions such that the nucleic acid is localized into a cell of the subject and the recombinant polypeptide is translated in the cell from the nucleic acid. The cell in which the nucleic acid is localized, or the tissue in which the cell is present, may be targeted with one or more than one rounds of nucleic acid administration.

[0710] In certain embodiments, the administered oncology-related polynucleotide, oncology-related primary construct or oncology-related mmRNA directs production of one or more recombinant polypeptides that provide a functional activity which is substantially absent in the cell, tissue or organism in which the recombinant oncology-related polypeptide is translated. For example, the missing functional activity may be enzymatic, structural, or gene regulatory in nature. In related embodiments, the administered oncology-related polynucleotide, oncology-related primary construct or oncology-related mmRNA directs production of one or more recombinant oncology-related polypeptides that increases (e.g., synergistically) a functional activity which is present but substantially deficient in the cell in which the recombinant oncology-related polypeptide is translated.

[0711] In other embodiments, the administered oncology-related polynucleotide, oncology-related primary construct or oncology-related mmRNA directs production of one or more recombinant oncology-related polypeptides that replace an oncology-related polypeptide (or multiple oncology-related polypeptides) that is substantially absent in the cell in which the recombinant oncology-related polypeptide is translated. Such absence may be due to genetic mutation of the encoding gene or regulatory pathway thereof. In some embodiments, the recombinant oncology-related polypeptide increases the level of an endogenous oncology-related protein in the cell to a desirable level; such an increase may bring the level of the endogenous oncology-related protein from a subnormal level to a normal level or from a normal level to a super-normal level.

[0712] Alternatively, the recombinant oncology-related polypeptide functions to antagonize the activity of an endogenous protein present in, on the surface of, or secreted from the cell. Usually, the activity of the endogenous oncology-related protein is deleterious to the subject; for example, due to mutation of the endogenous oncology-related protein resulting in altered activity or localization. Additionally, the recombinant oncology-related polypeptide antagonizes, directly or indirectly, the activity of a biological moiety present in, on the surface of, or secreted from the cell. Examples of antagonized biological moieties include lipids (e.g., cholesterol), a lipoprotein (e.g., low density lipoprotein), a nucleic acid, a carbohydrate, a protein toxin such as shiga and tetanus toxins, or a small molecule toxin such as botulinum, cholera, and diphtheria toxins. Additionally, the antagonized biological molecule may be an endogenous protein that exhibits an undesirable activity, such as a cytotoxic or cytostatic activity.

[0713] The recombinant oncology-related proteins described herein may be engineered for localization within the cell, potentially within a specific compartment such as the nucleus, or are engineered for secretion from the cell or translocation to the plasma membrane of the cell.

[0714] In some embodiments, modified oncology-related mRNAs and their encoded oncology-related polypeptides in accordance with the present invention may be used for treatment of any of a variety of diseases, disorders, and/or conditions described herein.

[0715] Provided herein, are methods to prevent infection and/or sepsis in a subject at risk of developing infection and/or sepsis, the method comprising administering to a subject in need of such prevention a composition comprising an oncology-related polynucleotide, primary construct or mmRNA precursor encoding an anti-microbial polypeptide (e.g., an anti-bacterial polypeptide), or a partially or fully processed form thereof in an amount sufficient to prevent infection and/or sepsis. In certain embodiments, the subject at risk of developing infection and/or sepsis may be a cancer patient. In certain embodiments, the cancer patient may have undergone a conditioning regimen. In some embodiments, the conditioning regiment may include, but is not limited to, chemotherapy, radiation therapy, or both.

[0716] Further provided herein, are methods to treat infection and/or sepsis in a subject, the method comprising administering to a subject in need of such treatment a composition comprising an oncology-related polynucleotide, primary construct or mmRNA precursor encoding an anti-microbial polypeptide (e.g., an anti-bacterial polypeptide), e.g., an anti-microbial polypeptide described herein, or a partially or fully processed form thereof in an amount sufficient to treat an infection and/or sepsis. In certain embodiments, the subject in need of treatment is a cancer patient. In certain embodiments, the cancer patient has undergone a conditioning regimen. In some embodiments, the conditioning regiment may include, but is not limited to, chemotherapy, radiation therapy, or both.

[0717] In certain embodiments, the subject may exhibits acute or chronic microbial infections (e.g., bacterial infections). In certain embodiments, the subject may have received or may be receiving a therapy. In certain embodiments, the therapy may include, but is not limited to, radiotherapy, chemotherapy, steroids, ultraviolet radiation, or a combination thereof. In certain embodiments, the patient may suffer from a microvascular disorder. In some embodiments, the microvascular disorder may be diabetes. In certain embodiments, the patient may have a wound. In some embodiments, the wound may be an ulcer. In a specific embodiment, the wound may be a diabetic foot ulcer. In certain embodiments, the subject may have one or more burn wounds. In certain embodiments, the administration may be local or systemic. In certain embodiments, the administration may be subcutaneous. In certain embodiments, the administration may be intravenous. In certain embodiments, the administration may be oral. In certain embodiments, the administration may be topical. In certain embodiments, the administration may be by inhalation. In certain embodiments, the administration may be rectal. In certain embodiments, the administration may be vaginal.

[0718] Other aspects of the present disclosure relate to transplantation of cells containing oncology-related polynucleotide, primary construct, or mmRNA to a mammalian subject. Administration of cells to mammalian subjects is known to those of ordinary skill in the art, and include, but is not limited to, local implantation (e.g., topical or subcutaneous administration), organ delivery or systemic injection (e.g., intravenous injection or inhalation), and the formulation of cells in pharmaceutically acceptable carrier. Such compositions containing oncology-related polynucleotide, primary construct, or mmRNA can be formulated for administration intramuscularly, transarterially, intraperitoneally, intravenously, intranasally, subcutaneously, endoscopically, transdermally, or intrathecally. In some embodiments, the composition may be formulated for extended release.

[0719] The subject to whom the therapeutic agent may be administered suffers from or may be at risk of developing a disease, disorder, or deleterious condition. Provided are methods of identifying, diagnosing, and classifying subjects on these bases, which may include clinical diagnosis, biomarker levels, genome-wide association studies (GWAS), and other methods known in the art.

### Oncology-Related Applications

[0720] In one embodiment, the oncology-related polynucleotides, oncology-related primary constructs and/or oncology-related mmRNA may be used in the treatment, management, characterization and/or diagnosis of cancer, a cancer-related and/or a cancer treatment-related disorder, side effect and/or condition. Such disease, disorders and conditions include, but are not limited to, adrenal cortical cancer, advanced cancer, anal cancer, aplastic anemia, bileduct cancer, bladder cancer, bone cancer, bone metastasis, brain tumors, brain cancer, breast cancer, childhood cancer, cancer of unknown primary origin, Castleman disease, cervical cancer, colon/rectal cancer, endometrial cancer, esophagus cancer, Ewing family of tumors, eye cancer, fallopian tube cancer, gallbladder cancer, gastrointestinal carcinoid tumors, gastrointestinal stromal tumors, gestational trophoblastic disease, Hodgkin disease, Kaposi sarcoma, renal cell carcinoma, laryngeal and hypopharyngeal cancer, acute lymphocytic leukemia, acute myeloid leukemia, chronic lymphocytic leukemia, chronic myeloid leukemia, chronic myelomonocytic leukemia, liver cancer, non-small cell lung cancer, small cell lung cancer, lung carcinoid tumor, lymphoma of the skin, malignant mesothelioma, multiple myeloma, myelodysplastic syndrome, nasal cavity and paranasal sinus cancer, nasopharyngeal cancer, neuroblastoma, non-Hodgkin lymphoma, oral cavity and oropharyngeal cancer, osteosarcoma, ovarian cancer, pancreatic cancer, penile cancer, pituitary tumors, prostate cancer, retinoblastoma, rhabdomyosarcoma, salivary gland cancer, sarcoma in adult soft tissue, basal and squamous cell skin cancer, melanoma, small intestine cancer, stomach cancer, testicular cancer, thymus cancer, thyroid cancer, uterine sarcoma, vaginal cancer, vulvar cancer, Waldenstrom macroglobulinemia, Wilms tumor.

[0721] In another embodiment, the oncology-related polynucleotides, oncology-related primary constructs and/or oncology-related mmRNA may be used in the treating, managing or manipulating at least one cancer-related or cancer treatment-related disorder, side effect or condition such as chemo brain, peripheral neuropathy, fatigue, depression, nausea and vomiting, pain, anemia, lymphedema, infections, second cancers caused by cancer treatment, sexual side effects, reduced fertility or infertility, ostomies, insomnia and hair loss.

[0722] In one embodiment, the oncology-related polynucleotides, oncology-related primary constructs and/or oncology-related mmRNA may be used to reduce the effect of at least one symptom of cancer in a subject. The symptom may include, but is not limited to, weakness, aches and pains, fever, fatigue, weight loss, blood clots, increased blood calcium levels, low white blood cell count, short of breath, dizziness, headaches, hyperpigmentation, jaundice, erthema, pruritis, excessive hair growth, change in bowel habits, change in bladder function, long-lasting sores, white patches inside the mouth, white spots on the tongue, unusual bleeding or discharge, thickening or lump on parts of the body, indigestion, trouble swallowing, changes in warts or moles, change in new skin and nagging cough or hoarseness.

### Common Categories of Cancer

### Brain Cancer

[0723] Brain cancer is the growth of abnormal cells in the tissues of the brain usually related to the growth of malignant brain tumors. Brain tumors grow and press on the nearby areas of the brain which can stop that part of the brain from working the way it should. Brain cancer rarely spreads into other tissues outside of the brain. The grade of tumor, based on how abnormal the cancer cells look under a microscope, may be used to tell the difference between slow- and fast-growing tumors. Grade I tumors grow slowly, rarely spreads into nearby tissues, has cells that look like normal cells and the entire tumor may be removable by surgery. Grade II tumors also grow slowly but may spread into nearby tissue and may recur. Grade III tumors grow quickly, is likely to spread into nearby tissue and the tumor cells look very different from normal cells. Grade IV, high-grade, grows and spreads very quickly and there may be areas of dead cells in the tumor. Symptoms of brain cancer may include, but are not limited to, morning headache or headache that goes away after vomiting, frequent nausea and vomiting, vision, hearing, and speech problems, loss of balance and trouble walking, weakness on one side of the body, unusual sleepiness or change in activity level, unusual changes in personality or behavior, seizures.

[0724] In one embodiment, the oncology-related polynucleotides, oncology-related primary constructs or oncology-related mmRNA of the present invention may be used to treat a disease, disorder and/or condition in a subject who has been diagnosed or may be diagnosed with brain cancer by administering to said subject an isolated polynucleotide encoding an oncology-related polypeptide of interest. In one embodiment, the oncology-related polynucleotides, oncology-related primary constructs or oncology-related mmRNA of the present invention may be used to reduce, eliminate, or prevent tumor growth in a subject who has been diagnosed or may be diagnosed with brain cancer by administering to said subject an isolated polynucleotide encoding an oncology-related polypeptide of interest. In one embodiment, the oncology-related polynucleotides, oncology-related primary constructs or oncology-related mmRNA of the present invention may be used to reduce and/or ameliorate at least one symptom of cancer in a subject who has been diagnosed or may be diagnosed with brain cancer by administering to said subject an isolated polynucleotide encoding an oncology-related polypeptide of interest. In a further embodiment, the oncology-related polypeptide of interest may include, but not limited to, SEQ ID NOs: 4711, 4712, 4713, 4714, 4715, 4716, 4717, 4718, 4719, 4720, 4721, 4722, 4723, 4724, 4725, 4726, 4727, 4728, 4742, 4743, 4744, 4745, 4746, 4747, 4748, 4749, 4750, 4751, 4781, 4782, 4783, 4784, 4785, 4786, 4787, 4788, 4789, 4790, 4825, 4826, 4827, 4828, 4829, 4830, 4832, 4854, 4855, 4856, 4857, 4858, 4859, 4860, 4861, 4863, 4864, 4865, 4866, 4867, 4868, 4869, 4870, 4871, 4872, 4873, 4885, 4886, 4887, 4888, 4889, 4890, 4891, 4892, 4893, 4894, 4911, 4912, 4913, 4914, 4915, 4916, 4917, 4918, 4919, 4920, 4960, 4961, 4962, 4963, 4964, 4965, 4966, 4967, 4968, 4969, 4970, 4971, 4972, 4973, 4974, 4975, 4976, 4977, 4978, 4979, 4980, 4981, 4982, 4983, 4984, 4985, 4986, 4987, 4988, 4989, 4990, 4991, 4992, 4993, 4994, 4995, 4996, 4997, 4998, 4999, 5000, 5001, 5002, 5008, 5009, 5010, 5011, 5012, 5013, 5014, 5015, 5016, 5017, 5018, 5019, 5020, 5021, 5022, 5023, 5024, 5025, 5026, 5027, 5028, 5030, 5031, 5032, 5033, 5034, 5035, 5036, 5037, 5038, 5039, 5040, 5041, 5042, 5043, 5044, 5045, 5046, 5047, 5048, 5049, 5050, 5051, 5052, 5053, 5054, 5055, 5056, 5057, 5058, 5059, 5060, 5061, 5062, 5063, 5064, 5065, 5066, 5067, 5068, 5069, 5070, 5071, 5072, 5073, 5074, 5075, 5076, 5077, 5078, 5079, 5103, 5104, 5105, 5106, 5107, 5108, 5109, 5110, 5118, 5119, 5120, 5121, 5122, 5123, 5124, 5125, 5126, 5127, 5128, 5129, 5130, 5131, 5132, 5133, 5134, 5135, 5136, 5137, 5138, 5139, 5140, 5141, 5145, 5146, 5147, 5148, 5149, 5150, 5151, 5152, 5153, 5154, 5155, 5156, 5157, 5158, 5159, 5160, 5161, 5162, 5163, 5164, 5165, 5166, 5167, 5168, 5169, 5170, 5171, 5172, 5173, 5174, 5175, 5176, 5177, 5178, 5182, 5183, 5184, 5185, 5186, 5187, 5188, 5189, 5190, 5191, 5192, 5193, 5194, 5195, 5196, 5197, 5198, 5199, 5200, 5201, 5202, 5203, 5204, 5205, 5206, 5207, 5208, 5209, 5210, 5211, 5212, 5213, 5230, 5231, 5252, 5253, 5254, 5255, 5256, 5257, 5258, 5259, 5260, 5261, 5262, 5263, 5264, 5265, 5266, 5267, 5268, 5269, 5270, 5271, 5291, 5292, 5293, 5294, 5295, 5296, 5297, 5298, 5299, 5300, 5301, 5302, 5303, 5304, 5305, 5306, 5307, 5308, 5309, 5310, 5311, 5312, 5313, 5314, 5315, 5316, 5317, 5318, 5319, 5320, 5321, 5322, 5323, 5324, 5325, 5326, 5327, 5328, 5329, 5330, 5331, 5332, 5333, 5334, 5335, 5336, 5337, 5338, 5339, 5340, 5341, 5342, 5343, 5344, 5345, 5346, 5347, 5348, 5349, 5350, 5351, 5352, 5353, 5354, 5355, 5356, 5357, 5358, 5359, 5360, 5361, 5362, 5363, 5364, 5365, 5366, 5367, 5368, 5369, 5370, 5371, 5372, 5373, 5374, 5375, 5376, 5377, 5378, 5379, 5380, 5381, 5382, 5383, 5384, 5385, 5386, 5387, 5388, 5389, 5390, 5391, 5392, 5393, 5394, 5395, 5396, 5397, 5398, 5399, 5400, 5401, 5402, 5419, 5420, 5421, 5426, 5427, 5428, 5429, 5438, 5447, 5448, 5449, 5450, 5451, 5452, 5453, 5454, 5455, 5456, 5457, 5458, 5459, 5460, 5461, 5462, 5463, 5464, 5465, 5469, 5470, 5477, 5478, 5479, 5480, 5481, 5482, 5490, 5491, 5492, 5493, 5494, 5495, 5496, 5497, 5498, 5499, 5504, 5505, 5506, 5507, 5508, 5509, 5510, 5511, 5512, 5513, 5514, 5515, 5516, 5517, 5518, 5519, 5520, 5521, 5522, 5523, 5524, 5525, 5526, 5527, 5528, 5529, 5530, 5531, 5532, 5533, 5534, 5535, 5536, 5548, 5549, 5551, 5552, 5553, 5554, 5555, 5556, 5557, 5558, 5559, 5560, 5561, 5562, 5563, 5564, 5565, 5566, 5567, 5568, 5569, 5570, 5571, 5577, 5578, 5579, 5580, 5590, 5591, 5592, 5593, 5594, 5595, 5596, 5605, 5606, 5607, 5608, 5609, 5610, 5611, 5616, 5617, 5618, 5619, 5620, 5621, 5622, 5623, 5631, 5632, 5633, 5638, 5639, 5640, 5671, 5672, 5673, 5674, 5675, 5676, 5677, 5678, 5679, 5680, 5681, 5688, 5689, 5690, 5691, 5692, 5693, 5694, 5695, 5696, 5697, 5698, 5699, 5700, 5701, 5702, 5703, 5708, 5709, 5710, 5711, 5712, 5713, 5714, 5715, 5716, 5717, 5727, 5740, 5741, 5743, 5744, 5745, 5746, 5747, 5748, 5749, 5750, 5751, 5755, 5757, 5758, 5759, 5760, 5761, 5762, 5763, 5764, 5765, 5766, 5767, 5768, 5769, 5770, 5772, 5773, 5775, 5776, 5777, 5778, 5779, 5780, 5783, 5784, 5785, 5786, 5787, 5788, 5789, 5790, 5791, 5792, 5793, 5794, 5795, 5796, 5797, 5798, 5799, 5800, 5801, 5802, 5803, 5811, 5812, 5813, 5814, 5821, 5822, 5823, 5824, 5825, 5826, 5827, 5828, 5829, 5830, 5831, 5833, 5834, 5836, 5837, 5838, 5839, 5848, 5849, 5850, 5851, 5852, 5853, 5854, 5855, 5864, 5865, 5866, 5867, 5868, 5875, 5876, 5877, 5878, 5880, 5881, 5882, 5883, 5884, 5885, 5886, 5887, 5888, 5889, 5890, 5891, 5892, 5893, 5894, 5895, 5896, 5897, 5898, 5899, 5907, 5908, 5909, 5911, 5912, 5913, 5914, 5915, 5916, 5917, 5918, 5919, 5920, 5921, 5922, 5929, 5950, 5951, 5952, 5953, 5954, 5955, 5956, 5963, 5967, 5969, 5970, 5982, 5983, 5984, 5985, 5986, 5987, 5988, 5997, 5998, 5999, 6000, 6001, 6002, 6068, 6069, 6070, 6071, 6072, 6074, 6075, 6076, 6077, 6078, 6080, 6081, 6082, 6083, 6084, 6085, 6086, 6087, 6088, 6089, 6090, 6091, 6092, 6093, 6094, 6095, 6096, 6097, 6098, 6100, 6101, 6102, 6103, 6105, 6106, 6107, 6108, 6109, 6110, 6111, 6112, 6113, 6114, 6115, 6116, 6117, 6118, 6119, 6120, 6121, 6122, 6123, 6124, 6128, 6130, 6142, 6143, 6144, 6145, 6146, 6147, 6148, 6149, 6151, 6152, 6153, 6154, 6155, 6156, 6157, 6169, 6170, 6171, 6172, 6173, 6174, 6175, 6176, 6177, 6178, 6179, 6180, 6181, 6182, 6185, 6186, 6187, 6191, 6208, 6209, 6231, 6232, 6233, 6234, 6235, 6236, 6237, 6238, 6239, 6251, 6256, 6257, 6258, 6259, 6260, 6261, 6262, 6278, 6279, 6280, 6281, 6282, 6286, 6287, 6288, 6289, 6290, 6298, 6299, 6300, 6301, 6302, 6303, 6304, 6305, 6306, 6307, 6308, 6309, 6310, 6311, 6312, 6313, 6314, 6315, 6356, 6357, 6358, 6378, 6379, 6387, 6388, 6389, 6390, 6391, 6392, 6393, 6394, 6395, 6396, 6397, 6398, 6399, 6400, 6401, 6402, 6403, 6405, 6406, 6407, 6451, 6452, 6453, 6497, 6498, 6499, 6500, 6501, 6502, 6503, 6509, 6510, 6511, 6512, 6514, 6519, 6520, 6521, 6522, 6523, 6549, 6550, 6551, 6552, 6553, 6554, 6555, 6556, 6557, 6558, 6588, 6589, 6599, 6600, 6601, 6602, 6603, 6604, 6605, 6606, 6611, 6612, 6613, 6614, 6615, 6616, 6617, 6618, 6619, 6620, 6621, 6622, 6623, 6624, 6625, 6626, 6627, 6628, 6629, 6630, 6631, 6632, 6633, 6634, 6638, 6639, 6640, 6641, 6642, 6643, 6644, 6658, 6684, 6685, 6686, 6697, 6698, 6699, 6700, 6701, 6702, 6703, 6704, 6705, 6706, 6707, 6708, 6709, 6710, 6719, 6721, 6723, 6724, 6754, 6755, 6756, 6757, 6758, 6759, 6760, 6761, 6762, 6763, 6764, 6796, 6797, 6798, 6799, 6800, 6805, 6806, 6807, 6808, 6809, 6814, 6815, 6816, 6817, 6818, 6824, 6825, 6826, 6831, 6832, 6833, 6834, 6853, 6854, 6855, 6856, 6857, 6860, 6861, 6862, 6863, 6864, 6865, 6866, 6867, 6868, 6869, 6872, 6873, 6875, 6876, 6877, 6878, 6879, 6885, 6888, 6889, 6890, 6891, 6892, 6893, 6894, 6895, 6896, 6897, 6898, 6899, 6900, 6901, 6902, 6903, 6904, 6905, 6906, 6907, 6908, 6909, 6910, 6911, 6912, 6913, 6914, 6915, 6916, 6917, 6918, 6919, 6920, 6921, 6922, 6923, 6924, 6925, 6926, 6927, 6928, 6929, 6930, 6931, 6932, 6933, 6934, 6935, 6936, 6953, 6954, 6955, 6957, 6958, 6959, 6960, 6962, 6963, 6964, 6965, 6966, 6967, 6968, 6969, 6970, 6971, 6972, 6973, 6983, 6984, 6985, 6988, 6989, 6990, 6991, 6992, 6993, 6994, 6995, 7007, 7008, 7009, 7010, 7011, 7012, 7015, 7016, 7017, 7018, 7019, 7020, 7021, 7034, 7035, 7084, 7086, 7087, 7088, 7089, 7090, 7091, 7092, 7128, 7137, 7138, 7139, 7140, 7141, 7142, 7143, 7144, 7145, 7146, 7147, 7148, 7149, 7150, 7151, 7152, 7153, 7154, 7155, 7195, 7196, 7197, 7198, 7200, 7201, 7202, 7203, 7204, 7205, 7206, 7207, 7208, 7209, 7210, 7211, 7212, 7213, 7214, 7215, 7216, 7217, 7218, 7219, 7220, 7221, 7222, 7223, 7224, 7225, 7226, 7227, 7228, 7229, 7230, 7231, 7232, 7233, 7234, 7235, 7236, 7237, 7238, 7239, 7240, 7241, 7243, 7244, 7245, 7246, 7247, 7248, 7249, 7250, 7251, 7252, 7253, 7254, 7255, 7256, 7257, 7258, 7259, 7260, 7261, 7262, 7263, 7264, 7265, 7266, 7267, 7268, 7269, 7270, 7271, 7291, 7292, 7293, 7294, 7295, 7296, 7297, 7298, 7305, 7306, 7307, 7308, 7309, 7310, 7311, 7312, 7313, 7314, 7315, 7316, 7317, 7347, 7348, 7349, 7358, 7359, 7360, 7361, 7362, 7363, 7364, 7365, 7372, 7373, 7374, 7375, 7376, 7377, 7378, 7383, 7415, 7416, 7417, 7438, 7471, 7472, 7473, 7474, 7475, 7476, 7477, 7490, 7496, 7497, 7498, 7499, 7500, 7501, 7502, 7503, 7504, 7505, 7506, 7507, 7508, 7509, 7510, 7511, 7512, 7513, 7514, 7515, 7532, 7533, 7534, 7535, 7537, 7538, 7539, 7540, 7541, 7542, 7543, 7544, 7545, 7546, 7547, 7548, 7549, 7550, 7551, 7552, 7553, 7554, 7555, 7556, 7557, 7558, 7559, 7560, 7585, 7586, 7587, 7588, 7589, 7590, 7591, 7592, 7593, 7594, 7595, 7596, 7597, 7599, 7600, 7601, 7617, 7618, 7619, 7620, 7621, 7622, 7623, 7638, 7668, 7669, 7670, 7672, 7673, 7674, 7675, 7676, 7685, 7687, 7694, 7695, 7696, 7717, 7718, 7719, 7720, 7721, 7722, 7723, 7724, 7725, 7726, 7727, 7728, 7729, 7730, 7731, 7732, 7733, 7734, 7735, 7736, 7737, 7738, 7739, 7740, 7741, 7742, 7743, 7744, 7746, 7747, 7748, 7749, 7750, 7751, 7752, 7757, 7758, 7759, 7760, 7761, 7762, 7763, 7764, 7765, 7766, 7767, 7768, 7796, 7797, 7805, 7813, 7814, 7815, 7816, 7817, 7818, 7819, 7820, 7821, 7822, 7848, 7849, 7850, 7851, 7852, 7853, 7854, 7859, 7860, 7861, 7862, 7863, 7864, 7865, 7866, 7867, 7869, 7870, 7874, 7875, 7917, 7918, 7919, 7925, 7926, 7927, 7928, 7929, 7941, 7942, 7943, 7944, 7945, 7946, 7947, 7948, 7949, 7950, 7951, 7952, 7953, 7955, 7956, 7957, 7958, 7959, 7960, 7961, 7962, 7963, 7964, 7965, 7966, 7967, 7968, 7969, 7970, 7971, 7972, 7974, 7975, 7976, 7977, 7978, 7979, 7980, 7981, 7982, 7983, 7984, 7985, 7986, 7987, 7988, 7989, 7990, 7991, 7992, 7993, 7994, 7995, 7996, 7997, 7998, 7999, 8000, 8011, 8012, 8013, 8014, 8015, 8016, 8017, 8018, 8019, 8020, 8021, 8022, 8023, 8024, 8025, 8026, 8027, 8028, 8029, 8030, 8048, 8049, 8050, 8051, 8052, 8053, 8054, 8055, 8056, 8057, 8087, 8088, 8089, 8090, 8091, 8092, 8095, 8096, 8097, 8098, 8099, 8100, 8101, 8102, 8103, 8104, 8105, 8106, 8107, 8110, 8111, 8112, 8113, 8114, 8115, 8116, 8117, 8118, 8119, 8120, 8121, 8122, 8123, 8124, 8125, 8126, 8127, 8130, 8131, 8132, 8133, 8134, 8135, 8136, 8144, 8145, 8166, 8169, 8170, 8171, 8172, 8173, 8174, 8175, 8176, 8177, 8178, 8179, 8180, 8181, 8182, 8188, 8191, 8192, 8193, 8194, 8195, 8196, 8197, 8198, 8199, 8200, 8201, 8209, 8210, 8211, 8212, 8215, 8227, 8230, 8231, 8232, 8233, 8234, 8235, 8236, 8237, 8238, 8239, 8240, 8241, 8242, 8243, 8244, 8245, 8246, 8247, 8248, 8249, 8250, 8251, 8260, 8261, 8262, 8263, 8299, 8302, 8303, 8304, 8305, 8306, 8353, 8354, 8355, 8356, 8357, 8358, 8359, 8360, 8361, 8375, 8376, 8377, 8378, 8379, 8380, 8381, 8382, 8410, 8411, 8412, 8440, 8459, 8460, 8461, 8462, 8463, 8474, 8475, 8476, 8477, 8478, 8508, 8509, 8510, 8511, 8512, 8514, 8515, 8546, 8547, 8548, 8549, 8550, 8551, 8552, 8553, 8554, 8555, 8570, 8571, 8572, 8573, 8574, 8575, 8576, 8577, 8578, 8579, 8580, 8581, 8586, 8587, 8593, 8594, 8595, 8596, 8597, 8601, 8602, 8603, 8604, 8605, 8615, 8617, 8618, 8655, 8686, 8709, 8712, 8713, 8714, 8715, 8716, 8717, 8718, 8719, 8720, 8721, 8722, 8723, 8724, 8725, 8726, 8727, 8728, 8729, 8730, 8731, 8732, 8733, 8734, 8770, 8771, 8788, 8789, 8790, 8791, 8792, 8793, 8794, 8795, 8796, 8797, 8798, 8799, 8800, 8801, 8802, 8803, 8804, 8805, 8806, 8810, 8811, 8817, 8818, 8819, 8820, 8821, 8822, 8823, 8829, 8830, 8837, 8838, 8839, 8840, 8841, 8848, 8849, 8850, 8851, 8854, 8855, 8856, 8857, 8858, 8859, 8860, 8861, 8862, 8863, 8864, 8865, 8867, 8868, 8872, 8873, 8874, 8875, 8876, 8878, 8879, 8880, 8881, 8882, 8883, 8884, 8885, 8886, 8887, 8888, 8889, 8890, 8891, 8892, 8893, 8894, 8895, 8896, 8897, 8898, 8899, 8900, 8901, 8902, 8903, 8904, 8906, 8913, 8914, 8915, 8916, 8917, 8918, 8919, 8920, 8921, 8925, 8926, 8927, 8928, 8933, 8934, 8935, 8936, 8937, 8938, 8939, 8940, 8941, 8942, 8943, 8944, 8945, 8946, 8947, 8948, 8949, 8950, 8951, 8954, 8955, 8956, 8992, 8993, 8994, 8995, 8996, 8997, 8998, 8999, 9000, 9001, 9002, 9003, 9010, 9011, 9012, 9013, 9014, 9018, 9019, 9020, 9021, 9022, 9023, 9024, 9025, 9026, 9027, 9028, 9029, 9030, 9031, 9041, 9042, 9043, 9044, 9045, 9046, 9047, 9048, 9049, 9050, 9051, 9052, 9053, 9054, 9055, 9056, 9057, 9058, 9059, 9065, 9066, 9087, 9088, 9091, 9092, 9093, 9094, 9095, 9096, 9097, 9098, 9103, 9104, 9105, 9106, 9107, 9108, 9109, 9110, 9123, 9124, 9125, 9126, 9127, 9128, 9129, 9130, 9131, 9133, 9134, 9135, 9136, 9137, 9145, 9146, 9147, 9148, 9149, 9150, 9151, 9160, 9161, 9162, 9163, 9201, 9203.

### Breast Cancer

[0725] Breast cancer forms in the tissues of the breast, of both men and women, such as, but not limited to, the ducts and the lobules. The most common type of breast cancer is ductal carcinoma which begins in the cells of the ducts. Lobular cancer, which begins in the lobes or lobules, is often found in both breasts. An uncommon type of breast cancer, inflammatory breast cancer, causes the breast to be warm, red and swollen. Hereditary breast cancer makes up approximately 5-10% of all breast cancer and altered genes are common in some ethnic groups making that ethnic group more susceptible to breast cancer. Symptoms of breast cancer include, but are not limited to, a lumpm or thickening in or near the breast or in the underarm area, change in the size or shape of the breast, dimple or puckering in the skin of the breast, inward turned nipple of the breast, fluid from the nipple which is not breast milk, scaly, red or swollen skin on the breast, nipple, or areola, and dimples in the breast that look like the skin of orange (peau d'orange).

[0726] In one embodiment, the oncology-related polynucleotides, oncology-related primary constructs or oncology-related mmRNA of the present invention may be used to treat a disease, disorder and/or condition in a subject who has been diagnosed or may be diagnosed with breast cancer by administering to said subject an isolated polynucleotide encoding an oncology-related polypeptide of interest. In one embodiment, the oncology-related polynucleotides, oncology-related primary constructs or oncology-related mmRNA of the present invention may be used to reduce, eliminate, or prevent tumor growth in a subject who has been diagnosed or may be diagnosed with breast cancer by administering to said subject an isolated polynucleotide encoding an oncology-related polypeptide of interest. In one embodiment, the oncology-related polynucleotides, oncology-related primary constructs or oncology-related mmRNA of the present invention may be used to reduce and/or ameliorate at least one symptom of cancer in a subject who has been diagnosed or may be diagnosed with breast cancer by administering to said subject an isolated polynucleotide encoding an oncology-related polypeptide of interest. In a further embodiment, the oncology-related polypeptide of interest may include, but not limited to, SEQ ID NOs: 4711, 4712, 4713, 4714, 4715, 4716, 4717, 4718, 4719, 4720, 4721, 4722, 4723, 4724, 4725, 4726, 4727, 4728, 4742, 4743, 4744, 4745, 4746, 4747, 4748, 4749, 4750, 4751, 4753, 4756, 4757, 4758, 4759, 4761, 4762, 4776, 4777, 4778, 4779, 4780, 4781, 4782, 4783, 4784, 4785, 4786, 4787, 4788, 4789, 4790, 4825, 4826, 4827, 4828, 4829, 4830, 4832, 4835, 4836, 4854, 4855, 4856, 4857, 4858, 4859, 4860, 4861, 4863, 4864, 4865, 4866, 4867, 4868, 4869, 4870, 4871, 4872, 4873, 4885, 4886, 4887, 4888, 4889, 4890, 4891, 4892, 4893, 4894, 4911, 4912, 4913, 4914, 4915, 4916, 4917, 4918, 4919, 4920, 4946, 4947, 4948, 4949, 4950, 4958, 4959, 4960, 4961, 4962, 4963, 4964, 4965, 4966, 4967, 4968, 4969, 4970, 4971, 4972, 4973, 4974, 4975, 4976, 4977, 4978, 4979, 4980, 4981, 4982, 4983, 4984, 4985, 4986, 4987, 4988, 4989, 4990, 4991, 4992, 4993, 4994, 4995, 4996, 4997, 4998, 4999, 5000, 5001, 5002, 5008, 5009, 5010, 5011, 5012, 5013, 5014, 5015, 5016, 5017, 5018, 5019, 5020, 5021, 5022, 5023, 5024, 5025, 5026, 5027, 5028, 5030, 5031, 5032, 5033, 5034, 5035, 5036, 5037, 5038, 5039, 5040, 5041, 5042, 5043, 5044, 5045, 5046, 5047, 5048, 5049, 5050, 5051, 5052, 5053, 5054, 5055, 5056, 5057, 5058, 5059, 5060, 5061, 5062, 5063, 5064, 5065, 5066, 5067, 5068, 5069, 5070, 5071, 5072, 5073, 5074, 5075, 5076, 5077, 5078, 5079, 5103, 5104, 5105, 5106, 5107, 5108, 5109, 5110, 5118, 5119, 5120, 5121, 5122, 5123, 5124, 5125, 5126, 5127, 5128, 5129, 5130, 5131, 5132, 5133, 5134, 5135, 5136, 5137, 5138, 5139, 5140, 5141, 5142, 5143, 5144, 5145, 5146, 5147, 5148, 5149, 5150, 5151, 5152, 5153, 5154, 5155, 5156, 5157, 5158, 5159, 5160, 5161, 5162, 5163, 5164, 5165, 5166, 5167, 5168, 5169, 5170, 5171, 5172, 5173, 5174, 5175, 5176, 5177, 5178, 5182, 5183, 5184, 5185, 5186, 5187, 5188, 5189, 5190, 5191, 5192, 5193, 5194, 5195, 5196, 5197, 5198, 5199, 5200, 5201, 5202, 5203, 5204, 5205, 5206, 5207, 5208, 5209, 5210, 5211, 5212, 5213, 5214, 5215, 5216, 5217, 5218, 5219, 5220, 5221, 5222, 5223, 5230, 5231, 5252, 5253, 5254, 5255, 5256, 5257, 5258, 5259, 5260, 5261, 5262, 5263, 5264, 5265, 5266, 5267, 5268, 5269, 5270, 5271, 5282, 5291, 5292, 5293, 5294, 5295, 5296, 5297, 5298, 5299, 5300, 5301, 5302, 5303, 5304, 5305, 5306, 5307, 5308, 5309, 5310, 5311, 5312, 5313, 5314, 5315, 5316, 5317, 5318, 5319, 5320, 5321, 5322, 5323, 5324, 5325, 5326, 5327, 5328, 5329, 5330, 5331, 5332, 5333, 5334, 5335, 5336, 5337, 5338, 5339, 5340, 5341, 5342, 5343, 5344, 5345, 5346, 5347, 5348, 5349, 5350, 5351, 5352, 5353, 5354, 5355, 5356, 5357, 5358, 5359, 5360, 5361, 5362, 5363, 5364, 5365, 5366, 5367, 5368, 5369, 5370, 5371, 5372, 5373, 5374, 5375, 5376, 5377, 5378, 5379, 5380, 5381, 5382, 5383, 5384, 5385, 5386, 5387, 5388, 5389, 5390, 5391, 5392, 5393, 5419, 5420, 5421, 5426, 5427, 5428, 5429, 5438, 5447, 5448, 5449, 5450, 5451, 5452, 5453, 5454, 5455, 5456, 5457, 5458, 5459, 5460, 5461, 5462, 5463, 5464, 5465, 5469, 5470, 5477, 5478, 5479, 5480, 5481, 5482, 5490, 5491, 5492, 5493, 5494, 5495, 5496, 5497, 5498, 5499, 5504, 5505, 5506, 5507, 5508, 5509, 5510, 5511, 5512, 5513, 5514, 5515, 5516, 5517, 5518, 5519, 5520, 5521, 5522, 5523, 5524, 5525, 5526, 5527, 5528, 5529, 5530, 5531, 5532, 5533, 5534, 5535, 5536, 5548, 5549, 5551, 5552, 5553, 5554, 5555, 5556, 5557, 5558, 5559, 5560, 5561, 5562, 5563, 5564, 5565, 5566, 5567, 5568, 5569, 5570, 5571, 5577, 5578, 5579, 5580, 5590, 5591, 5592, 5593, 5594, 5595, 5596, 5605, 5606, 5607, 5608, 5609, 5610, 5611, 5616, 5617, 5618, 5619, 5620, 5621, 5622, 5623, 5631, 5632, 5633, 5638, 5639, 5640, 5660, 5661, 5662, 5663, 5664, 5665, 5671, 5672, 5673, 5674, 5675, 5676, 5677, 5678, 5679, 5680, 5681, 5688, 5689, 5690, 5691, 5692, 5693, 5694, 5695, 5696, 5697, 5698, 5699, 5700, 5701, 5702, 5703, 5704, 5705, 5706, 5707, 5708, 5709, 5710, 5711, 5712, 5713, 5714, 5715, 5716, 5717, 5727, 5740, 5741, 5742, 5743, 5744, 5745, 5746, 5747, 5748, 5749, 5750, 5751, 5752, 5753, 5754, 5755, 5757, 5758, 5759, 5760, 5761, 5762, 5763, 5764, 5765, 5766, 5767, 5768, 5769, 5770, 5772, 5773, 5775, 5776, 5777, 5778, 5779, 5780, 5781, 5782, 5783, 5784, 5785, 5786, 5787, 5788, 5789, 5790, 5791, 5792, 5793, 5794, 5795, 5796, 5797, 5798, 5799, 5800, 5801, 5802, 5803, 5806, 5807, 5808, 5809, 5810, 5811, 5812, 5813, 5814, 5821, 5822, 5823, 5824, 5825, 5826, 5827, 5828, 5829, 5830, 5831, 5832, 5833, 5834, 5836, 5837, 5838, 5839, 5848, 5849, 5850, 5851, 5852, 5853, 5854, 5855, 5864, 5865, 5866, 5867, 5868, 5875, 5876, 5877, 5878, 5880, 5881, 5882, 5883, 5884, 5885, 5886, 5887, 5888, 5889, 5890, 5891, 5892, 5893, 5894, 5895, 5896, 5897, 5898, 5899, 5907, 5908, 5909, 5911, 5912, 5913, 5914, 5915, 5916, 5917, 5918, 5919, 5920, 5921, 5922, 5929, 5950, 5951, 5952, 5953, 5954, 5955, 5956, 5963, 5967, 5969, 5970, 5982, 5983, 5984, 5985, 5986, 5987, 5988, 5997, 5998, 5999, 6000, 6001, 6002, 6068, 6069, 6070, 6071, 6072, 6074, 6075, 6076, 6077, 6078, 6080, 6081, 6082, 6083, 6084, 6085, 6086, 6087, 6088, 6089, 6090, 6091, 6092, 6093, 6094, 6095, 6096, 6097, 6098, 6100, 6101, 6102, 6103, 6105, 6106, 6107, 6108, 6109, 6110, 6111, 6112, 6113, 6114, 6115, 6116, 6117, 6118, 6119, 6120, 6121, 6122, 6123, 6124, 6128, 6130, 6142, 6143, 6144, 6145, 6146, 6147, 6148, 6149, 6151, 6152, 6153, 6154, 6155, 6156, 6157, 6169, 6170, 6171, 6172, 6173, 6174, 6175, 6176, 6177, 6178, 6179, 6180, 6181, 6182, 6185, 6186, 6187, 6191, 6208, 6209, 6231, 6232, 6233, 6234, 6235, 6236, 6237, 6238, 6239, 6251, 6256, 6257, 6258, 6259, 6260, 6261, 6262, 6278, 6279, 6280, 6281, 6282, 6283, 6284, 6286, 6287, 6288, 6289, 6290, 6298, 6299, 6300, 6301, 6302, 6303, 6304, 6305, 6306, 6307, 6308, 6309, 6310, 6311, 6312, 6313, 6314, 6315, 6327, 6328, 6329, 6333, 6334, 6335, 6336, 6337, 6338, 6339, 6340, 6356, 6357, 6358, 6378, 6379, 6387, 6388, 6389, 6390, 6391, 6392, 6393, 6394, 6395, 6396, 6397, 6398, 6399, 6400, 6401, 6402, 6403, 6405, 6406, 6407, 6451, 6452, 6453, 6497, 6498, 6499, 6500, 6501, 6502, 6503, 6509, 6510, 6511, 6512, 6514, 6519, 6520, 6521, 6522, 6523, 6524, 6525, 6549, 6550, 6551, 6552, 6553, 6554, 6555, 6556, 6557, 6558, 6588, 6589, 6599, 6600, 6601, 6602, 6603, 6604, 6605, 6606, 6611, 6612, 6613, 6614, 6615, 6616, 6617, 6618, 6619, 6620, 6621, 6622, 6623, 6624, 6625, 6626, 6627, 6628, 6629, 6630, 6631, 6632, 6633, 6634, 6638, 6639, 6640, 6641, 6642, 6643, 6644, 6684, 6685, 6686, 6697, 6698, 6699, 6700, 6701, 6718, 6719, 6721, 6723, 6724, 6737, 6738, 6739, 6740, 6741, 6742, 6743, 6747, 6748, 6749, 6750, 6751, 6752, 6754, 6755, 6756, 6757, 6758, 6759, 6760, 6761, 6762, 6763, 6764, 6796, 6797, 6798, 6799, 6800, 6805, 6806, 6807, 6808, 6809, 6814, 6815, 6816, 6817, 6818, 6824, 6825, 6826, 6831, 6832, 6833, 6834, 6853, 6854, 6855, 6856, 6857, 6860, 6861, 6862, 6863, 6864, 6865, 6866, 6867, 6868, 6869, 6870, 6871, 6872, 6873, 6875, 6876, 6877, 6878, 6879, 6885, 6888, 6889, 6890, 6891, 6892, 6893, 6894, 6895, 6896, 6897, 6898, 6899, 6900, 6901, 6902, 6903, 6904, 6905, 6906, 6907, 6908, 6909, 6910, 6911, 6912, 6913, 6914, 6915, 6916, 6917, 6918, 6919, 6920, 6921, 6922, 6923, 6924, 6925, 6926, 6927, 6928, 6929, 6930, 6931, 6932, 6933, 6934, 6935, 6936, 6953, 6954, 6955, 6957, 6958, 6959, 6960, 6962, 6963, 6964, 6965, 6966, 6967, 6968, 6969, 6970, 6971, 6972, 6973, 6983, 6984, 6985, 6988, 6989, 6990, 6991, 6992, 6993, 6994, 6995, 7007, 7008, 7009, 7010, 7011, 7012, 7015, 7016, 7017, 7018, 7019, 7020, 7021, 7027, 7028, 7029, 7030, 7034, 7035, 7045, 7046, 7047, 7048, 7049, 7050, 7051, 7052, 7053, 7054, 7055, 7056, 7057, 7058, 7059, 7060, 7084, 7086, 7087, 7088, 7089, 7090, 7091, 7092, 7093, 7094, 7095, 7096, 7097, 7098, 7099, 7100, 7101, 7102, 7103, 7104, 7105, 7106, 7125, 7126, 7127, 7128, 7129, 7130, 7131, 7132, 7133, 7134, 7135, 7136, 7137, 7138, 7139, 7140, 7141, 7142, 7143, 7144, 7145, 7146, 7147, 7148, 7149, 7150, 7151, 7152, 7153, 7154, 7155, 7195, 7196, 7197, 7198, 7200, 7201, 7202, 7203, 7204, 7205, 7206, 7207, 7208, 7209, 7210, 7211, 7212, 7213, 7214, 7215, 7216, 7217, 7218, 7219, 7220, 7221, 7222, 7223, 7224, 7225, 7226, 7227, 7228, 7229, 7230, 7231, 7232, 7233, 7234, 7235, 7236, 7237, 7238, 7239, 7240, 7241, 7243, 7244, 7245, 7246, 7247, 7248, 7249, 7250, 7251, 7252, 7253, 7254, 7255, 7256, 7257, 7258, 7259, 7260, 7261, 7262, 7263, 7264, 7265, 7266, 7267, 7268, 7269, 7270, 7271, 7291, 7292, 7293, 7294, 7295, 7296, 7297, 7298, 7347, 7348, 7349, 7358, 7359, 7360, 7361, 7362, 7363, 7364, 7365, 7368, 7369, 7370, 7371, 7372, 7373, 7374, 7375, 7376, 7377, 7378, 7380, 7383, 7415, 7416, 7417, 7438, 7443, 7444, 7445, 7446, 7447, 7448, 7449, 7450, 7451, 7452, 7453, 7454, 7455, 7456, 7457, 7471, 7472, 7473, 7474, 7475, 7476, 7477, 7484, 7490, 7496, 7497, 7498, 7499, 7500, 7501, 7502, 7503, 7504, 7505, 7506, 7507, 7508, 7509, 7510, 7511, 7512, 7513, 7514, 7515, 7532, 7533, 7534, 7535, 7537, 7538, 7539, 7540, 7541, 7542, 7543, 7544, 7545, 7546, 7547, 7548, 7549, 7550, 7551, 7552, 7553, 7554, 7555, 7556, 7557, 7558, 7559, 7560, 7585, 7586, 7587, 7588, 7589, 7590, 7591, 7592, 7593, 7595, 7596, 7597, 7599, 7600, 7601, 7617, 7618, 7619, 7620, 7621, 7622, 7623, 7638, 7668, 7669, 7670, 7672, 7673, 7674, 7675, 7676, 7685, 7687, 7694, 7695, 7696, 7717, 7718, 7719, 7720, 7721, 7722, 7723, 7724, 7725, 7726, 7727, 7728, 7729, 7730, 7731, 7732, 7733, 7734, 7735, 7736, 7737, 7738, 7739, 7740, 7741, 7742, 7743, 7744, 7746, 7747, 7748, 7749, 7750, 7751, 7752, 7757, 7758, 7759, 7760, 7761, 7762, 7763, 7764, 7765, 7766, 7767, 7768, 7796, 7797, 7798, 7799, 7800, 7801, 7802, 7803, 7804, 7805, 7813, 7814, 7815, 7816, 7817, 7818, 7819, 7820, 7821, 7822, 7848, 7849, 7850, 7851, 7852, 7853, 7854, 7859, 7860, 7861, 7862, 7863, 7864, 7865, 7866, 7867, 7869, 7870, 7874, 7875, 7917, 7918, 7919, 7925, 7926, 7927, 7928, 7929, 7941, 7942, 7943, 7944, 7945, 7946, 7947, 7948, 7949, 7950, 7951, 7952, 7953, 7955, 7956, 7957, 7958, 7959, 7960, 7961, 7962, 7963, 7964, 7965, 7966, 7967, 7968, 7969, 7970, 7971, 7972, 7974, 7975, 7976, 7977, 7978, 7979, 7980, 7981, 7982, 7983, 7984, 7985, 7986, 7987, 7988, 7989, 7990, 7991, 7992, 7993, 7994, 7995, 7996, 7997, 7998, 7999, 8000, 8011, 8012, 8013, 8014, 8015, 8016, 8017, 8018, 8019, 8020, 8021, 8022, 8023, 8024, 8025, 8026, 8027, 8028, 8029, 8030, 8048, 8049, 8050, 8051, 8052, 8053, 8054, 8055, 8056, 8057, 8087, 8088, 8089, 8090, 8091, 8092, 8095, 8096, 8097, 8098, 8099, 8100, 8101, 8102, 8103, 8104, 8105, 8106, 8107, 8110, 8111, 8112, 8113, 8114, 8115, 8116, 8117, 8118, 8119, 8120, 8121, 8122, 8123, 8124, 8125, 8126, 8127, 8130, 8131, 8132, 8133, 8134, 8135, 8136, 8144, 8145, 8166, 8169, 8170, 8171, 8172, 8173, 8174, 8175, 8176, 8177, 8178, 8179, 8180, 8181, 8182, 8183, 8184, 8185, 8186, 8187, 8188, 8191, 8192, 8193, 8194, 8195, 8196, 8197, 8198, 8199, 8200, 8201, 8209, 8210, 8211, 8212, 8215, 8227, 8230, 8231, 8232, 8233, 8234, 8235, 8236, 8237, 8238, 8239, 8240, 8241, 8242, 8243, 8244, 8245, 8246, 8247, 8248, 8249, 8250, 8251, 8260, 8261, 8262, 8263, 8299, 8302, 8303, 8304, 8305, 8306, 8313, 8314, 8353, 8354, 8355, 8356, 8357, 8358, 8359, 8360, 8361, 8375, 8376, 8377, 8378, 8379, 8380, 8381, 8382, 8410, 8411, 8412, 8440, 8459, 8460, 8461, 8462, 8463, 8474, 8475, 8476, 8477, 8478, 8504, 8505, 8506, 8508, 8509, 8510, 8511, 8512, 8514, 8515, 8546, 8547, 8548, 8549, 8550, 8551, 8552, 8553, 8554, 8555, 8568, 8569, 8570, 8571, 8572, 8573, 8574, 8575, 8576, 8577, 8578, 8579, 8580, 8581, 8586, 8587, 8593, 8594, 8595, 8596, 8597, 8601, 8602, 8603, 8604, 8605, 8615, 8617, 8618, 8655, 8686, 8709, 8712, 8713, 8714, 8715, 8716, 8717, 8718, 8719, 8720, 8721, 8722, 8723, 8724, 8725, 8726, 8727, 8728, 8729, 8730, 8731, 8732, 8733, 8734, 8770, 8771, 8788, 8789, 8790, 8791, 8792, 8793, 8794, 8795, 8796, 8797, 8798, 8799, 8800, 8801, 8802, 8803, 8804, 8805, 8806, 8810, 8811, 8817, 8818, 8819, 8820, 8821, 8822, 8823, 8829, 8830, 8835, 8836, 8837, 8838, 8839, 8840, 8841, 8848, 8849, 8850, 8851, 8854, 8855, 8856, 8857, 8858, 8859, 8860, 8861, 8862, 8863, 8864, 8865, 8867, 8868, 8872, 8873, 8874, 8875, 8876, 8878, 8879, 8880, 8881, 8882, 8883, 8884, 8885, 8886, 8887, 8888, 8889, 8890, 8891, 8892, 8893, 8894, 8895, 8896, 8897, 8898, 8899, 8900, 8901, 8902, 8903, 8904, 8905, 8906, 8913, 8914, 8915, 8916, 8917, 8918, 8919, 8920, 8921, 8925, 8926, 8927, 8928, 8933, 8934, 8935, 8936, 8937, 8938, 8939, 8940, 8941, 8942, 8943, 8944, 8945, 8946, 8947, 8948, 8949, 8950, 8951, 8954, 8955, 8956, 8992, 8993, 8994, 8995, 8996, 8997, 8998, 8999, 9000, 9001, 9002, 9003, 9010, 9011, 9012, 9013, 9014, 9018, 9019, 9020, 9021, 9022, 9023, 9024, 9025, 9026, 9027, 9028, 9029, 9030, 9031, 9036, 9037, 9038, 9039, 9040, 9041, 9042, 9043, 9044, 9045, 9046, 9047, 9048, 9049, 9050, 9051, 9052, 9053, 9054, 9055, 9056, 9057, 9058, 9059, 9065, 9066, 9087, 9088, 9091, 9092, 9093, 9094, 9095, 9096, 9097, 9098, 9099, 9100, 9101, 9102, 9103, 9104, 9105, 9106, 9107, 9108, 9109, 9110, 9123, 9124, 9125, 9126, 9127, 9128, 9129, 9130, 9131, 9133, 9134, 9135, 9136, 9137, 9145, 9146, 9147, 9148, 9149, 9150, 9151, 9160, 9161, 9162, 9163, 9201, 9203.

### Cervical Cancer

[0727] Cervical cancer forms in the tissues of the cervic and is usually slow-growing. The cause of cervical cancer usually related to the human papillomavirus (HPV) infection. Although cervical cancer may not not show any signs, possible symptoms may include, but are not limited to, vaginal bleeding, unusal vaginal discharge, pelvic pain and pain during sexual intercourse.

[0728] In one embodiment, the oncology-related polynucleotides, oncology-related primary constructs or oncology-related mmRNA of the present invention may be used to treat a disease, disorder and/or condition in a subject who has been diagnosed or may be diagnosed with cervical cancer by administering to said subject an isolated polynucleotide encoding an oncology-related polypeptide of interest. In one embodiment, the oncology-related polynucleotides, oncology-related primary constructs or oncology-related mmRNA of the present invention may be used to reduce, eliminate, or prevent tumor growth in a subject who has been diagnosed or may be diagnosed with cervical cancer by administering to said subject an isolated polynucleotide encoding an oncology-related polypeptide of interest. In one embodiment, the oncology-related polynucleotides, oncology-related primary constructs or oncology-related mmRNA of the present invention may be used to reduce and/or ameliorate at least one symptom of cancer in a subject who has been diagnosed or may be diagnosed with cervical cancer by administering to said subject an isolated polynucleotide encoding an oncology-related polypeptide of interest. In a further embodiment, the oncology-related polypeptide of interest may include, but not limited to, SEQ ID NOs: 4711, 4712, 4713, 4714, 4715, 4716, 4717, 4718, 4719, 4720, 4721, 4722, 4723, 4724, 4725, 4726, 4727, 4728, 4742, 4743, 4744, 4745, 4746, 4747, 4748, 4749, 4750, 4751, 4781, 4782, 4783, 4784, 4785, 4786, 4787, 4788, 4789, 4790, 4825, 4826, 4827, 4828, 4829, 4830, 4832, 4854, 4855, 4856, 4857, 4858, 4859, 4860, 4861, 4863, 4864, 4865, 4866, 4867, 4868, 4869, 4871, 4873, 4885, 4886, 4887, 4888, 4889, 4890, 4891, 4892, 4893, 4894, 4911, 4912, 4913, 4914, 4915, 4916, 4917, 4918, 4919, 4920, 4960, 4961, 4962, 4964, 4965, 4966, 4967, 4968, 4969, 4970, 4971, 4972, 4973, 4974, 4975, 4978, 4979, 4980, 4981, 4982, 4983, 4984, 4985, 4986, 4987, 4988, 4989, 4990, 4991, 4992, 4993, 4994, 4995, 4996, 4997, 4998, 4999, 5000, 5001, 5002, 5008, 5009, 5010, 5011, 5012, 5013, 5014, 5015, 5016, 5017, 5018, 5019, 5020, 5021, 5022, 5023, 5024, 5025, 5026, 5027, 5028, 5030, 5031, 5032, 5033, 5034, 5035, 5036, 5037, 5038, 5039, 5040, 5041, 5042, 5043, 5044, 5045, 5046, 5047, 5048, 5049, 5050, 5051, 5052, 5053, 5054, 5055, 5056, 5060, 5061, 5062, 5063, 5064, 5065, 5066, 5067, 5068, 5069, 5070, 5071, 5072, 5073, 5074, 5075, 5076, 5077, 5078, 5079, 5103, 5104, 5105, 5106, 5107, 5108, 5109, 5110, 5118, 5119, 5120, 5121, 5122, 5123, 5124, 5125, 5126, 5127, 5128, 5129, 5130, 5131, 5132, 5133, 5134, 5135, 5136, 5137, 5138, 5139, 5140, 5141, 5146, 5147, 5148, 5149, 5150, 5151, 5152, 5153, 5154, 5155, 5156, 5157, 5158, 5159, 5160, 5161, 5162, 5163, 5164, 5165, 5166, 5167, 5168, 5169, 5170, 5171, 5172, 5173, 5174, 5175, 5176, 5177, 5178, 5182, 5183, 5184, 5185, 5186, 5187, 5188, 5189, 5190, 5191, 5192, 5193, 5194, 5195, 5196, 5197, 5198, 5199, 5200, 5201, 5202, 5203, 5204, 5205, 5206, 5207, 5208, 5209, 5210, 5211, 5212, 5213, 5230, 5231, 5252, 5253, 5254, 5255, 5256, 5257, 5258, 5259, 5260, 5261, 5262, 5263, 5264, 5265, 5266, 5267, 5268, 5269, 5270, 5271, 5291, 5292, 5293, 5294, 5295, 5296, 5297, 5298, 5299, 5300, 5301, 5302, 5303, 5304, 5305, 5306, 5307, 5308, 5309, 5310, 5311, 5316, 5317, 5318, 5319, 5320, 5321, 5322, 5323, 5324, 5325, 5326, 5327, 5330, 5331, 5332, 5333, 5334, 5335, 5336, 5337, 5338, 5339, 5340, 5341, 5342, 5343, 5344, 5345, 5346, 5347, 5348, 5349, 5350, 5351, 5352, 5353, 5354, 5355, 5356, 5357, 5358, 5359, 5360, 5361, 5362, 5363, 5364, 5365, 5366, 5367, 5368, 5369, 5370, 5371, 5372, 5373, 5374, 5375, 5376, 5377, 5378, 5379, 5380, 5381, 5382, 5383, 5384, 5385, 5386, 5387, 5388, 5389, 5390, 5391, 5392, 5393, 5419, 5420, 5421, 5426, 5427, 5428, 5429, 5438, 5447, 5448, 5449, 5450, 5451, 5452, 5453, 5454, 5455, 5456, 5457, 5458, 5459, 5460, 5461, 5462, 5463, 5464, 5465, 5469, 5470, 5477, 5478, 5479, 5480, 5481, 5482, 5490, 5491, 5492, 5493, 5494, 5495, 5496, 5497, 5498, 5499, 5504, 5505, 5506, 5507, 5508, 5509, 5510, 5511, 5512, 5513, 5514, 5515, 5516, 5517, 5518, 5519, 5520, 5521, 5522, 5523, 5524, 5525, 5526, 5527, 5528, 5529, 5530, 5531, 5532, 5533, 5534, 5535, 5536, 5548, 5549, 5551, 5552, 5553, 5554, 5555, 5556, 5557, 5558, 5559, 5560, 5561, 5562, 5563, 5564, 5565, 5566, 5567, 5568, 5569, 5570, 5571, 5577, 5578, 5579, 5580, 5590, 5591, 5592, 5593, 5594, 5595, 5596, 5605, 5606, 5607, 5608, 5609, 5610, 5611, 5616, 5617, 5618, 5619, 5620, 5621, 5622, 5623, 5631, 5632, 5633, 5638, 5639, 5640, 5671, 5672, 5673, 5674, 5675, 5676, 5677, 5678, 5679, 5680, 5681, 5688, 5689, 5690, 5691, 5692, 5693, 5694, 5695, 5696, 5697, 5698, 5699, 5700, 5701, 5702, 5703, 5708, 5709, 5710, 5711, 5712, 5713, 5714, 5715, 5716, 5717, 5727, 5740, 5741, 5743, 5744, 5745, 5746, 5747, 5748, 5749, 5750, 5751, 5755, 5757, 5758, 5759, 5760, 5761, 5762, 5763, 5764, 5765, 5766, 5767, 5768, 5769, 5770, 5772, 5773, 5775, 5776, 5777, 5778, 5779, 5780, 5783, 5784, 5785, 5786, 5787, 5788, 5789, 5790, 5791, 5792, 5793, 5794, 5795, 5796, 5797, 5798, 5799, 5800, 5801, 5802, 5803, 5811, 5812, 5813, 5814, 5821, 5822, 5823, 5824, 5825, 5826, 5827, 5828, 5829, 5830, 5831, 5833, 5834, 5836, 5837, 5838, 5839, 5848, 5849, 5850, 5851, 5852, 5853, 5854, 5855, 5864, 5865, 5866, 5867, 5868, 5875, 5876, 5877, 5878, 5880, 5881, 5882, 5883, 5884, 5885, 5886, 5887, 5888, 5889, 5890, 5891, 5892, 5893, 5894, 5895, 5896, 5897, 5898, 5899, 5907, 5908, 5909, 5911, 5912, 5913, 5914, 5915, 5916, 5917, 5918, 5919, 5920, 5921, 5922, 5929, 5950, 5951, 5952, 5953, 5954, 5955, 5956, 5963, 5967, 5969, 5970, 5982, 5983, 5984, 5985, 5986, 5987, 5988, 5997, 5998, 5999, 6000, 6001, 6002, 6068, 6069, 6070, 6071, 6072, 6074, 6075, 6076, 6077, 6078, 6080, 6081, 6082, 6083, 6084, 6085, 6086, 6087, 6088, 6089, 6090, 6091, 6092, 6093, 6094, 6095, 6096, 6097, 6098, 6100, 6101, 6102, 6103, 6105, 6106, 6107, 6108, 6109, 6110, 6111, 6112, 6113, 6114, 6115, 6116, 6117, 6118, 6119, 6120, 6121, 6122, 6123, 6124, 6128, 6130, 6142, 6143, 6144, 6145, 6146, 6147, 6148, 6149, 6151, 6152, 6153, 6154, 6155, 6156, 6157, 6169, 6170, 6171, 6172, 6173, 6174, 6175, 6176, 6177, 6178, 6179, 6180, 6181, 6182, 6185, 6186, 6187, 6191, 6208, 6209, 6231, 6232, 6233, 6234, 6235, 6236, 6237, 6238, 6239, 6251, 6256, 6257, 6258, 6259, 6260, 6261, 6262, 6278, 6279, 6280, 6281, 6282, 6286, 6287, 6288, 6289, 6290, 6298, 6299, 6300, 6301, 6302, 6303, 6304, 6305, 6306, 6307, 6308, 6309, 6310, 6311, 6312, 6313, 6314, 6315, 6356, 6357, 6358, 6378, 6379, 6387, 6388, 6389, 6390, 6391, 6392, 6393, 6394, 6395, 6396, 6397, 6398, 6399, 6400, 6401, 6402, 6403, 6405, 6406, 6407, 6451, 6452, 6453, 6497, 6498, 6499, 6500, 6501, 6502, 6503, 6509, 6510, 6511, 6512, 6514, 6519, 6520, 6521, 6522, 6523, 6550, 6551, 6552, 6553, 6554, 6555, 6556, 6557, 6558, 6588, 6589, 6599, 6600, 6601, 6602, 6603, 6604, 6605, 6606, 6611, 6612, 6613, 6614, 6615, 6616, 6617, 6618, 6619, 6620, 6621, 6622, 6623, 6624, 6625, 6626, 6627, 6628, 6629, 6630, 6631, 6632, 6633, 6634, 6638, 6639, 6640, 6641, 6642, 6643, 6644, 6684, 6685, 6686, 6697, 6698, 6699, 6700, 6701, 6719, 6721, 6723, 6724, 6754, 6755, 6756, 6757, 6758, 6759, 6760, 6761, 6762, 6763, 6764, 6796, 6797, 6798, 6799, 6800, 6805, 6806, 6807, 6808, 6809, 6814, 6815, 6816, 6817, 6818, 6824, 6825, 6826, 6831, 6832, 6833, 6834, 6853, 6854, 6855, 6856, 6857, 6860, 6861, 6862, 6863, 6864, 6865, 6866, 6867, 6868, 6869, 6872, 6873, 6875, 6876, 6877, 6878, 6879, 6885, 6888, 6889, 6890, 6891, 6892, 6893, 6894, 6895, 6896, 6897, 6898, 6899, 6900, 6901, 6902, 6903, 6904, 6905, 6906, 6907, 6908, 6909, 6910, 6911, 6912, 6913, 6914, 6915, 6916, 6917, 6918, 6919, 6920, 6921, 6922, 6923, 6924, 6925, 6926, 6927, 6928, 6929, 6930, 6931, 6932, 6933, 6934, 6935, 6936, 6953, 6954, 6955, 6957, 6958, 6959, 6960, 6962, 6963, 6964, 6965, 6966, 6967, 6968, 6969, 6970, 6971, 6972, 6973, 6983, 6984, 6985, 6988, 6989, 6990, 6991, 6992, 6993, 6994, 6995, 7007, 7008, 7009, 7010, 7011, 7012, 7015, 7016, 7017, 7018, 7019, 7020, 7021, 7034, 7035, 7084, 7086, 7087, 7088, 7089, 7090, 7091, 7092, 7128, 7137, 7138, 7139, 7140, 7141, 7142, 7143, 7144, 7145, 7146, 7147, 7148, 7149, 7150, 7151, 7152, 7153, 7154, 7155, 7195, 7196, 7197, 7198, 7200, 7201, 7202, 7203, 7204, 7205, 7206, 7207, 7208, 7209, 7210, 7211, 7212, 7213, 7214, 7215, 7216, 7217, 7218, 7219, 7220, 7221, 7222, 7223, 7224, 7225, 7226, 7227, 7228, 7229, 7230, 7231, 7232, 7233, 7234, 7235, 7236, 7237, 7238, 7239, 7240, 7241, 7243, 7244, 7245, 7246, 7247, 7248, 7249, 7250, 7251, 7252, 7253, 7254, 7255, 7256, 7257, 7258, 7259, 7260, 7261, 7262, 7263, 7264, 7265, 7266, 7267, 7268, 7269, 7270, 7271, 7291, 7292, 7293, 7294, 7295, 7296, 7297, 7298, 7347, 7348, 7349, 7358, 7359, 7360, 7361, 7362, 7363, 7364, 7365, 7372, 7373, 7374, 7375, 7376, 7377, 7378, 7383, 7415, 7416, 7417, 7438, 7471, 7472, 7473, 7474, 7475, 7476, 7477, 7490, 7496, 7497, 7498, 7499, 7500, 7501, 7502, 7503, 7504, 7505, 7506, 7507, 7508, 7509, 7512, 7513, 7514, 7515, 7532, 7533, 7534, 7535, 7537, 7538, 7539, 7540, 7541, 7542, 7543, 7544, 7545, 7546, 7547, 7548, 7549, 7550, 7551, 7552, 7553, 7554, 7555, 7556, 7557, 7558, 7559, 7560, 7585, 7586, 7587, 7588, 7589, 7590, 7591, 7592, 7593, 7595, 7596, 7597, 7599, 7600, 7601, 7617, 7618, 7619, 7620, 7621, 7622, 7623, 7638, 7668, 7669, 7670, 7672, 7673, 7674, 7675, 7676, 7685, 7687, 7694, 7695, 7696, 7717, 7718, 7719, 7720, 7721, 7722, 7723, 7724, 7725, 7726, 7727, 7728, 7729, 7730, 7731, 7732, 7733, 7734, 7735, 7736, 7737, 7738, 7739, 7740, 7741, 7742, 7743, 7744, 7746, 7747, 7748, 7749, 7750, 7751, 7752, 7757, 7758, 7759, 7760, 7761, 7762, 7763, 7764, 7765, 7766, 7767, 7768, 7796, 7797, 7805, 7813, 7814, 7815, 7816, 7817, 7818, 7819, 7820, 7821, 7822, 7848, 7849, 7850, 7851, 7852, 7853, 7854, 7859, 7860, 7861, 7862, 7863, 7864, 7865, 7866, 7867, 7869, 7870, 7874, 7875, 7917, 7918, 7919, 7925, 7926, 7927, 7928, 7929, 7941, 7942, 7943, 7944, 7945, 7946, 7947, 7948, 7949, 7950, 7951, 7952, 7953, 7955, 7956, 7957, 7958, 7959, 7960, 7961, 7962, 7963, 7964, 7966, 7967, 7968, 7969, 7970, 7971, 7972, 7974, 7975, 7976, 7977, 7978, 7979, 7980, 7981, 7982, 7983, 7984, 7985, 7986, 7987, 7988, 7989, 7990, 7991, 7992, 7993, 7994, 7995, 7996, 7997, 7998, 7999, 8000, 8011, 8012, 8013, 8014, 8015, 8016, 8017, 8018, 8019, 8020, 8021, 8022, 8023, 8024, 8025, 8026, 8027, 8028, 8029, 8030, 8048, 8049, 8050, 8051, 8052, 8053, 8054, 8055, 8056, 8057, 8087, 8088, 8089, 8090, 8091, 8092, 8095, 8096, 8097, 8098, 8099, 8100, 8101, 8102, 8103, 8104, 8105, 8106, 8107, 8110, 8111, 8112, 8113, 8114, 8115, 8116, 8117, 8118, 8119, 8120, 8121, 8122, 8123, 8124, 8125, 8126, 8127, 8130, 8131, 8132, 8133, 8134, 8135, 8136, 8144, 8145, 8166, 8169, 8170, 8171, 8172, 8173, 8174, 8175, 8176, 8177, 8178, 8179, 8180, 8181, 8182, 8188, 8191, 8192, 8193, 8194, 8195, 8196, 8197, 8198, 8209, 8210, 8211, 8212, 8215, 8227, 8230, 8231, 8232, 8233, 8234, 8235, 8236, 8237, 8238, 8239, 8240, 8241, 8242, 8243, 8244, 8245, 8246, 8247, 8248, 8249, 8250, 8251, 8260, 8261, 8262, 8263, 8299, 8302, 8303, 8304, 8305, 8306, 8353, 8354, 8355, 8356, 8357, 8358, 8359, 8360, 8361, 8375, 8376, 8377, 8378, 8379, 8380, 8381, 8382, 8410, 8411, 8412, 8440, 8459, 8460, 8461, 8462, 8463, 8474, 8475, 8476, 8477, 8478, 8508, 8509, 8510, 8511, 8512, 8514, 8515, 8546, 8547, 8548, 8549, 8550, 8551, 8552, 8553, 8554, 8555, 8570, 8571, 8572, 8573, 8574, 8575, 8576, 8577, 8578, 8579, 8580, 8581, 8586, 8587, 8593, 8594, 8595, 8596, 8597, 8601, 8602, 8603, 8604, 8605, 8615, 8617, 8618, 8655, 8686, 8709, 8712, 8713, 8714, 8715, 8716, 8717, 8718, 8719, 8720, 8721, 8722, 8723, 8724, 8725, 8726, 8727, 8728, 8729, 8730, 8731, 8732, 8733, 8734, 8770, 8771, 8788, 8789, 8790, 8791, 8792, 8793, 8794, 8795, 8796, 8797, 8798, 8799, 8800, 8801, 8802, 8803, 8804, 8805, 8806, 8810, 8811, 8817, 8818, 8819, 8820, 8821, 8822, 8823, 8829, 8830, 8837, 8838, 8839, 8840, 8841, 8848, 8849, 8850, 8851, 8854, 8855, 8856, 8857, 8858, 8859, 8860, 8861, 8862, 8863, 8864, 8865, 8867, 8868, 8872, 8873, 8874, 8875, 8876, 8878, 8879, 8881, 8882, 8883, 8884, 8885, 8886, 8887, 8888, 8889, 8890, 8891, 8892, 8893, 8894, 8895, 8896, 8897, 8898, 8899, 8900, 8901, 8902, 8903, 8904, 8906, 8913, 8914, 8915, 8916, 8917, 8918, 8919, 8920, 8921, 8925, 8926, 8927, 8928, 8933, 8934, 8935, 8936, 8937, 8938, 8939, 8940, 8941, 8942, 8943, 8944, 8945, 8946, 8947, 8948, 8949, 8950, 8951, 8954, 8955, 8956, 8992, 8993, 8994, 8995, 8996, 8997, 8998, 8999, 9000, 9001, 9002, 9003, 9010, 9011, 9012, 9013, 9014, 9018, 9019, 9020, 9021, 9022, 9023, 9024, 9025, 9026, 9027, 9028, 9029, 9030, 9031, 9041, 9042, 9043, 9044, 9045, 9046, 9047, 9048, 9049, 9050, 9051, 9052, 9053, 9054, 9055, 9056, 9057, 9058, 9059, 9065, 9066, 9087, 9088, 9091, 9092, 9093, 9094, 9095, 9096, 9097, 9098, 9103, 9104, 9105, 9106, 9107, 9108, 9109, 9110, 9123, 9124, 9125, 9126, 9127, 9128, 9129, 9130, 9131, 9133, 9134, 9135, 9136, 9137, 9145, 9146, 9147, 9148, 9149, 9150, 9151, 9160, 9161, 9162, 9163, 9201, 9203.

### Esophageal Cancer

[0729] Esophageal cancer is cancer that forms in the tissues lining the esophagus. There are two common types of esophageal cancer which are named for the type of cells that become malignant. Squamous cell carcinoma is cancer that forms in the thin, flat cells lining the esophagus (also called epidermoid carcinoma). Cancer that begins in the glandular (secretory) cells which produce and release fluids such as mucus is called adneocarcinoma. Common symptoms associated with esophageal cancer include, but are not limited to, painful or difficult swallowing, weight loss, pain behind the breastbone, hoarseness and cough, and indigestion and heartburn.

[0730] In one embodiment, the oncology-related polynucleotides, oncology-related primary constructs or oncology-related mmRNA of the present invention may be used to treat a disease, disorder and/or condition in a subject who has been diagnosed or may be diagnosed with esophageal cancer by administering to said subject an isolated polynucleotide encoding an oncology-related polypeptide of interest. In one embodiment, the oncology-related polynucleotides, oncology-related primary constructs or oncology-related mmRNA of the present invention may be used to reduce, eliminate, or prevent tumor growth in a subject who has been diagnosed or may be diagnosed with esophageal cancer by administering to said subject an isolated polynucleotide encoding an oncology-related polypeptide of interest. In one embodiment, the oncology-related polynucleotides, oncology-related primary constructs or oncology-related mmRNA of the present invention may be used to reduce and/or ameliorate at least one symptom of cancer in a subject who has been diagnosed or may be diagnosed with esophageal cancer by administering to said subject an isolated polynucleotide encoding an oncology-related polypeptide of interest. In a further embodiment, the oncology-related polypeptide of interest may include, but not limited to, SEQ ID NOs: 4711, 4712, 4713, 4714, 4715, 4716, 4717, 4718, 4719, 4720, 4721, 4722, 4723, 4724, 4725, 4726, 4727, 4728, 4742, 4743, 4744, 4745, 4746, 4747, 4748, 4749, 4750, 4751, 4781, 4782, 4783, 4784, 4785, 4786, 4787, 4788, 4789, 4790, 4825, 4826, 4827, 4828, 4829, 4830, 4832, 4854, 4855, 4856, 4857, 4858, 4859, 4860, 4861, 4863, 4864, 4865, 4866, 4867, 4868, 4869, 4870, 4871, 4872, 4873, 4885, 4886, 4887, 4888, 4889, 4890, 4891, 4892, 4893, 4894, 4911, 4912, 4913, 4914, 4915, 4916, 4917, 4918, 4919, 4920, 4960, 4961, 4962, 4963, 4964, 4965, 4966, 4967, 4968, 4969, 4970, 4971, 4972, 4973, 4974, 4975, 4976, 4977, 4978, 4979, 4980, 4981, 4982, 4983, 4984, 4985, 4986, 4987, 4988, 4989, 4990, 4991, 4992, 4993, 4994, 4995, 4996, 4997, 4998, 4999, 5000, 5001, 5002, 5008, 5009, 5010, 5011, 5012, 5013, 5014, 5015, 5016, 5017, 5018, 5019, 5020, 5021, 5022, 5023, 5024, 5025, 5026, 5027, 5028, 5030, 5031, 5032, 5033, 5034, 5035, 5036, 5037, 5038, 5039, 5040, 5041, 5042, 5043, 5044, 5045, 5046, 5047, 5048, 5049, 5050, 5051, 5052, 5053, 5054, 5055, 5056, 5057, 5058, 5059, 5060, 5061, 5062, 5063, 5064, 5065, 5066, 5067, 5068, 5069, 5070, 5071, 5072, 5073, 5074, 5075, 5076, 5077, 5078, 5079, 5103, 5104, 5105, 5106, 5107, 5108, 5109, 5110, 5118, 5119, 5120, 5121, 5122, 5123, 5124, 5125, 5126, 5127, 5128, 5129, 5130, 5131, 5132, 5133, 5134, 5135, 5136, 5137, 5138, 5139, 5140, 5141, 5145, 5146, 5147, 5148, 5149, 5150, 5151, 5152, 5153, 5154, 5155, 5156, 5157, 5158, 5159, 5160, 5161, 5162, 5163, 5164, 5165, 5166, 5167, 5168, 5169, 5170, 5171, 5172, 5173, 5174, 5175, 5176, 5177, 5178, 5182, 5183, 5184, 5185, 5186, 5187, 5188, 5189, 5190, 5191, 5192, 5193, 5194, 5195, 5196, 5197, 5198, 5199, 5200, 5201, 5202, 5203, 5204, 5205, 5206, 5207, 5208, 5209, 5210, 5211, 5212, 5213, 5230, 5231, 5252, 5253, 5254, 5255, 5256, 5257, 5258, 5259, 5260, 5261, 5262, 5263, 5264, 5265, 5266, 5267, 5268, 5269, 5270, 5271, 5291, 5292, 5293, 5294, 5295, 5296, 5297, 5298, 5299, 5300, 5301, 5302, 5303, 5304, 5305, 5306, 5307, 5308, 5309, 5310, 5311, 5312, 5313, 5314, 5315, 5316, 5317, 5318, 5319, 5320, 5321, 5322, 5323, 5324, 5325, 5326, 5327, 5328, 5329, 5330, 5331, 5332, 5333, 5334, 5335, 5336, 5337, 5338, 5339, 5340, 5341, 5342, 5343, 5344, 5345, 5346, 5347, 5348, 5349, 5350, 5351, 5352, 5353, 5354, 5355, 5356, 5357, 5358, 5359, 5360, 5361, 5362, 5363, 5364, 5365, 5366, 5367, 5368, 5369, 5370, 5371, 5372, 5373, 5374, 5375, 5376, 5377, 5378, 5379, 5380, 5381, 5382, 5383, 5384, 5385, 5386, 5387, 5388, 5389, 5390, 5391, 5392, 5393, 5419, 5420, 5421, 5426, 5427, 5428, 5429, 5438, 5447, 5448, 5449, 5450, 5451, 5452, 5453, 5454, 5455, 5456, 5457, 5458, 5459, 5460, 5461, 5462, 5463, 5464, 5465, 5469, 5470, 5477, 5478, 5479, 5480, 5481, 5482, 5490, 5491, 5492, 5493, 5494, 5495, 5496, 5497, 5498, 5499, 5504, 5505, 5506, 5507, 5508, 5509, 5510, 5511, 5512, 5513, 5514, 5515, 5516, 5517, 5518, 5519, 5520, 5521, 5522, 5523, 5524, 5525, 5526, 5527, 5528, 5529, 5530, 5531, 5532, 5533, 5534, 5535, 5536, 5548, 5549, 5551, 5552, 5553, 5554, 5555, 5556, 5557, 5558, 5559, 5560, 5561, 5562, 5563, 5564, 5565, 5566, 5567, 5568, 5569, 5570, 5571, 5577, 5578, 5579, 5580, 5590, 5591, 5592, 5593, 5594, 5595, 5596, 5605, 5606, 5607, 5608, 5609, 5610, 5611, 5616, 5617, 5618, 5619, 5620, 5621, 5622, 5623, 5631, 5632, 5633, 5638, 5639, 5640, 5671, 5672, 5673, 5674, 5675, 5676, 5677, 5678, 5679, 5680, 5681, 5688, 5689, 5690, 5691, 5692, 5693, 5694, 5695, 5696, 5697, 5698, 5699, 5700, 5701, 5702, 5703, 5708, 5709, 5710, 5711, 5712, 5713, 5714, 5715, 5716, 5717, 5727, 5740, 5741, 5743, 5744, 5745, 5746, 5747, 5748, 5749, 5750, 5751, 5755, 5757, 5758, 5759, 5760, 5761, 5762, 5763, 5764, 5765, 5766, 5767, 5768, 5769, 5770, 5772, 5773, 5775, 5776, 5777, 5778, 5779, 5780, 5783, 5784, 5785, 5786, 5787, 5788, 5789, 5790, 5791, 5792, 5793, 5794, 5795, 5796, 5797, 5798, 5799, 5800, 5801, 5802, 5803, 5811, 5812, 5813, 5814, 5821, 5822, 5823, 5824, 5825, 5826, 5827, 5828, 5829, 5830, 5831, 5833, 5834, 5836, 5837, 5838, 5839, 5848, 5849, 5850, 5851, 5852, 5853, 5854, 5855, 5864, 5865, 5866, 5867, 5868, 5875, 5876, 5877, 5878, 5880, 5881, 5882, 5883, 5884, 5885, 5886, 5887, 5888, 5889, 5890, 5891, 5892, 5893, 5894, 5895, 5896, 5897, 5898, 5899, 5907, 5908, 5909, 5911, 5912, 5913, 5914, 5915, 5916, 5917, 5918, 5919, 5920, 5921, 5922, 5929, 5950, 5951, 5952, 5953, 5954, 5955, 5956, 5963, 5967, 5969, 5970, 5982, 5983, 5984, 5985, 5986, 5987, 5988, 5997, 5998, 5999, 6000, 6001, 6002, 6068, 6069, 6070, 6071, 6072, 6074, 6075, 6076, 6077, 6078, 6080, 6081, 6082, 6083, 6084, 6085, 6086, 6087, 6088, 6089, 6090, 6091, 6092, 6093, 6094, 6095, 6096, 6097, 6098, 6100, 6101, 6102, 6103, 6105, 6106, 6107, 6108, 6109, 6110, 6111, 6112, 6113, 6114, 6115, 6116, 6117, 6118, 6119, 6120, 6121, 6122, 6123, 6124, 6128, 6130, 6142, 6143, 6144, 6145, 6146, 6147, 6148, 6149, 6151, 6152, 6153, 6154, 6155, 6156, 6157, 6169, 6170, 6171, 6172, 6173, 6174, 6175, 6176, 6177, 6178, 6179, 6180, 6181, 6182, 6185, 6186, 6187, 6191, 6208, 6209, 6231, 6232, 6233, 6234, 6235, 6236, 6237, 6238, 6239, 6251, 6256, 6257, 6258, 6259, 6260, 6261, 6262, 6278, 6279, 6280, 6281, 6282, 6286, 6287, 6288, 6289, 6290, 6298, 6299, 6300, 6301, 6302, 6303, 6304, 6305, 6306, 6307, 6308, 6309, 6310, 6311, 6312, 6313, 6314, 6315, 6356, 6357, 6358, 6378, 6379, 6387, 6388, 6389, 6390, 6391, 6392, 6393, 6394, 6395, 6396, 6397, 6398, 6399, 6400, 6401, 6402, 6403, 6405, 6406, 6407, 6451, 6452, 6453, 6497, 6498, 6499, 6500, 6501, 6502, 6503, 6509, 6510, 6511, 6512, 6514, 6519, 6520, 6521, 6522, 6523, 6549, 6550, 6551, 6552, 6553, 6554, 6555, 6556, 6557, 6558, 6588, 6589, 6599, 6600, 6601, 6602, 6603, 6604, 6605, 6606, 6611, 6612, 6613, 6614, 6615, 6616, 6617, 6618, 6619, 6620, 6621, 6622, 6623, 6624, 6625, 6626, 6627, 6628, 6629, 6630, 6631, 6632, 6633, 6634, 6638, 6639, 6640, 6641, 6642, 6643, 6644, 6684, 6685, 6686, 6697, 6698, 6699, 6700, 6701, 6719, 6721, 6723, 6724, 6754, 6755, 6756, 6757, 6758, 6759, 6760, 6761, 6762, 6763, 6764, 6796, 6797, 6798, 6799, 6800, 6805, 6806, 6807, 6808, 6809, 6814, 6815, 6816, 6817, 6818, 6824, 6825, 6826, 6831, 6832, 6833, 6834, 6853, 6854, 6855, 6856, 6857, 6860, 6861, 6862, 6863, 6864, 6865, 6866, 6867, 6868, 6869, 6872, 6873, 6875, 6876, 6877, 6878, 6879, 6885, 6888, 6889, 6890, 6891, 6892, 6893, 6894, 6895, 6896, 6897, 6898, 6899, 6900, 6901, 6902, 6903, 6904, 6905, 6906, 6907, 6908, 6909, 6910, 6911, 6912, 6913, 6914, 6915, 6916, 6917, 6918, 6919, 6920, 6921, 6922, 6923, 6924, 6925, 6926, 6927, 6928, 6929, 6930, 6931, 6932, 6933, 6934, 6935, 6936, 6953, 6954, 6955, 6957, 6958, 6959, 6960, 6962, 6963, 6964, 6965, 6966, 6967, 6968, 6969, 6970, 6971, 6972, 6973, 6983, 6984, 6985, 6988, 6989, 6990, 6991, 6992, 6993, 6994, 6995, 7007, 7008, 7009, 7010, 7011, 7012, 7015, 7016, 7017, 7018, 7019, 7020, 7021, 7034, 7035, 7084, 7086, 7087, 7088, 7089, 7090, 7091, 7092, 7128, 7137, 7138, 7139, 7140, 7141, 7142, 7143, 7144, 7145, 7146, 7147, 7148, 7149, 7150, 7151, 7152, 7153, 7154, 7155, 7195, 7196, 7197, 7198, 7200, 7201, 7202, 7203, 7204, 7205, 7206, 7207, 7208, 7209, 7210, 7211, 7212, 7213, 7214, 7215, 7216, 7217, 7218, 7219, 7220, 7221, 7222, 7223, 7224, 7225, 7226, 7227, 7228, 7229, 7230, 7231, 7232, 7233, 7234, 7235, 7236, 7237, 7238, 7239, 7240, 7241, 7243, 7244, 7245, 7246, 7247, 7248, 7249, 7250, 7251, 7252, 7253, 7254, 7255, 7256, 7257, 7258, 7259, 7260, 7261, 7262, 7263, 7264, 7265, 7266, 7267, 7268, 7269, 7270, 7271, 7291, 7292, 7293, 7294, 7295, 7296, 7297, 7298, 7347, 7348, 7349, 7358, 7359, 7360, 7361, 7362, 7363, 7364, 7365, 7372, 7373, 7374, 7375, 7376, 7377, 7378, 7383, 7415, 7416, 7417, 7438, 7471, 7472, 7473, 7474, 7475, 7476, 7477, 7490, 7496, 7497, 7498, 7499, 7500, 7501, 7502, 7503, 7504, 7505, 7506, 7507, 7508, 7509, 7510, 7511, 7512, 7513, 7514, 7515, 7532, 7533, 7534, 7535, 7537, 7538, 7539, 7540, 7541, 7542, 7543, 7544, 7545, 7546, 7547, 7548, 7549, 7550, 7551, 7552, 7553, 7554, 7555, 7556, 7557, 7558, 7559, 7560, 7585, 7586, 7587, 7588, 7589, 7590, 7591, 7592, 7593, 7595, 7596, 7597, 7599, 7600, 7601, 7617, 7618, 7619, 7620, 7621, 7622, 7623, 7638, 7668, 7669, 7670, 7672, 7673, 7674, 7675, 7676, 7685, 7687, 7694, 7695, 7696, 7717, 7718, 7719, 7720, 7721, 7722, 7723, 7724, 7725, 7726, 7727, 7728, 7729, 7730, 7731, 7732, 7733, 7734, 7735, 7736, 7737, 7738, 7739, 7740, 7741, 7742, 7743, 7744, 7746, 7747, 7748, 7749, 7750, 7751, 7752, 7757, 7758, 7759, 7760, 7761, 7762, 7763, 7764, 7765, 7766, 7767, 7768, 7796, 7797, 7805, 7813, 7814, 7815, 7816, 7817, 7818, 7819, 7820, 7821, 7822, 7848, 7849, 7850, 7851, 7852, 7853, 7854, 7859, 7860, 7861, 7862, 7863, 7864, 7865, 7866, 7867, 7869, 7870, 7874, 7875, 7917, 7918, 7919, 7925, 7926, 7927, 7928, 7929, 7941, 7942, 7943, 7944, 7945, 7946, 7947, 7948, 7949, 7950, 7951, 7952, 7953, 7955, 7956, 7957, 7958, 7959, 7960, 7961, 7962, 7963, 7964, 7965, 7966, 7967, 7968, 7969, 7970, 7971, 7972, 7974, 7975, 7976, 7977, 7978, 7979, 7980, 7981, 7982, 7983, 7984, 7985, 7986, 7987, 7988, 7989, 7990, 7991, 7992, 7993, 7994, 7995, 7996, 7997, 7998, 7999, 8000, 8011, 8012, 8013, 8014, 8015, 8016, 8017, 8018, 8019, 8020, 8021, 8022, 8023, 8024, 8025, 8026, 8027, 8028, 8029, 8030, 8048, 8049, 8050, 8051, 8052, 8053, 8054, 8055, 8056, 8057, 8087, 8088, 8089, 8090, 8091, 8092, 8095, 8096, 8097, 8098, 8099, 8100, 8101, 8102, 8103, 8104, 8105, 8106, 8107, 8110, 8111, 8112, 8113, 8114, 8115, 8116, 8117, 8118, 8119, 8120, 8121, 8122, 8123, 8124, 8125, 8126, 8127, 8130, 8131, 8132, 8133, 8134, 8135, 8136, 8144, 8145, 8166, 8169, 8170, 8171, 8172, 8173, 8174, 8175, 8176, 8177, 8178, 8179, 8180, 8181, 8182, 8188, 8191, 8192, 8193, 8194, 8195, 8196, 8197, 8198, 8199, 8200, 8201, 8209, 8210, 8211, 8212, 8215, 8227, 8230, 8231, 8232, 8233, 8234, 8235, 8236, 8237, 8238, 8239, 8240, 8241, 8242, 8243, 8244, 8245, 8246, 8247, 8248, 8249, 8250, 8251, 8260, 8261, 8262, 8263, 8299, 8302, 8303, 8304, 8305, 8306, 8353, 8354, 8355, 8356, 8357, 8358, 8359, 8360, 8361, 8375, 8376, 8377, 8378, 8379, 8380, 8381, 8382, 8410, 8411, 8412, 8440, 8459, 8460, 8461, 8462, 8463, 8474, 8475, 8476, 8477, 8478, 8508, 8509, 8510, 8511, 8512, 8514, 8515, 8546, 8547, 8548, 8549, 8550, 8551, 8552, 8553, 8554, 8555, 8570, 8571, 8572, 8573, 8574, 8575, 8576, 8577, 8578, 8579, 8580, 8581, 8586, 8587, 8593, 8594, 8595, 8596, 8597, 8601, 8602, 8603, 8604, 8605, 8615, 8617, 8618, 8655, 8686, 8709, 8712, 8713, 8714, 8715, 8716, 8717, 8718, 8719, 8720, 8721, 8722, 8723, 8724, 8725, 8726, 8727, 8728, 8729, 8730, 8731, 8732, 8733, 8734, 8770, 8771, 8788, 8789, 8790, 8791, 8792, 8793, 8794, 8795, 8796, 8797, 8798, 8799, 8800, 8801, 8802, 8803, 8804, 8805, 8806, 8810, 8811, 8817, 8818, 8819, 8820, 8821, 8822, 8823, 8829, 8830, 8837, 8838, 8839, 8840, 8841, 8848, 8849, 8850, 8851, 8854, 8855, 8856, 8857, 8858, 8859, 8860, 8861, 8862, 8863, 8864, 8865, 8867, 8868, 8872, 8873, 8874, 8875, 8876, 8878, 8879, 8880, 8881, 8882, 8883, 8884, 8885, 8886, 8887, 8888, 8889, 8890, 8891, 8892, 8893, 8894, 8895, 8896, 8897, 8898, 8899, 8900, 8901, 8902, 8903, 8904, 8906, 8913, 8914, 8915, 8916, 8917, 8918, 8919, 8920, 8921, 8925, 8926, 8927, 8928, 8933, 8934, 8935, 8936, 8937, 8938, 8939, 8940, 8941, 8942, 8943, 8944, 8945, 8946, 8947, 8948, 8949, 8950, 8951, 8954, 8955, 8956, 8992, 8993, 8994, 8995, 8996, 8997, 8998, 8999, 9000, 9001, 9002, 9003, 9010, 9011, 9012, 9013, 9014, 9018, 9019, 9020, 9021, 9022, 9023, 9024, 9025, 9026, 9027, 9028, 9029, 9030, 9031, 9041, 9042, 9043, 9044, 9045, 9046, 9047, 9048, 9049, 9050, 9051, 9052, 9053, 9054, 9055, 9056, 9057, 9058, 9059, 9065, 9066, 9087, 9088, 9091, 9092, 9093, 9094, 9095, 9096, 9097, 9098, 9103, 9104, 9105, 9106, 9107, 9108, 9109, 9110, 9123, 9124, 9125, 9126, 9127, 9128, 9129, 9130, 9131, 9133, 9134, 9135, 9136, 9137, 9145, 9146, 9147, 9148, 9149, 9150, 9151, 9160, 9161, 9162, 9163, 9201, 9203.

### Familial Cancer Syndrome

[0731] Familial cancer syndrome describes the genetic predisposition of a subject to develop cancer. 5-10% of all cancers are hereditary and are passed on through specific in specific genes passed from one blood relative to another. Subjects that inherit one of these gene changes may have a higher likelihood of developing cancer within their lifetime. Familial cancer syndrome includes disorder such as, but not limited to, Ataxia Telangiectasia, Basal Cell Nevus Syndrome, Nevoid Basal Cell Carcinoma Syndrome, Gorlin Syndrome, Beck-with Wiedemann Syndrome, Birt-Hogg-Dube Syndrome, Bloom Syndrome, hereditary breast and/or ovarian cancer, Carney Complex, Types I and II, Familial Chordoma, Colon Cancer, Hereditary Nonpolyposis-Lynch Syndrome, Costello Syndrome, Facio-Cutaneous-Skeletal Syndrome, Cowden Syndrome, Dyskeratosis Congenita, Tylosis with Esophaeal Cancer, Keratosis Palmaris et Plantaris with Esophageal Cancer, Howel-Evans Syndrome, Herediatary Multiple Exostosis, Fanconi Anemia, Hereditary Diffuse Gastric Cancer, Gastrointestinal Stromal Tumor, Multiple Gastrointestinal Stromal Tumor, Familial Hyperparathyroidism, Acute Myeloid Leukemia, Familial Leukemia, Chronic Lymphocytic Leukemia, Li-Fraumeni Syndrome, Hodgkin Lymphoma, Non-Hodgkin Lymphoma, Hereditary Multiple Melanoma, Mosaic Varigated Aneuploidy, Multiple Endocrine Neoplasia Type I, Type 2A and 2B, Familial Medullary Thyroid Cancer, Familial Multiple Myeloma, Hereditary Neuroblastoma, Neurofibromatosis Type 1 and 2, Nijmegen Breakage Syndrome, Hereditary Pancreatic Cancer, Hereditary Paraganglioma, Peutz-Jeghers Syndrome, Familial Adenomatous Polyposis, Familial Juvenile Polyposis, MYH-Associated Polyposis, Hereditary Prostate Cancer, Hereditary Renal Cell Carcinoma with Multiple Cutaneous and Uterine Leiomyomas, Hereditary Renal Cell Carcinoma, Hereditary Papillary Renal Cell Carcinoma, Rhabdoid Predisposition Syndrome, Rothmund-Thomson Syndrome, Simpson-Golabi-Behmel Syndrome, Familial Testicular Germ Cell Tumor, Familial Non-medullary Thyroid Carcinoma, Tuberous Sclerosis Complex, von Hippel-Lindau Syndrome, Familial Waldenstrom Macroglobulinemia, Werner Syndrome, Familial Wilms Tumor and Xeroderma Pigmentosum.

[0732] In one embodiment, the oncology-related polynucleotides, oncology-related primary constructs or oncology-related mmRNA of the present invention may be used to treat a disease, disorder and/or condition in a subject who has been diagnosed or may be diagnosed with Familial cancer syndrome by administering to said subject an isolated polynucleotide encoding an oncology-related polypeptide of interest. In one embodiment, the oncology-related polynucleotides, oncology-related primary constructs or oncology-related mmRNA of the present invention may be used to reduce, eliminate, or prevent tumor growth in a subject who has been diagnosed or may be diagnosed with Familial cancer syndrome by administering to said subject an isolated polynucleotide encoding an oncology-related polypeptide of interest. In one embodiment, the oncology-related polynucleotides, oncology-related primary constructs or oncology-related mmRNA of the present invention may be used to reduce and/or ameliorate at least one symptom of cancer in a subject who has been diagnosed or may be diagnosed with Familial cancer syndrome by administering to said subject an isolated polynucleotide encoding an oncology-related polypeptide of interest. In a further embodiment, the oncology-related polypeptide of interest may include, but not limited to, SEQ ID NOs: 4704, 4705, 4706, 4707, 4708, 4709, 4710, 4711, 4712, 4713, 4714, 4715, 4716, 4717, 4718, 4719, 4720, 4721, 4722, 4723, 4724, 4725, 4726, 4727, 4728, 4729, 4730, 4731, 4732, 4733, 4734, 4735, 4736, 4737, 4738, 4739, 4740, 4741, 4742, 4743, 4744, 4745, 4746, 4747, 4748, 4749, 4750, 4751, 4752, 4753, 4754, 4755, 4756, 4757, 4758, 4759, 4760, 4761, 4762, 4763, 4764, 4765, 4766, 4767, 4768, 4769, 4770, 4771, 4772, 4773, 4774, 4775, 4776, 4777, 4778, 4779, 4780, 4781, 4782, 4783, 4784, 4785, 4786, 4787, 4788, 4789, 4790, 4791, 4792, 4793, 4794, 4795, 4796, 4797, 4798, 4799, 4800, 4801, 4802, 4803, 4804, 4805, 4806, 4807, 4808, 4809, 4810, 4811, 4812, 4813, 4814, 4815, 4816, 4817, 4818, 4819, 4820, 4821, 4822, 4823, 4824, 4825, 4826, 4827, 4828, 4829, 4830, 4831, 4832, 4833, 4834, 4835, 4836, 4837, 4838, 4839, 4840, 4841, 4842, 4843, 4844, 4845, 4846, 4847, 4848, 4849, 4850, 4851, 4852, 4853, 4854, 4855, 4856, 4857, 4858, 4859, 4860, 4861, 4862, 4863, 4864, 4865, 4866, 4867, 4868, 4869, 4870, 4871, 4872, 4873, 4874, 4875, 4876, 4877, 4878, 4879, 4880, 4881, 4882, 4883, 4884, 4885, 4886, 4887, 4888, 4889, 4890, 4891, 4892, 4893, 4894, 4895, 4896, 4897, 4898, 4899, 4900, 4901, 4902, 4903, 4904, 4905, 4906, 4907, 4908, 4909, 4910, 4911, 4912, 4913, 4914, 4915, 4916, 4917, 4918, 4919, 4920, 4921, 4922, 4923, 4924, 4925, 4926, 4927, 4928, 4929, 4930, 4931, 4932, 4933, 4934, 4935, 4936, 4937, 4938, 4939, 4940, 4941, 4942, 4943, 4944, 4945, 4946, 4947, 4948, 4949, 4950, 4951, 4952, 4953, 4954, 4955, 4956, 4957, 4958, 4959, 4960, 4961, 4962, 4963, 4964, 4965, 4966, 4967, 4968, 4969, 4970, 4971, 4972, 4973, 4974, 4975, 4976, 4977, 4978, 4979, 4980, 4981, 4982, 4983, 4984, 4985, 4986, 4987, 4988, 4989, 4990, 4991, 4992, 4993, 4994, 4995, 4996, 4997, 4998, 4999, 5000, 5001, 5002, 5003, 5004, 5005, 5006, 5007, 5008, 5009, 5010, 5011, 5012, 5013, 5014, 5015, 5016, 5017, 5018, 5019, 5020, 5021, 5022, 5023, 5024, 5025, 5026, 5027, 5028, 5029, 5030, 5031, 5032, 5033, 5034, 5035, 5036, 5037, 5038, 5039, 5040, 5041, 5042, 5043, 5044, 5045, 5046, 5047, 5048, 5049, 5050, 5051, 5052, 5053, 5054, 5055, 5056, 5057, 5058, 5059, 5060, 5061, 5062, 5063, 5064, 5065, 5066, 5067, 5068, 5069, 5070, 5071, 5072, 5073, 5074, 5075, 5076, 5077, 5078, 5079, 5080, 5081, 5082, 5083, 5084, 5085, 5086, 5087, 5088, 5089, 5090, 5091, 5092, 5093, 5094, 5095, 5096, 5097, 5098, 5099, 5100, 5101, 5102, 5103, 5104, 5105, 5106, 5107, 5108, 5109, 5110, 5111, 5112, 5113, 5114, 5115, 5116, 5117, 5118, 5119, 5120, 5121, 5122, 5123, 5124, 5125, 5126, 5127, 5128, 5129, 5130, 5131, 5132, 5133, 5134, 5135, 5136, 5137, 5138, 5139, 5140, 5141, 5142, 5143, 5144, 5145, 5146, 5147, 5148, 5149, 5150, 5151, 5152, 5153, 5154, 5155, 5156, 5157, 5158, 5159, 5160, 5161, 5162, 5163, 5164, 5165, 5166, 5167, 5168, 5169, 5170, 5171, 5172, 5173, 5174, 5175, 5176, 5177, 5178, 5179, 5180, 5181, 5182, 5183, 5184, 5185, 5186, 5187, 5188, 5189, 5190, 5191, 5192, 5193, 5194, 5195, 5196, 5197, 5198, 5199, 5200, 5201, 5202, 5203, 5204, 5205, 5206, 5207, 5208, 5209, 5210, 5211, 5212, 5213, 5214, 5215, 5216, 5217, 5218, 5219, 5220, 5221, 5222, 5223, 5224, 5225, 5226, 5227, 5228, 5229, 5230, 5231, 5232, 5233, 5234, 5235, 5236, 5237, 5238, 5239, 5240, 5241, 5242, 5243, 5244, 5245, 5246, 5247, 5248, 5249, 5250, 5251, 5252, 5253, 5254, 5255, 5256, 5257, 5258, 5259, 5260, 5261, 5262, 5263, 5264, 5265, 5266, 5267, 5268, 5269, 5270, 5271, 5272, 5273, 5274, 5275, 5276, 5277, 5278, 5279, 5280, 5281, 5282, 5283, 5284, 5285, 5286, 5287, 5288, 5289, 5290, 5291, 5292, 5293, 5294, 5295, 5296, 5297, 5298, 5299, 5300, 5301, 5302, 5303, 5304, 5305, 5306, 5307, 5308, 5309, 5310, 5311, 5312, 5313, 5314, 5315, 5316, 5317, 5318, 5319, 5320, 5321, 5322, 5323, 5324, 5325, 5326, 5327, 5328, 5329, 5330, 5331, 5332, 5333, 5334, 5335, 5336, 5337, 5338, 5339, 5340, 5341, 5342, 5343, 5344, 5345, 5346, 5347, 5348, 5349, 5350, 5351, 5352, 5353, 5354, 5355, 5356, 5357, 5358, 5359, 5360, 5361, 5362, 5363, 5364, 5365, 5366, 5367, 5368, 5369, 5370, 5371, 5372, 5373, 5374, 5375, 5376, 5377, 5378, 5379, 5380, 5381, 5382, 5383, 5384, 5385, 5386, 5387, 5388, 5389, 5390, 5391, 5392, 5393, 5394, 5395, 5396, 5397, 5398, 5399, 5400, 5401, 5402, 5403, 5404, 5405, 5406, 5407, 5408, 5409, 5410, 5411, 5412, 5413, 5414, 5415, 5416, 5417, 5418, 5419, 5420, 5421, 5422, 5423, 5424, 5425, 5426, 5427, 5428, 5429, 5430, 5431, 5432, 5433, 5434, 5435, 5436, 5437, 5438, 5439, 5440, 5441, 5442, 5443, 5444, 5445, 5446, 5447, 5448, 5449, 5450, 5451, 5452, 5453, 5454, 5455, 5456, 5457, 5458, 5459, 5460, 5461, 5462, 5463, 5464, 5465, 5466, 5467, 5468, 5469, 5470, 5471, 5472, 5473, 5474, 5475, 5476, 5477, 5478, 5479, 5480, 5481, 5482, 5483, 5484, 5485, 5486, 5487, 5488, 5489, 5490, 5491, 5492, 5493, 5494, 5495, 5496, 5497, 5498, 5499, 5500, 5501, 5502, 5503, 5504, 5505, 5506, 5507, 5508, 5509, 5510, 5511, 5512, 5513, 5514, 5515, 5516, 5517, 5518, 5519, 5520, 5521, 5522, 5523, 5524, 5525, 5526, 5527, 5528, 5529, 5530, 5531, 5532, 5533, 5534, 5535, 5536, 5537, 5538, 5539, 5540, 5541, 5542, 5543, 5544, 5545, 5546, 5547, 5548, 5549, 5550, 5551, 5552, 5553, 5554, 5555, 5556, 5557, 5558, 5559, 5560, 5561, 5562, 5563, 5564, 5565, 5566, 5567, 5568, 5569, 5570, 5571, 5572, 5573, 5574, 5575, 5576, 5577, 5578, 5579, 5580, 5581, 5582, 5583, 5584, 5585, 5586, 5587, 5588, 5589, 5590, 5591, 5592, 5593, 5594, 5595, 5596, 5597, 5598, 5599, 5600, 5601, 5602, 5603, 5604, 5605, 5606, 5607, 5608, 5609, 5610, 5611, 5612, 5613, 5614, 5615, 5616, 5617, 5618, 5619, 5620, 5621, 5622, 5623, 5624, 5625, 5626, 5627, 5628, 5629, 5630, 5631, 5632, 5633, 5634, 5635, 5636, 5637, 5638, 5639, 5640, 5641, 5642, 5643, 5644, 5645, 5646, 5647, 5648, 5649, 5650, 5651, 5652, 5653, 5654, 5655, 5656, 5657, 5658, 5659, 5660, 5661, 5662, 5663, 5664, 5665, 5666, 5667, 5668, 5669, 5670, 5671, 5672, 5673, 5674, 5675, 5676, 5677, 5678, 5679, 5680, 5681, 5682, 5683, 5684, 5685, 5686, 5687, 5688, 5689, 5690, 5691, 5692, 5693, 5694, 5695, 5696, 5697, 5698, 5699, 5700, 5701, 5702, 5703, 5704, 5705, 5706, 5707, 5708, 5709, 5710, 5711, 5712, 5713, 5714, 5715, 5716, 5717, 5718, 5719, 5720, 5721, 5722, 5723, 5724, 5725, 5726, 5727, 5728, 5729, 5730, 5731, 5732, 5733, 5734, 5735, 5736, 5737, 5738, 5739, 5740, 5741, 5742, 5743, 5744, 5745, 5746, 5747, 5748, 5749, 5750, 5751, 5752, 5753, 5754, 5755, 5756, 5757, 5758, 5759, 5760, 5761, 5762, 5763, 5764, 5765, 5766, 5767, 5768, 5769, 5770, 5771, 5772, 5773, 5774, 5775, 5776, 5777, 5778, 5779, 5780, 5781, 5782, 5783, 5784, 5785, 5786, 5787, 5788, 5789, 5790, 5791, 5792, 5793, 5794, 5795, 5796, 5797, 5798, 5799, 5800, 5801, 5802, 5803, 5804, 5805, 5806, 5807, 5808, 5809, 5810, 5811, 5812, 5813, 5814, 5815, 5816, 5817, 5818, 5819, 5820, 5821, 5822, 5823, 5824, 5825, 5826, 5827, 5828, 5829, 5830, 5831, 5832, 5833, 5834, 5835, 5836, 5837, 5838, 5839, 5840, 5841, 5842, 5843, 5844, 5845, 5846, 5847, 5848, 5849, 5850, 5851, 5852, 5853, 5854, 5855, 5856, 5857, 5858, 5859, 5860, 5861, 5862, 5863, 5864, 5865, 5866, 5867, 5868, 5869, 5870, 5871, 5872, 5873, 5874, 5875, 5876, 5877, 5878, 5879, 5880, 5881, 5882, 5883, 5884, 5885, 5886, 5887, 5888, 5889, 5890, 5891, 5892, 5893, 5894, 5895, 5896, 5897, 5898, 5899, 5900, 5901, 5902, 5903, 5904, 5905, 5906, 5907, 5908, 5909, 5910, 5911, 5912, 5913, 5914, 5915, 5916, 5917, 5918, 5919, 5920, 5921, 5922, 5923, 5924, 5925, 5926, 5927, 5928, 5929, 5930, 5931, 5932, 5933, 5934, 5935, 5936, 5937, 5938, 5939, 5940, 5941, 5942, 5943, 5944, 5945, 5946, 5947, 5948, 5949, 5950, 5951, 5952, 5953, 5954, 5955, 5956, 5957, 5958, 5959, 5960, 5961, 5962, 5963, 5964, 5965, 5966, 5967, 5968, 5969, 5970, 5971, 5972, 5973, 5974, 5975, 5976, 5977, 5978, 5979, 5980, 5981, 5982, 5983, 5984, 5985, 5986, 5987, 5988, 5989, 5990, 5991, 5992, 5993, 5994, 5995, 5996, 5997, 5998, 5999, 6000, 6001, 6002, 6003, 6004, 6005, 6006, 6007, 6008, 6009, 6010, 6011, 6012, 6013, 6014, 6015, 6016, 6017, 6018, 6019, 6020, 6021, 6022, 6023, 6024, 6025, 6026, 6027, 6028, 6029, 6030, 6031, 6032, 6033, 6034, 6035, 6036, 6037, 6038, 6039, 6040, 6041, 6042, 6043, 6044, 6045, 6046, 6047, 6048, 6049, 6050, 6051, 6052, 6053, 6054, 6055, 6056, 6057, 6058, 6059, 6060, 6061, 6062, 6063, 6064, 6065, 6066, 6067, 6068, 6069, 6070, 6071, 6072, 6073, 6074, 6075, 6076, 6077, 6078, 6079, 6080, 6081, 6082, 6083, 6084, 6085, 6086, 6087, 6088, 6089, 6090, 6091, 6092, 6093, 6094, 6095, 6096, 6097, 6098, 6099, 6100, 6101, 6102, 6103, 6104, 6105, 6106, 6107, 6108, 6109, 6110, 6111, 6112, 6113, 6114, 6115, 6116, 6117, 6118, 6119, 6120, 6121, 6122, 6123, 6124, 6125, 6126, 6127, 6128, 6129, 6130, 6131, 6132, 6133, 6134, 6135, 6136, 6137, 6138, 6139, 6140, 6141, 6142, 6143, 6144, 6145, 6146, 6147, 6148, 6149, 6150, 6151, 6152, 6153, 6154, 6155, 6156, 6157, 6158, 6159, 6160, 6161, 6162, 6163, 6164, 6165, 6166, 6167, 6168, 6169, 6170, 6171, 6172, 6173, 6174, 6175, 6176, 6177, 6178, 6179, 6180, 6181, 6182, 6183, 6184, 6185, 6186, 6187, 6188, 6189, 6190, 6191, 6192, 6193, 6194, 6195, 6196, 6197, 6198, 6199, 6200, 6201, 6202, 6203, 6204, 6205, 6206, 6207, 6208, 6209, 6210, 6211, 6212, 6213, 6214, 6215, 6216, 6217, 6218, 6219, 6220, 6221, 6222, 6223, 6224, 6225, 6226, 6227, 6228, 6229, 6230, 6231, 6232, 6233, 6234, 6235, 6236, 6237, 6238, 6239, 6240, 6241, 6242, 6243, 6244, 6245, 6246, 6247, 6248, 6249, 6250, 6251, 6252, 6253, 6254, 6255, 6256, 6257, 6258, 6259, 6260, 6261, 6262, 6263, 6264, 6265, 6266, 6267, 6268, 6269, 6270, 6271, 6272, 6273, 6274, 6275, 6276, 6277, 6278, 6279, 6280, 6281, 6282, 6283, 6284, 6285, 6286, 6287, 6288, 6289, 6290, 6291, 6292, 6293, 6294, 6295, 6296, 6297, 6298, 6299, 6300, 6301, 6302, 6303, 6304, 6305, 6306, 6307, 6308, 6309, 6310, 6311, 6312, 6313, 6314, 6315, 6316, 6317, 6318, 6319, 6320, 6321, 6322, 6323, 6324, 6325, 6326, 6327, 6328, 6329, 6330, 6331, 6332, 6333, 6334, 6335, 6336, 6337, 6338, 6339, 6340, 6341, 6342, 6343, 6344, 6345, 6346, 6347, 6348, 6349, 6350, 6351, 6352, 6353, 6354, 6355, 6356, 6357, 6358, 6359, 6360, 6361, 6362, 6363, 6364, 6365, 6366, 6367, 6368, 6369, 6370, 6371, 6372, 6373, 6374, 6375, 6376, 6377, 6378, 6379, 6380, 6381, 6382, 6383, 6384, 6385, 6386, 6387, 6388, 6389, 6390, 6391, 6392, 6393, 6394, 6395, 6396, 6397, 6398, 6399, 6400, 6401, 6402, 6403, 6404, 6405, 6406, 6407, 6408, 6409, 6410, 6411, 6412, 6413, 6414, 6415, 6416, 6417, 6418, 6419, 6420, 6421, 6422, 6423, 6424, 6425, 6426, 6427, 6428, 6429, 6430, 6431, 6432, 6433, 6434, 6435, 6436, 6437, 6438, 6439, 6440, 6441, 6442, 6443, 6444, 6445, 6446, 6447, 6448, 6449, 6450, 6451, 6452, 6453, 6454, 6455, 6456, 6457, 6458, 6459, 6460, 6461, 6462, 6463, 6464, 6465, 6466, 6467, 6468, 6469, 6470, 6471, 6472, 6473, 6474, 6475, 6476, 6477, 6478, 6479, 6480, 6481, 6482, 6483, 6484, 6485, 6486, 6487, 6488, 6489, 6490, 6491, 6492, 6493, 6494, 6495, 6496, 6497, 6498, 6499, 6500, 6501, 6502, 6503, 6504, 6505, 6506, 6507, 6508, 6509, 6510, 6511, 6512, 6513, 6514, 6515, 6516, 6517, 6518, 6519, 6520, 6521, 6522, 6523, 6524, 6525, 6526, 6527, 6528, 6529, 6530, 6531, 6532, 6533, 6534, 6535, 6536, 6537, 6538, 6539, 6540, 6541, 6542, 6543, 6544, 6545, 6546, 6547, 6548, 6549, 6550, 6551, 6552, 6553, 6554, 6555, 6556, 6557, 6558, 6559, 6560, 6561, 6562, 6563, 6564, 6565, 6566, 6567, 6568, 6569, 6570, 6571, 6572, 6573, 6574, 6575, 6576, 6577, 6578, 6579, 6580, 6581, 6582, 6583, 6584, 6585, 6586, 6587, 6588, 6589, 6590, 6591, 6592, 6593, 6594, 6595, 6596, 6597, 6598, 6599, 6600, 6601, 6602, 6603, 6604, 6605, 6606, 6607, 6608, 6609, 6610, 6611, 6612, 6613, 6614, 6615, 6616, 6617, 6618, 6619, 6620, 6621, 6622, 6623, 6624, 6625, 6626, 6627, 6628, 6629, 6630, 6631, 6632, 6633, 6634, 6635, 6636, 6637, 6638, 6639, 6640, 6641, 6642, 6643, 6644, 6645, 6646, 6647, 6648, 6649, 6650, 6651, 6652, 6653, 6654, 6655, 6656, 6657, 6658, 6659, 6660, 6661, 6662, 6663, 6664, 6665, 6666, 6667, 6668, 6669, 6670, 6671, 6672, 6673, 6674, 6675, 6676, 6677, 6678, 6679, 6680, 6681, 6682, 6683, 6684, 6685, 6686, 6687, 6688, 6689, 6690, 6691, 6692, 6693, 6694, 6695, 6696, 6697, 6698, 6699, 6700, 6701, 6702, 6703, 6704, 6705, 6706, 6707, 6708, 6709, 6710, 6711, 6712, 6713, 6714, 6715, 6716, 6717, 6718, 6719, 6720, 6721, 6722, 6723, 6724, 6725, 6726, 6727, 6728, 6729, 6730, 6731, 6732, 6733, 6734, 6735, 6736, 6737, 6738, 6739, 6740, 6741, 6742, 6743, 6744, 6745, 6746, 6747, 6748, 6749, 6750, 6751, 6752, 6753, 6754, 6755, 6756, 6757, 6758, 6759, 6760, 6761, 6762, 6763, 6764, 6765, 6766, 6767, 6768, 6769, 6770, 6771, 6772, 6773, 6774, 6775, 6776, 6777, 6778, 6779, 6780, 6781, 6782, 6783, 6784, 6785, 6786, 6787, 6788, 6789, 6790, 6791, 6792, 6793, 6794, 6795, 6796, 6797, 6798, 6799, 6800, 6801, 6802, 6803, 6804, 6805, 6806, 6807, 6808, 6809, 6810, 6811, 6812, 6813, 6814, 6815, 6816, 6817, 6818, 6819, 6820, 6821, 6822, 6823, 6824, 6825, 6826, 6827, 6828, 6829, 6830, 6831, 6832, 6833, 6834, 6835, 6836, 6837, 6838, 6839, 6840, 6841, 6842, 6843, 6844, 6845, 6846, 6847, 6848, 6849, 6850, 6851, 6852, 6853, 6854, 6855, 6856, 6857, 6858, 6859, 6860, 6861, 6862, 6863, 6864, 6865, 6866, 6867, 6868, 6869, 6870, 6871, 6872, 6873, 6874, 6875, 6876, 6877, 6878, 6879, 6880, 6881, 6882, 6883, 6884, 6885, 6886, 6887, 6888, 6889, 6890, 6891, 6892, 6893, 6894, 6895, 6896, 6897, 6898, 6899, 6900, 6901, 6902, 6903, 6904, 6905, 6906, 6907, 6908, 6909, 6910, 6911, 6912, 6913, 6914, 6915, 6916, 6917, 6918, 6919, 6920, 6921, 6922, 6923, 6924, 6925, 6926, 6927, 6928, 6929, 6930, 6931, 6932, 6933, 6934, 6935, 6936, 6937, 6938, 6939, 6940, 6941, 6942, 6943, 6944, 6945, 6946, 6947, 6948, 6949, 6950, 6951, 6952, 6953, 6954, 6955, 6956, 6957, 6958, 6959, 6960, 6961, 6962, 6963, 6964, 6965, 6966, 6967, 6968, 6969, 6970, 6971, 6972, 6973, 6974, 6975, 6976, 6977, 6978, 6979, 6980, 6981, 6982, 6983, 6984, 6985, 6986, 6987, 6988, 6989, 6990, 6991, 6992, 6993, 6994, 6995, 6996, 6997, 6998, 6999, 7000, 7001, 7002, 7003, 7004, 7005, 7006, 7007, 7008, 7009, 7010, 7011, 7012, 7013, 7014, 7015, 7016, 7017, 7018, 7019, 7020, 7021, 7022, 7023, 7024, 7025, 7026, 7027, 7028, 7029, 7030, 7031, 7032, 7033, 7034, 7035, 7036, 7037, 7038, 7039, 7040, 7041, 7042, 7043, 7044, 7045, 7046, 7047, 7048, 7049, 7050, 7051, 7052, 7053, 7054, 7055, 7056, 7057, 7058, 7059, 7060, 7061, 7062, 7063, 7064, 7065, 7066, 7067, 7068, 7069, 7070, 7071, 7072, 7073, 7074, 7075, 7076, 7077, 7078, 7079, 7080, 7081, 7082, 7083, 7084, 7085, 7086, 7087, 7088, 7089, 7090, 7091, 7092, 7093, 7094, 7095, 7096, 7097, 7098, 7099, 7100, 7101, 7102, 7103, 7104, 7105, 7106, 7107, 7108, 7109, 7110, 7111, 7112, 7113, 7114, 7115, 7116, 7117, 7118, 7119, 7120, 7121, 7122, 7123, 7124, 7125, 7126, 7127, 7128, 7129, 7130, 7131, 7132, 7133, 7134, 7135, 7136, 7137, 7138, 7139, 7140, 7141, 7142, 7143, 7144, 7145, 7146, 7147, 7148, 7149, 7150, 7151, 7152, 7153, 7154, 7155, 7156, 7157, 7158, 7159, 7160, 7161, 7162, 7163, 7164, 7165, 7166, 7167, 7168, 7169, 7170, 7171, 7172, 7173, 7174, 7175, 7176, 7177, 7178, 7179, 7180, 7181, 7182, 7183, 7184, 7185, 7186, 7187, 7188, 7189, 7190, 7191, 7192, 7193, 7194, 7195, 7196, 7197, 7198, 7199, 7200, 7201, 7202, 7203, 7204, 7205, 7206, 7207, 7208, 7209, 7210, 7211, 7212, 7213, 7214, 7215, 7216, 7217, 7218, 7219, 7220, 7221, 7222, 7223, 7224, 7225, 7226, 7227, 7228, 7229, 7230, 7231, 7232, 7233, 7234, 7235, 7236, 7237, 7238, 7239, 7240, 7241, 7242, 7243, 7244, 7245, 7246, 7247, 7248, 7249, 7250, 7251, 7252, 7253, 7254, 7255, 7256, 7257, 7258, 7259, 7260, 7261, 7262, 7263, 7264, 7265, 7266, 7267, 7268, 7269, 7270, 7271, 7272, 7273, 7274, 7275, 7276, 7277, 7278, 7279, 7280, 7281, 7282, 7283, 7284, 7285, 7286, 7287, 7288, 7289, 7290, 7291, 7292, 7293, 7294, 7295, 7296, 7297, 7298, 7299, 7300, 7301, 7302, 7303, 7304, 7305, 7306, 7307, 7308, 7309, 7310, 7311, 7312, 7313, 7314, 7315, 7316, 7317, 7318, 7319, 7320, 7321, 7322, 7323, 7324, 7325, 7326, 7327, 7328, 7329, 7330, 7331, 7332, 7333, 7334, 7335, 7336, 7337, 7338, 7339, 7340, 7341, 7342, 7343, 7344, 7345, 7346, 7347, 7348, 7349, 7350, 7351, 7352, 7353, 7354, 7355, 7356, 7357, 7358, 7359, 7360, 7361, 7362, 7363, 7364, 7365, 7366, 7367, 7368, 7369, 7370, 7371, 7372, 7373, 7374, 7375, 7376, 7377, 7378, 7379, 7380, 7381, 7382, 7383, 7384, 7385, 7386, 7387, 7388, 7389, 7390, 7391, 7392, 7393, 7394, 7395, 7396, 7397, 7398, 7399, 7400, 7401, 7402, 7403, 7404, 7405, 7406, 7407, 7408, 7409, 7410, 7411, 7412, 7413, 7414, 7415, 7416, 7417, 7418, 7419, 7420, 7421, 7422, 7423, 7424, 7425, 7426, 7427, 7428, 7429, 7430, 7431, 7432, 7433, 7434, 7435, 7436, 7437, 7438, 7439, 7440, 7441, 7442, 7443, 7444, 7445, 7446, 7447, 7448, 7449, 7450, 7451, 7452, 7453, 7454, 7455, 7456, 7457, 7458, 7459, 7460, 7461, 7462, 7463, 7464, 7465, 7466, 7467, 7468, 7469, 7470, 7471, 7472, 7473, 7474, 7475, 7476, 7477, 7478, 7479, 7480, 7481, 7482, 7483, 7484, 7485, 7486, 7487, 7488, 7489, 7490, 7491, 7492, 7493, 7494, 7495, 7496, 7497, 7498, 7499, 7500, 7501, 7502, 7503, 7504, 7505, 7506, 7507, 7508, 7509, 7510, 7511, 7512, 7513, 7514, 7515, 7516, 7517, 7518, 7519, 7520, 7521, 7522, 7523, 7524, 7525, 7526, 7527, 7528, 7529, 7530, 7531, 7532, 7533, 7534, 7535, 7536, 7537, 7538, 7539, 7540, 7541, 7542, 7543, 7544, 7545, 7546, 7547, 7548, 7549, 7550, 7551, 7552, 7553, 7554, 7555, 7556, 7557, 7558, 7559, 7560, 7561, 7562, 7563, 7564, 7565, 7566, 7567, 7568, 7569, 7570, 7571, 7572, 7573, 7574, 7575, 7576, 7577, 7578, 7579, 7580, 7581, 7582, 7583, 7584, 7585, 7586, 7587, 7588, 7589, 7590, 7591, 7592, 7593, 7594, 7595, 7596, 7597, 7598, 7599, 7600, 7601, 7602, 7603, 7604, 7605, 7606, 7607, 7608, 7609, 7610, 7611, 7612, 7613, 7614, 7615, 7616, 7617, 7618, 7619, 7620, 7621, 7622, 7623, 7624, 7625, 7626, 7627, 7628, 7629, 7630, 7631, 7632, 7633, 7634, 7635, 7636, 7637, 7638, 7639, 7640, 7641, 7642, 7643, 7644, 7645, 7646, 7647, 7648, 7649, 7650, 7651, 7652, 7653, 7654, 7655, 7656, 7657, 7658, 7659, 7660, 7661, 7662, 7663, 7664, 7665, 7666, 7667, 7668, 7669, 7670, 7671, 7672, 7673, 7674, 7675, 7676, 7677, 7678, 7679, 7680, 7681, 7682, 7683, 7684, 7685, 7686, 7687, 7688, 7689, 7690, 7691, 7692, 7693, 7694, 7695, 7696, 7697, 7698, 7699, 7700, 7701, 7702, 7703, 7704, 7705, 7706, 7707, 7708, 7709, 7710, 7711, 7712, 7713, 7714, 7715, 7716, 7717, 7718, 7719, 7720, 7721, 7722, 7723, 7724, 7725, 7726, 7727, 7728, 7729, 7730, 7731, 7732, 7733, 7734, 7735, 7736, 7737, 7738, 7739, 7740, 7741, 7742, 7743, 7744, 7745, 7746, 7747, 7748, 7749, 7750, 7751, 7752, 7753, 7754, 7755, 7756, 7757, 7758, 7759, 7760, 7761, 7762, 7763, 7764, 7765, 7766, 7767, 7768, 7769, 7770, 7771, 7772, 7773, 7774, 7775, 7776, 7777, 7778, 7779, 7780, 7781, 7782, 7783, 7784, 7785, 7786, 7787, 7788, 7789, 7790, 7791, 7792, 7793, 7794, 7795, 7796, 7797, 7798, 7799, 7800, 7801, 7802, 7803, 7804, 7805, 7806, 7807, 7808, 7809, 7810, 7811, 7812, 7813, 7814, 7815, 7816, 7817, 7818, 7819, 7820, 7821, 7822, 7823, 7824, 7825, 7826, 7827, 7828, 7829, 7830, 7831, 7832, 7833, 7834, 7835, 7836, 7837, 7838, 7839, 7840, 7841, 7842, 7843, 7844, 7845, 7846, 7847, 7848, 7849, 7850, 7851, 7852, 7853, 7854, 7855, 7856, 7857, 7858, 7859, 7860, 7861, 7862, 7863, 7864, 7865, 7866, 7867, 7868, 7869, 7870, 7871, 7872, 7873, 7874, 7875, 7876, 7877, 7878, 7879, 7880, 7881, 7882, 7883, 7884, 7885, 7886, 7887, 7888, 7889, 7890, 7891, 7892, 7893, 7894, 7895, 7896, 7897, 7898, 7899, 7900, 7901, 7902, 7903, 7904, 7905, 7906, 7907, 7908, 7909, 7910, 7911, 7912, 7913, 7914, 7915, 7916, 7917, 7918, 7919, 7920, 7921, 7922, 7923, 7924, 7925, 7926, 7927, 7928, 7929, 7930, 7931, 7932, 7933, 7934, 7935, 7936, 7937, 7938, 7939, 7940, 7941, 7942, 7943, 7944, 7945, 7946, 7947, 7948, 7949, 7950, 7951, 7952, 7953, 7954, 7955, 7956, 7957, 7958, 7959, 7960, 7961, 7962, 7963, 7964, 7965, 7966, 7967, 7968, 7969, 7970, 7971, 7972, 7973, 7974, 7975, 7976, 7977, 7978, 7979, 7980, 7981, 7982, 7983, 7984, 7985, 7986, 7987, 7988, 7989, 7990, 7991, 7992, 7993, 7994, 7995, 7996, 7997, 7998, 7999, 8000, 8001, 8002, 8003, 8004, 8005, 8006, 8007, 8008, 8009, 8010, 8011, 8012, 8013, 8014, 8015, 8016, 8017, 8018, 8019, 8020, 8021, 8022, 8023, 8024, 8025, 8026, 8027, 8028, 8029, 8030, 8031, 8032, 8033, 8034, 8035, 8036, 8037, 8038, 8039, 8040, 8041, 8042, 8043, 8044, 8045, 8046, 8047, 8048, 8049, 8050, 8051, 8052, 8053, 8054, 8055, 8056, 8057, 8058, 8059, 8060, 8061, 8062, 8063, 8064, 8065, 8066, 8067, 8068, 8069, 8070, 8071, 8072, 8073, 8074, 8075, 8076, 8077, 8078, 8079, 8080, 8081, 8082, 8083, 8084, 8085, 8086, 8087, 8088, 8089, 8090, 8091, 8092, 8093, 8094, 8095, 8096, 8097, 8098, 8099, 8100, 8101, 8102, 8103, 8104, 8105, 8106, 8107, 8108, 8109, 8110, 8111, 8112, 8113, 8114, 8115, 8116, 8117, 8118, 8119, 8120, 8121, 8122, 8123, 8124, 8125, 8126, 8127, 8128, 8129, 8130, 8131, 8132, 8133, 8134, 8135, 8136, 8137, 8138, 8139, 8140, 8141, 8142, 8143, 8144, 8145, 8146, 8147, 8148, 8149, 8150, 8151, 8152, 8153, 8154, 8155, 8156, 8157, 8158, 8159, 8160, 8161, 8162, 8163, 8164, 8165, 8166, 8167, 8168, 8169, 8170, 8171, 8172, 8173, 8174, 8175, 8176, 8177, 8178, 8179, 8180, 8181, 8182, 8183, 8184, 8185, 8186, 8187, 8188, 8189, 8190, 8191, 8192, 8193, 8194, 8195, 8196, 8197, 8198, 8199, 8200, 8201, 8202, 8203, 8204, 8205, 8206, 8207, 8208, 8209, 8210, 8211, 8212, 8213, 8214, 8215, 8216, 8217, 8218, 8219, 8220, 8221, 8222, 8223, 8224, 8225, 8226, 8227, 8228, 8229, 8230, 8231, 8232, 8233, 8234, 8235, 8236, 8237, 8238, 8239, 8240, 8241, 8242, 8243, 8244, 8245, 8246, 8247, 8248, 8249, 8250, 8251, 8252, 8253, 8254, 8255, 8256, 8257, 8258, 8259, 8260, 8261, 8262, 8263, 8264, 8265, 8266, 8267, 8268, 8269, 8270, 8271, 8272, 8273, 8274, 8275, 8276, 8277, 8278, 8279, 8280, 8281, 8282, 8283, 8284, 8285, 8286, 8287, 8288, 8289, 8290, 8291, 8292, 8293, 8294, 8295, 8296, 8297, 8298, 8299, 8300, 8301, 8302, 8303, 8304, 8305, 8306, 8307, 8308, 8309, 8310, 8311, 8312, 8313, 8314, 8315, 8316, 8317, 8318, 8319, 8320, 8321, 8322, 8323, 8324, 8325, 8326, 8327, 8328, 8329, 8330, 8331, 8332, 8333, 8334, 8335, 8336, 8337, 8338, 8339, 8340, 8341, 8342, 8343, 8344, 8345, 8346, 8347, 8348, 8349, 8350, 8351, 8352, 8353, 8354, 8355, 8356, 8357, 8358, 8359, 8360, 8361, 8362, 8363, 8364, 8365, 8366, 8367, 8368, 8369, 8370, 8371, 8372, 8373, 8374, 8375, 8376, 8377, 8378, 8379, 8380, 8381, 8382, 8383, 8384, 8385, 8386, 8387, 8388, 8389, 8390, 8391, 8392, 8393, 8394, 8395, 8396, 8397, 8398, 8399, 8400, 8401, 8402, 8403, 8404, 8405, 8406, 8407, 8408, 8409, 8410, 8411, 8412, 8413, 8414, 8415, 8416, 8417, 8418, 8419, 8420, 8421, 8422, 8423, 8424, 8425, 8426, 8427, 8428, 8429, 8430, 8431, 8432, 8433, 8434, 8435, 8436, 8437, 8438, 8439, 8440, 8441, 8442, 8443, 8444, 8445, 8446, 8447, 8448, 8449, 8450, 8451, 8452, 8453, 8454, 8455, 8456, 8457, 8458, 8459, 8460, 8461, 8462, 8463, 8464, 8465, 8466, 8467, 8468, 8469, 8470, 8471, 8472, 8473, 8474, 8475, 8476, 8477, 8478, 8479, 8480, 8481, 8482, 8483, 8484, 8485, 8486, 8487, 8488, 8489, 8490, 8491, 8492, 8493, 8494, 8495, 8496, 8497, 8498, 8499, 8500, 8501, 8502, 8503, 8504, 8505, 8506, 8507, 8508, 8509, 8510, 8511, 8512, 8513, 8514, 8515, 8516, 8517, 8518, 8519, 8520, 8521, 8522, 8523, 8524, 8525, 8526, 8527, 8528, 8529, 8530, 8531, 8532, 8533, 8534, 8535, 8536, 8537, 8538, 8539, 8540, 8541, 8542, 8543, 8544, 8545, 8546, 8547, 8548, 8549, 8550, 8551, 8552, 8553, 8554, 8555, 8556, 8557, 8558, 8559, 8560, 8561, 8562, 8563, 8564, 8565, 8566, 8567, 8568, 8569, 8570, 8571, 8572, 8573, 8574, 8575, 8576, 8577, 8578, 8579, 8580, 8581, 8582, 8583, 8584, 8585, 8586, 8587, 8588, 8589, 8590, 8591, 8592, 8593, 8594, 8595, 8596, 8597, 8598, 8599, 8600, 8601, 8602, 8603, 8604, 8605, 8606, 8607, 8608, 8609, 8610, 8611, 8612, 8613, 8614, 8615, 8616, 8617, 8618, 8619, 8620, 8621, 8622, 8623, 8624, 8625, 8626, 8627, 8628, 8629, 8630, 8631, 8632, 8633, 8634, 8635, 8636, 8637, 8638, 8639, 8640, 8641, 8642, 8643, 8644, 8645, 8646, 8647, 8648, 8649, 8650, 8651, 8652, 8653, 8654, 8655, 8656, 8657, 8658, 8659, 8660, 8661, 8662, 8663, 8664, 8665, 8666, 8667, 8668, 8669, 8670, 8671, 8672, 8673, 8674, 8675, 8676, 8677, 8678, 8679, 8680, 8681, 8682, 8683, 8684, 8685, 8686, 8687, 8688, 8689, 8690, 8691, 8692, 8693, 8694, 8695, 8696, 8697, 8698, 8699, 8700, 8701, 8702, 8703, 8704, 8705, 8706, 8707, 8708, 8709, 8710, 8711, 8712, 8713, 8714, 8715, 8716, 8717, 8718, 8719, 8720, 8721, 8722, 8723, 8724, 8725, 8726, 8727, 8728, 8729, 8730, 8731, 8732, 8733, 8734, 8735, 8736, 8737, 8738, 8739, 8740, 8741, 8742, 8743, 8744, 8745, 8746, 8747, 8748, 8749, 8750, 8751, 8752, 8753, 8754, 8755, 8756, 8757, 8758, 8759, 8760, 8761, 8762, 8763, 8764, 8765, 8766, 8767, 8768, 8769, 8770, 8771, 8772, 8773, 8774, 8775, 8776, 8777, 8778, 8779, 8780, 8781, 8782, 8783, 8784, 8785, 8786, 8787, 8788, 8789, 8790, 8791, 8792, 8793, 8794, 8795, 8796, 8797, 8798, 8799, 8800, 8801, 8802, 8803, 8804, 8805, 8806, 8807, 8808, 8809, 8810, 8811, 8812, 8813, 8814, 8815, 8816, 8817, 8818, 8819, 8820, 8821, 8822, 8823, 8824, 8825, 8826, 8827, 8828, 8829, 8830, 8831, 8832, 8833, 8834, 8835, 8836, 8837, 8838, 8839, 8840, 8841, 8842, 8843, 8844, 8845, 8846, 8847, 8848, 8849, 8850, 8851, 8852, 8853, 8854, 8855, 8856, 8857, 8858, 8859, 8860, 8861, 8862, 8863, 8864, 8865, 8866, 8867, 8868, 8869, 8870, 8871, 8872, 8873, 8874, 8875, 8876, 8877, 8878, 8879, 8880, 8881, 8882, 8883, 8884, 8885, 8886, 8887, 8888, 8889, 8890, 8891, 8892, 8893, 8894, 8895, 8896, 8897, 8898, 8899, 8900, 8901, 8902, 8903, 8904, 8905, 8906, 8907, 8908, 8909, 8910, 8911, 8912, 8913, 8914, 8915, 8916, 8917, 8918, 8919, 8920, 8921, 8922, 8923, 8924, 8925, 8926, 8927, 8928, 8929, 8930, 8931, 8932, 8933, 8934, 8935, 8936, 8937, 8938, 8939, 8940, 8941, 8942, 8943, 8944, 8945, 8946, 8947, 8948, 8949, 8950, 8951, 8952, 8953, 8954, 8955, 8956, 8957, 8958, 8959, 8960, 8961, 8962, 8963, 8964, 8965, 8966, 8967, 8968, 8969, 8970, 8971, 8972, 8973, 8974, 8975, 8976, 8977, 8978, 8979, 8980, 8981, 8982, 8983, 8984, 8985, 8986, 8987, 8988, 8989, 8990, 8991, 8992, 8993, 8994, 8995, 8996, 8997, 8998, 8999, 9000, 9001, 9002, 9003, 9004, 9005, 9006, 9007, 9008, 9009, 9010, 9011, 9012, 9013, 9014, 9015, 9016, 9017, 9018, 9019, 9020, 9021, 9022, 9023, 9024, 9025, 9026, 9027, 9028, 9029, 9030, 9031, 9032, 9033, 9034, 9035, 9036, 9037, 9038, 9039, 9040, 9041, 9042, 9043, 9044, 9045, 9046, 9047, 9048, 9049, 9050, 9051, 9052, 9053, 9054, 9055, 9056, 9057, 9058, 9059, 9060, 9061, 9062, 9063, 9064, 9065, 9066, 9067, 9068, 9069, 9070, 9071, 9072, 9073, 9074, 9075, 9076, 9077, 9078, 9079, 9080, 9081, 9082, 9083, 9084, 9085, 9086, 9087, 9088, 9089, 9090, 9091, 9092, 9093, 9094, 9095, 9096, 9097, 9098, 9099, 9100, 9101, 9102, 9103, 9104, 9105, 9106, 9107, 9108, 9109, 9110, 9111, 9112, 9113, 9114, 9115, 9116, 9117, 9118, 9119, 9120, 9121, 9122, 9123, 9124, 9125, 9126, 9127, 9128, 9129, 9130, 9131, 9132, 9133, 9134, 9135, 9136, 9137, 9138, 9139, 9140, 9141, 9142, 9143, 9144, 9145, 9146, 9147, 9148, 9149, 9150, 9151, 9152, 9153, 9154, 9155, 9156, 9157, 9158, 9159, 9160, 9161, 9162, 9163, 9164, 9165, 9166, 9167, 9168, 9169, 9170, 9171, 9172, 9173, 9174, 9175, 9176, 9177, 9178, 9179, 9180, 9181, 9182, 9183, 9184, 9185, 9186, 9187, 9188, 9189, 9190, 9191, 9192, 9193, 9194, 9195, 9196, 9197, 9198, 9199, 9200, 9201, 9202, 9203.

### Leukemia

[0733] Leukemia is a form of cancer that starts in blood-forming tissue such as the bone marrow which can cause a large number of blood cells to be produced and enter the blood stream. Leukemia can also spread to the central nervous system and cause brain and spinal cord cancer. Types of leukemia include, but are not limited to, adult acute lymphoblastic, childhood acute lymphoblastic, aduct acute myeloid, chronic lymphocytic, chronic myelogenous and hairy cell. Non-limiting examples of symptoms of leukemia include weakness or feeling tired, fever, easy bruising or bleeding, petechiae, shortness of breath, weight loss or loss of appetite, pain in the bones or stomach, pain or feeling of fullness below the ribs, and painless lumps in the neck, underarm, stomach or groin.

[0734] In one embodiment, the oncology-related polynucleotides, oncology-related primary constructs or oncology-related mmRNA of the present invention may be used to treat a disease, disorder and/or condition in a subject who has been diagnosed or may be diagnosed with leukemia by administering to said subject an isolated polynucleotide encoding an oncology-related polypeptide of interest. In one embodiment, the oncology-related polynucleotides, oncology-related primary constructs or oncology-related mmRNA of the present invention may be used to reduce, eliminate, or prevent tumor growth in a subject who has been diagnosed or may be diagnosed with leukemia by administering to said subject an isolated polynucleotide encoding an oncology-related polypeptide of interest. In one embodiment, the oncology-related polynucleotides, oncology-related primary constructs or oncology-related mmRNA of the present invention may be used to reduce and/or ameliorate at least one symptom of cancer in a subject who has been diagnosed or may be diagnosed with leukemia by administering to said subject an isolated polynucleotide encoding an oncology-related polypeptide of interest. In a further embodiment, the oncology-related polypeptide of interest may include, but not limited to, SEQ ID NOs: 4711, 4712, 4713, 4714, 4715, 4716, 4717, 4718, 4719, 4720, 4721, 4722, 4723, 4724, 4725, 4726, 4727, 4728, 4742, 4743, 4744, 4745, 4746, 4747, 4748, 4749, 4750, 4751, 4781, 4782, 4783, 4784, 4785, 4786, 4787, 4788, 4789, 4790, 4825, 4826, 4827, 4828, 4829, 4830, 4832, 4846, 4854, 4855, 4856, 4857, 4858, 4859, 4860, 4861, 4863, 4864, 4868, 4869, 4870, 4871, 4872, 4873, 4874, 4875, 4876, 4877, 4878, 4879, 4880, 4881, 4882, 4883, 4884, 4885, 4886, 4887, 4888, 4889, 4890, 4891, 4892, 4893, 4894, 4911, 4912, 4913, 4914, 4915, 4916, 4917, 4918, 4919, 4920, 4960, 4961, 4962, 4963, 4964, 4965, 4966, 4967, 4968, 4969, 4970, 4971, 4972, 4973, 4974, 4975, 4976, 4977, 4978, 4979, 4980, 4981, 4982, 4983, 4984, 4985, 4986, 4987, 4988, 4989, 4990, 4991, 4992, 4993, 4994, 4995, 4996, 4997, 4998, 4999, 5000, 5001, 5002, 5008, 5009, 5010, 5011, 5012, 5013, 5014, 5015, 5016, 5017, 5018, 5019, 5020, 5021, 5022, 5023, 5024, 5025, 5026, 5027, 5028, 5030, 5031, 5032, 5033, 5034, 5035, 5036, 5037, 5038, 5039, 5040, 5041, 5042, 5043, 5044, 5045, 5046, 5047, 5048, 5049, 5050, 5051, 5052, 5053, 5054, 5055, 5056, 5057, 5058, 5059, 5060, 5061, 5062, 5063, 5064, 5065, 5066, 5067, 5068, 5069, 5070, 5071, 5072, 5073, 5074, 5075, 5076, 5077, 5078, 5079, 5093, 5094, 5095, 5096, 5097, 5098, 5099, 5100, 5103, 5104, 5105, 5106, 5107, 5108, 5109, 5110, 5111, 5112, 5113, 5114, 5115, 5116, 5117, 5118, 5119, 5120, 5121, 5122, 5123, 5124, 5125, 5126, 5127, 5128, 5129, 5130, 5131, 5132, 5133, 5134, 5135, 5136, 5137, 5138, 5139, 5140, 5141, 5145, 5146, 5147, 5148, 5149, 5150, 5151, 5152, 5153, 5154, 5155, 5156, 5157, 5158, 5159, 5160, 5161, 5162, 5163, 5164, 5165, 5166, 5167, 5168, 5169, 5170, 5171, 5172, 5173, 5174, 5175, 5176, 5177, 5178, 5179, 5180, 5181, 5182, 5183, 5184, 5185, 5186, 5187, 5188, 5189, 5190, 5191, 5192, 5193, 5194, 5195, 5196, 5197, 5198, 5199, 5200, 5201, 5202, 5203, 5204, 5205, 5206, 5207, 5208, 5209, 5210, 5211, 5212, 5213, 5216, 5217, 5218, 5219, 5220, 5221, 5222, 5223, 5230, 5231, 5252, 5253, 5254, 5255, 5256, 5257, 5258, 5259, 5260, 5261, 5262, 5263, 5264, 5265, 5266, 5267, 5268, 5269, 5270, 5271, 5291, 5292, 5293, 5294, 5295, 5296, 5297, 5298, 5299, 5300, 5301, 5302, 5303, 5304, 5305, 5306, 5307, 5308, 5309, 5310, 5311, 5312, 5313, 5314, 5315, 5316, 5317, 5318, 5319, 5320, 5321, 5322, 5323, 5324, 5325, 5326, 5327, 5328, 5329, 5330, 5331, 5332, 5333, 5334, 5335, 5336, 5337, 5338, 5339, 5340, 5341, 5342, 5343, 5344, 5345, 5346, 5347, 5348, 5349, 5350, 5351, 5352, 5353, 5354, 5355, 5356, 5357, 5358, 5359, 5360, 5361, 5362, 5363, 5364, 5365, 5366, 5367, 5368, 5369, 5370, 5371, 5372, 5373, 5374, 5375, 5376, 5377, 5378, 5379, 5380, 5381, 5382, 5383, 5384, 5385, 5386, 5387, 5388, 5389, 5390, 5391, 5392, 5393, 5419, 5420, 5421, 5425, 5426, 5427, 5428, 5429, 5438, 5439, 5440, 5441, 5442, 5443, 5447, 5448, 5449, 5450, 5451, 5452, 5453, 5454, 5455, 5456, 5457, 5458, 5459, 5460, 5461, 5462, 5463, 5464, 5465, 5469, 5470, 5477, 5478, 5479, 5480, 5481, 5482, 5490, 5491, 5492, 5493, 5494, 5495, 5496, 5497, 5498, 5499, 5500, 5501, 5502, 5503, 5504, 5505, 5506, 5507, 5508, 5509, 5510, 5511, 5512, 5513, 5514, 5515, 5516, 5517, 5518, 5519, 5520, 5521, 5522, 5523, 5524, 5525, 5526, 5527, 5528, 5529, 5530, 5531, 5532, 5533, 5534, 5535, 5536, 5548, 5549, 5551, 5552, 5553, 5554, 5555, 5556, 5557, 5558, 5559, 5560, 5561, 5562, 5563, 5564, 5565, 5566, 5567, 5568, 5569, 5570, 5571, 5574, 5577, 5578, 5579, 5580, 5590, 5591, 5592, 5593, 5594, 5595, 5596, 5605, 5606, 5607, 5608, 5609, 5610, 5611, 5616, 5617, 5618, 5619, 5620, 5621, 5622, 5623, 5627, 5628, 5629, 5630, 5631, 5632, 5633, 5638, 5639, 5640, 5671, 5672, 5673, 5674, 5675, 5676, 5677, 5678, 5679, 5680, 5681, 5688, 5689, 5690, 5691, 5692, 5693, 5694, 5695, 5696, 5697, 5698, 5699, 5700, 5701, 5702, 5703, 5708, 5709, 5710, 5711, 5712, 5713, 5714, 5715, 5716, 5717, 5727, 5740, 5741, 5743, 5744, 5745, 5746, 5747, 5748, 5749, 5750, 5751, 5755, 5757, 5758, 5759, 5760, 5761, 5762, 5763, 5764, 5765, 5766, 5767, 5768, 5769, 5770, 5772, 5773, 5775, 5776, 5777, 5778, 5779, 5780, 5783, 5784, 5785, 5786, 5787, 5788, 5789, 5790, 5791, 5792, 5793, 5794, 5795, 5796, 5797, 5798, 5799, 5800, 5801, 5802, 5803, 5806, 5807, 5808, 5809, 5811, 5812, 5813, 5814, 5821, 5822, 5823, 5824, 5825, 5826, 5827, 5828, 5829, 5830, 5831, 5833, 5834, 5836, 5837, 5838, 5839, 5848, 5849, 5850, 5851, 5852, 5853, 5854, 5855, 5864, 5865, 5866, 5867, 5868, 5875, 5876, 5877, 5878, 5880, 5881, 5882, 5883, 5884, 5885, 5886, 5887, 5888, 5889, 5890, 5891, 5892, 5893, 5894, 5895, 5896, 5897, 5898, 5899, 5907, 5908, 5909, 5911, 5912, 5913, 5914, 5915, 5916, 5917, 5918, 5919, 5920, 5921, 5922, 5923, 5924, 5925, 5926, 5927, 5928, 5929, 5950, 5951, 5952, 5953, 5954, 5955, 5956, 5963, 5967, 5969, 5970, 5971, 5972, 5973, 5982, 5983, 5984, 5985, 5986, 5987, 5988, 5997, 5998, 5999, 6000, 6001, 6002, 6068, 6069, 6070, 6071, 6072, 6074, 6075, 6076, 6077, 6078, 6080, 6081, 6082, 6083, 6084, 6085, 6086, 6087, 6088, 6089, 6090, 6091, 6092, 6093, 6094, 6095, 6096, 6097, 6098, 6100, 6101, 6102, 6103, 6105, 6106, 6107, 6108, 6109, 6110, 6111, 6112, 6113, 6114, 6115, 6116, 6117, 6118, 6119, 6120, 6121, 6122, 6123, 6124, 6128, 6130, 6142, 6143, 6144, 6145, 6146, 6147, 6148, 6149, 6151, 6152, 6153, 6154, 6155, 6156, 6157, 6169, 6170, 6171, 6172, 6173, 6174, 6175, 6176, 6177, 6178, 6179, 6180, 6181, 6182, 6185, 6186, 6187, 6191, 6196, 6197, 6198, 6199, 6200, 6201, 6202, 6203, 6204, 6205, 6206, 6207, 6208, 6209, 6231, 6232, 6233, 6234, 6235, 6236, 6237, 6238, 6239, 6251, 6256, 6257, 6258, 6259, 6260, 6261, 6262, 6278, 6279, 6280, 6281, 6282, 6286, 6287, 6288, 6289, 6290, 6298, 6299, 6300, 6301, 6302, 6303, 6304, 6305, 6306, 6307, 6308, 6309, 6310, 6311, 6312, 6313, 6314, 6315, 6318, 6319, 6320, 6321, 6322, 6323, 6324, 6325, 6326, 6356, 6357, 6358, 6378, 6379, 6383, 6384, 6385, 6386, 6387, 6388, 6389, 6390, 6391, 6392, 6393, 6394, 6395, 6396, 6397, 6398, 6399, 6400, 6401, 6402, 6403, 6405, 6406, 6407, 6422, 6423, 6424, 6425, 6426, 6427, 6451, 6452, 6453, 6497, 6498, 6499, 6500, 6501, 6502, 6503, 6509, 6510, 6511, 6512, 6514, 6519, 6520, 6521, 6522, 6523, 6533, 6534, 6535, 6536, 6537, 6538, 6539, 6540, 6541, 6542, 6543, 6544, 6545, 6546, 6549, 6550, 6551, 6552, 6553, 6554, 6555, 6556, 6557, 6558, 6588, 6589, 6599, 6600, 6601, 6602, 6603, 6604, 6605, 6606, 6611, 6612, 6613, 6614, 6615, 6616, 6617, 6618, 6619, 6620, 6621, 6622, 6623, 6624, 6625, 6626, 6627, 6628, 6629, 6630, 6631, 6632, 6633, 6634, 6638, 6639, 6640, 6641, 6642, 6643, 6644, 6665, 6666, 6667, 6668, 6669, 6670, 6675, 6676, 6677, 6678, 6679, 6680, 6681, 6682, 6683, 6684, 6685, 6686, 6688, 6689, 6697, 6698, 6699, 6700, 6701, 6713, 6714, 6715, 6717, 6719, 6721, 6723, 6724, 6754, 6755, 6756, 6757, 6758, 6759, 6760, 6761, 6762, 6763, 6764, 6796, 6797, 6798, 6799, 6800, 6805, 6806, 6807, 6808, 6809, 6814, 6815, 6816, 6817, 6818, 6824, 6825, 6826, 6827, 6828, 6829, 6830, 6831, 6832, 6833, 6834, 6838, 6847, 6853, 6854, 6855, 6856, 6857, 6860, 6861, 6862, 6863, 6864, 6865, 6866, 6867, 6868, 6869, 6872, 6873, 6875, 6876, 6877, 6878, 6879, 6885, 6888, 6889, 6890, 6891, 6892, 6893, 6894, 6895, 6896, 6897, 6898, 6899, 6900, 6901, 6902, 6903, 6904, 6905, 6906, 6907, 6908, 6909, 6910, 6911, 6912, 6913, 6914, 6915, 6916, 6917, 6918, 6919, 6920, 6921, 6922, 6923, 6924, 6925, 6926, 6927, 6928, 6929, 6930, 6931, 6932, 6933, 6934, 6935, 6936, 6953, 6954, 6955, 6956, 6957, 6958, 6959, 6960, 6962, 6963, 6964, 6965, 6966, 6967, 6968, 6969, 6970, 6971, 6972, 6973, 6983, 6984, 6985, 6988, 6989, 6990, 6991, 6992, 6993, 6994, 6995, 7007, 7008, 7009, 7010, 7011, 7012, 7015, 7016, 7017, 7018, 7019, 7020, 7021, 7034, 7035, 7084, 7086, 7087, 7088, 7089, 7090, 7091, 7092, 7128, 7137, 7138, 7139, 7140, 7141, 7142, 7143, 7144, 7145, 7146, 7147, 7148, 7149, 7150, 7151, 7152, 7153, 7154, 7155, 7195, 7196, 7197, 7198, 7200, 7201, 7202, 7203, 7204, 7205, 7206, 7207, 7208, 7209, 7210, 7211, 7212, 7213, 7214, 7215, 7216, 7217, 7218, 7219, 7220, 7221, 7222, 7223, 7224, 7225, 7226, 7227, 7228, 7229, 7230, 7231, 7232, 7233, 7234, 7235, 7236, 7237, 7238, 7239, 7240, 7241, 7243, 7244, 7245, 7246, 7247, 7248, 7249, 7250, 7251, 7252, 7253, 7254, 7255, 7256, 7257, 7258, 7259, 7260, 7261, 7262, 7263, 7264, 7265, 7266, 7267, 7268, 7269, 7270, 7271, 7291, 7292, 7293, 7294, 7295, 7296, 7297, 7298, 7347, 7348, 7349, 7358, 7359, 7360, 7361, 7362, 7363, 7364, 7365, 7372, 7373, 7374, 7375, 7376, 7377, 7378, 7383, 7415, 7416, 7417, 7437, 7438, 7458, 7459, 7460, 7461, 7467, 7468, 7469, 7470, 7471, 7472, 7473, 7474, 7475, 7476, 7477, 7490, 7496, 7497, 7498, 7499, 7500, 7501, 7502, 7503, 7504, 7505, 7506, 7507, 7508, 7509, 7510, 7511, 7512, 7513, 7514, 7515, 7532, 7533, 7534, 7535, 7537, 7538, 7539, 7540, 7541, 7542, 7543, 7544, 7545, 7546, 7547, 7548, 7549, 7550, 7551, 7552, 7553, 7554, 7555, 7556, 7557, 7558, 7559, 7560, 7585, 7586, 7587, 7588, 7589, 7590, 7591, 7592, 7593, 7595, 7596, 7597, 7599, 7600, 7601, 7617, 7618, 7619, 7620, 7621, 7622, 7623, 7638, 7668, 7669, 7670, 7672, 7673, 7674, 7675, 7676, 7685, 7687, 7694, 7695, 7696, 7717, 7718, 7719, 7720, 7721, 7722, 7723, 7724, 7725, 7726, 7727, 7728, 7729, 7730, 7731, 7732, 7733, 7734, 7735, 7736, 7738, 7739, 7740, 7741, 7742, 7743, 7744, 7746, 7747, 7748, 7749, 7750, 7751, 7752, 7757, 7758, 7759, 7760, 7761, 7762, 7763, 7764, 7765, 7766, 7767, 7768, 7796, 7797, 7805, 7813, 7814, 7815, 7816, 7817, 7818, 7819, 7820, 7821, 7822, 7823, 7824, 7825, 7826, 7827, 7828, 7829, 7830, 7831, 7832, 7833, 7848, 7849, 7850, 7851, 7852, 7853, 7854, 7859, 7860, 7861, 7862, 7863, 7864, 7865, 7866, 7867, 7869, 7870, 7874, 7875, 7917, 7918, 7919, 7925, 7926, 7927, 7928, 7929, 7941, 7942, 7943, 7944, 7945, 7946, 7947, 7948, 7949, 7950, 7951, 7952, 7953, 7955, 7956, 7957, 7958, 7959, 7960, 7961, 7962, 7963, 7964, 7965, 7966, 7967, 7968, 7969, 7970, 7971, 7972, 7974, 7975, 7976, 7977, 7978, 7979, 7980, 7981, 7982, 7983, 7984, 7985, 7986, 7987, 7988, 7989, 7990, 7991, 7992, 7993, 7994, 7995, 7996, 7997, 7998, 7999, 8000, 8011, 8012, 8013, 8014, 8015, 8016, 8017, 8018, 8019, 8020, 8021, 8022, 8023, 8024, 8025, 8026, 8027, 8028, 8029, 8030, 8048, 8049, 8050, 8051, 8052, 8053, 8054, 8055, 8056, 8057, 8087, 8088, 8089, 8090, 8091, 8092, 8095, 8096, 8097, 8098, 8099, 8100, 8101, 8102, 8103, 8104, 8105, 8106, 8107, 8110, 8111, 8112, 8113, 8114, 8115, 8116, 8117, 8118, 8119, 8120, 8121, 8122, 8123, 8124, 8125, 8126, 8127, 8130, 8131, 8132, 8133, 8134, 8135, 8136, 8144, 8145, 8151, 8152, 8153, 8154, 8155, 8156, 8157, 8166, 8169, 8170, 8171, 8172, 8173, 8174, 8175, 8176, 8177, 8178, 8179, 8180, 8181, 8182, 8188, 8191, 8192, 8193, 8194, 8195, 8196, 8197, 8198, 8199, 8200, 8201, 8202, 8203, 8204, 8205, 8206, 8207, 8208, 8209, 8210, 8211, 8212, 8215, 8221, 8227, 8230, 8231, 8232, 8233, 8234, 8235, 8236, 8237, 8238, 8239, 8240, 8241, 8242, 8243, 8244, 8245, 8246, 8247, 8248, 8249, 8250, 8251, 8260, 8261, 8262, 8263, 8264, 8265, 8266, 8267, 8268, 8269, 8270, 8271, 8272, 8273, 8274, 8275, 8276, 8277, 8278, 8279, 8280, 8281, 8282, 8283, 8284, 8299, 8302, 8303, 8304, 8305, 8306, 8315, 8316, 8317, 8353, 8354, 8355, 8356, 8357, 8358, 8359, 8360, 8361, 8375, 8376, 8377, 8378, 8379, 8380, 8381, 8382, 8383, 8384, 8385, 8386, 8387, 8388, 8389, 8390, 8391, 8392, 8393, 8394, 8397, 8398, 8399, 8400, 8401, 8402, 8403, 8404, 8405, 8406, 8410, 8411, 8412, 8419, 8420, 8421, 8422, 8423, 8424, 8425, 8426, 8440, 8459, 8460, 8461, 8462, 8463, 8473, 8474, 8475, 8476, 8477, 8478, 8508, 8509, 8510, 8511, 8512, 8514, 8515, 8533, 8534, 8546, 8547, 8548, 8549, 8550, 8551, 8552, 8553, 8554, 8555, 8570, 8571, 8572, 8573, 8574, 8575, 8576, 8577, 8578, 8579, 8580, 8581, 8582, 8586, 8587, 8593, 8594, 8595, 8596, 8597, 8601, 8602, 8603, 8604, 8605, 8610, 8611, 8612, 8613, 8614, 8615, 8617, 8618, 8641, 8642, 8643, 8644, 8645, 8646, 8647, 8648, 8655, 8686, 8709, 8712, 8713, 8714, 8715, 8716, 8717, 8718, 8719, 8720, 8721, 8722, 8723, 8724, 8725, 8726, 8727, 8728, 8729, 8730, 8731, 8732, 8733, 8734, 8770, 8771, 8788, 8789, 8790, 8791, 8792, 8793, 8794, 8795, 8796, 8797, 8798, 8799, 8800, 8801, 8802, 8803, 8804, 8805, 8806, 8810, 8811, 8817, 8818, 8819, 8820, 8821, 8822, 8823, 8829, 8830, 8837, 8838, 8839, 8840, 8841, 8848, 8849, 8850, 8851, 8854, 8855, 8856, 8857, 8858, 8859, 8860, 8861, 8862, 8863, 8864, 8865, 8867, 8868, 8872, 8873, 8874, 8875, 8876, 8878, 8879, 8880, 8881, 8882, 8883, 8884, 8885, 8886, 8887, 8888, 8889, 8890, 8891, 8892, 8893, 8894, 8895, 8896, 8897, 8898, 8899, 8900, 8901, 8902, 8903, 8904, 8906, 8913, 8914, 8915, 8916, 8917, 8918, 8919, 8920, 8921, 8925, 8926, 8927, 8928, 8933, 8934, 8935, 8936, 8937, 8938, 8939, 8940, 8941, 8942, 8943, 8944, 8945, 8946, 8947, 8948, 8949, 8950, 8951, 8954, 8955, 8956, 8992, 8993, 8994, 8995, 8996, 8997, 8998, 8999, 9000, 9001, 9002, 9003, 9010, 9011, 9012, 9013, 9014, 9018, 9019, 9020, 9021, 9022, 9023, 9024, 9025, 9026, 9027, 9028, 9029, 9030, 9031, 9041, 9042, 9043, 9044, 9045, 9046, 9047, 9048, 9049, 9050, 9051, 9052, 9053, 9054, 9055, 9056, 9057, 9058, 9059, 9065, 9066, 9087, 9088, 9089, 9090, 9091, 9092, 9093, 9094, 9095, 9096, 9097, 9098, 9103, 9104, 9105, 9106, 9107, 9108, 9109, 9110, 9123, 9124, 9125, 9126, 9127, 9128, 9129, 9130, 9131, 9133, 9134, 9135, 9136, 9137, 9145, 9146, 9147, 9148, 9149, 9150, 9151, 9160, 9161, 9162, 9163, 9201, 9202, 9203.

### Liver Cancer

[0735] There are two types of liver cancer, primary liver cancer which forms in the tissue of the liver and secondary liver cancer, or metastatic liver cancer, that spreads to the liver from another part of the body. Possible symptoms of liver cancer include, but are not limited to, a hard lump on the right side just below the rib cage, discomfort in the upper abdomen on the right side, pain around the right shoulder blade, unexplained weight loss, jaundice, unusual tiredness, nausea and loss of appetite.

[0736] In one embodiment, the oncology-related polynucleotides, oncology-related primary constructs or oncology-related mmRNA of the present invention may be used to treat a disease, disorder and/or condition in a subject who has been diagnosed or may be diagnosed with liver cancer by administering to said subject an isolated polynucleotide encoding an oncology-related polypeptide of interest. In one embodiment, the oncology-related polynucleotides, oncology-related primary constructs or oncology-related mmRNA of the present invention may be used to reduce, eliminate, or prevent tumor growth in a subject who has been diagnosed or may be diagnosed with liver cancer by administering to said subject an isolated polynucleotide encoding an oncology-related polypeptide of interest. In one embodiment, the oncology-related polynucleotides, oncology-related primary constructs or oncology-related mmRNA of the present invention may be used to reduce and/or ameliorate at least one symptom of cancer in a subject who has been diagnosed or may be diagnosed with liver cancer by administering to said subject an isolated polynucleotide encoding an oncology-related polypeptide of interest. In a further embodiment, the oncology-related polypeptide of interest may include, but not limited to, SEQ ID NOs: 4711, 4712, 4713, 4714, 4715, 4716, 4717, 4718, 4719, 4720, 4721, 4722, 4723, 4724, 4725, 4726, 4727, 4728, 4742, 4743, 4744, 4745, 4746, 4747, 4748, 4749, 4750, 4751, 4774, 4775, 4781, 4782, 4783, 4784, 4785, 4786, 4787, 4788, 4789, 4790, 4825, 4826, 4827, 4828, 4829, 4830, 4832, 4844, 4845, 4846, 4854, 4855, 4856, 4857, 4858, 4859, 4860, 4861, 4863, 4864, 4865, 4866, 4867, 4868, 4869, 4870, 4871, 4872, 4873, 4885, 4886, 4887, 4888, 4889, 4890, 4891, 4892, 4893, 4894, 4911, 4912, 4913, 4914, 4915, 4916, 4917, 4918, 4919, 4920, 4960, 4961, 4962, 4963, 4964, 4965, 4966, 4967, 4968, 4969, 4970, 4971, 4972, 4973, 4974, 4975, 4976, 4977, 4978, 4979, 4980, 4981, 4982, 4983, 4984, 4985, 4986, 4987, 4988, 4989, 4990, 4991, 4992, 4993, 4994, 4995, 4996, 4997, 4998, 4999, 5000, 5001, 5002, 5008, 5009, 5010, 5011, 5012, 5013, 5014, 5015, 5016, 5017, 5018, 5019, 5020, 5021, 5022, 5023, 5024, 5025, 5026, 5027, 5028, 5030, 5031, 5032, 5033, 5034, 5035, 5036, 5037, 5038, 5039, 5040, 5041, 5042, 5043, 5044, 5045, 5046, 5047, 5048, 5049, 5050, 5051, 5052, 5053, 5054, 5055, 5056, 5057, 5058, 5059, 5060, 5061, 5062, 5063, 5064, 5065, 5066, 5067, 5068, 5069, 5070, 5071, 5072, 5073, 5074, 5075, 5076, 5077, 5078, 5079, 5103, 5104, 5105, 5106, 5107, 5108, 5109, 5110, 5118, 5119, 5120, 5121, 5122, 5123, 5124, 5125, 5126, 5127, 5128, 5129, 5130, 5131, 5132, 5133, 5134, 5135, 5136, 5137, 5138, 5139, 5140, 5141, 5145, 5146, 5147, 5148, 5149, 5150, 5151, 5152, 5153, 5154, 5155, 5156, 5157, 5158, 5159, 5160, 5161, 5162, 5163, 5164, 5165, 5166, 5167, 5168, 5169, 5170, 5171, 5172, 5173, 5174, 5175, 5176, 5177, 5178, 5182, 5183, 5184, 5185, 5186, 5187, 5188, 5189, 5190, 5191, 5192, 5193, 5194, 5195, 5196, 5197, 5198, 5199, 5200, 5201, 5202, 5203, 5204, 5205, 5206, 5207, 5208, 5209, 5210, 5211, 5212, 5213, 5214, 5215, 5216, 5217, 5218, 5219, 5220, 5221, 5222, 5223, 5230, 5231, 5252, 5253, 5254, 5255, 5256, 5257, 5258, 5259, 5260, 5261, 5262, 5263, 5264, 5265, 5266, 5267, 5268, 5269, 5270, 5271, 5291, 5292, 5293, 5294, 5295, 5296, 5297, 5298, 5299, 5300, 5301, 5302, 5303, 5304, 5305, 5306, 5307, 5308, 5309, 5310, 5311, 5312, 5313, 5314, 5315, 5316, 5317, 5318, 5319, 5320, 5321, 5322, 5323, 5324, 5325, 5326, 5327, 5328, 5329, 5330, 5331, 5332, 5333, 5334, 5335, 5336, 5337, 5338, 5339, 5340, 5341, 5342, 5343, 5344, 5345, 5346, 5347, 5348, 5349, 5350, 5351, 5352, 5353, 5354, 5355, 5356, 5357, 5358, 5359, 5360, 5361, 5362, 5363, 5364, 5365, 5366, 5367, 5368, 5369, 5370, 5371, 5372, 5373, 5374, 5375, 5376, 5377, 5378, 5379, 5380, 5381, 5382, 5383, 5384, 5385, 5386, 5387, 5388, 5389, 5390, 5391, 5392, 5393, 5419, 5420, 5421, 5426, 5427, 5428, 5429, 5438, 5447, 5448, 5449, 5450, 5451, 5452, 5453, 5454, 5455, 5456, 5457, 5458, 5459, 5460, 5461, 5462, 5463, 5464, 5465, 5469, 5470, 5477, 5478, 5479, 5480, 5481, 5482, 5490, 5491, 5492, 5493, 5494, 5495, 5496, 5497, 5498, 5499, 5504, 5505, 5506, 5507, 5508, 5509, 5510, 5511, 5512, 5513, 5514, 5515, 5516, 5517, 5518, 5519, 5520, 5521, 5522, 5523, 5524, 5525, 5526, 5527, 5528, 5529, 5530, 5531, 5532, 5533, 5534, 5535, 5536, 5548, 5549, 5551, 5552, 5553, 5554, 5555, 5556, 5557, 5558, 5559, 5560, 5561, 5562, 5563, 5564, 5565, 5566, 5567, 5568, 5569, 5570, 5571, 5575, 5576, 5577, 5578, 5579, 5580, 5590, 5591, 5592, 5593, 5594, 5595, 5596, 5597, 5598, 5599, 5605, 5606, 5607, 5608, 5609, 5610, 5611, 5616, 5617, 5618, 5619, 5620, 5621, 5622, 5623, 5631, 5632, 5633, 5638, 5639, 5640, 5671, 5672, 5673, 5674, 5675, 5676, 5677, 5678, 5679, 5680, 5681, 5688, 5689, 5690, 5691, 5692, 5693, 5694, 5695, 5696, 5697, 5698, 5699, 5700, 5701, 5702, 5703, 5708, 5709, 5710, 5711, 5712, 5713, 5714, 5715, 5716, 5717, 5727, 5740, 5741, 5742, 5743, 5744, 5745, 5746, 5747, 5748, 5749, 5750, 5751, 5755, 5757, 5758, 5759, 5760, 5761, 5762, 5763, 5764, 5765, 5766, 5767, 5768, 5769, 5770, 5772, 5773, 5775, 5776, 5777, 5778, 5779, 5780, 5783, 5784, 5785, 5786, 5787, 5788, 5789, 5790, 5791, 5792, 5793, 5794, 5795, 5796, 5797, 5798, 5799, 5800, 5801, 5802, 5803, 5811, 5812, 5813, 5814, 5821, 5822, 5823, 5824, 5825, 5826, 5827, 5828, 5829, 5830, 5831, 5833, 5834, 5836, 5837, 5838, 5839, 5842, 5843, 5844, 5845, 5846, 5847, 5848, 5849, 5850, 5851, 5852, 5853, 5854, 5855, 5864, 5865, 5866, 5867, 5868, 5875, 5876, 5877, 5878, 5880, 5881, 5882, 5883, 5884, 5885, 5886, 5887, 5888, 5889, 5890, 5891, 5892, 5893, 5894, 5895, 5896, 5897, 5898, 5899, 5907, 5908, 5909, 5911, 5912, 5913, 5914, 5915, 5916, 5917, 5918, 5919, 5920, 5921, 5922, 5929, 5950, 5951, 5952, 5953, 5954, 5955, 5956, 5963, 5967, 5968, 5969, 5970, 5982, 5983, 5984, 5985, 5986, 5987, 5988, 5997, 5998, 5999, 6000, 6001, 6002, 6068, 6069, 6070, 6071, 6072, 6074, 6075, 6076, 6077, 6078, 6080, 6081, 6082, 6083, 6084, 6085, 6086, 6087, 6088, 6089, 6090, 6091, 6092, 6093, 6094, 6095, 6096, 6097, 6098, 6100, 6101, 6102, 6103, 6105, 6106, 6107, 6108, 6109, 6110, 6111, 6112, 6113, 6114, 6115, 6116, 6117, 6118, 6119, 6120, 6121, 6122, 6123, 6124, 6128, 6130, 6142, 6143, 6144, 6145, 6146, 6147, 6148, 6149, 6151, 6152, 6153, 6154, 6155, 6156, 6157, 6169, 6170, 6171, 6172, 6173, 6174, 6175, 6176, 6177, 6178, 6179, 6180, 6181, 6182, 6185, 6186, 6187, 6191, 6208, 6209, 6231, 6232, 6233, 6234, 6235, 6236, 6237, 6238, 6239, 6251, 6256, 6257, 6258, 6259, 6260, 6261, 6262, 6278, 6279, 6280, 6281, 6282, 6286, 6287, 6288, 6289, 6290, 6291, 6292, 6293, 6294, 6295, 6298, 6299, 6300, 6301, 6302, 6303, 6304, 6305, 6306, 6307, 6308, 6309, 6310, 6311, 6312, 6313, 6314, 6315, 6356, 6357, 6358, 6378, 6379, 6380, 6387, 6388, 6389, 6390, 6391, 6392, 6393, 6394, 6395, 6396, 6397, 6398, 6399, 6400, 6401, 6402, 6403, 6405, 6406, 6407, 6451, 6452, 6453, 6497, 6498, 6499, 6500, 6501, 6502, 6503, 6509, 6510, 6511, 6512, 6514, 6519, 6520, 6521, 6522, 6523, 6549, 6550, 6551, 6552, 6553, 6554, 6555, 6556, 6557, 6558, 6559, 6588, 6589, 6599, 6600, 6601, 6602, 6603, 6604, 6605, 6606, 6611, 6612, 6613, 6614, 6615, 6616, 6617, 6618, 6619, 6620, 6621, 6622, 6623, 6624, 6625, 6626, 6627, 6628, 6629, 6630, 6631, 6632, 6633, 6634, 6638, 6639, 6640, 6641, 6642, 6643, 6644, 6684, 6685, 6686, 6697, 6698, 6699, 6700, 6701, 6719, 6721, 6723, 6724, 6754, 6755, 6756, 6757, 6758, 6759, 6760, 6761, 6762, 6763, 6764, 6796, 6797, 6798, 6799, 6800, 6805, 6806, 6807, 6808, 6809, 6814, 6815, 6816, 6817, 6818, 6824, 6825, 6826, 6831, 6832, 6833, 6834, 6844, 6845, 6846, 6853, 6854, 6855, 6856, 6857, 6860, 6861, 6862, 6863, 6864, 6865, 6866, 6867, 6868, 6869, 6872, 6873, 6875, 6876, 6877, 6878, 6879, 6885, 6888, 6889, 6890, 6891, 6892, 6893, 6894, 6895, 6896, 6897, 6898, 6899, 6900, 6901, 6902, 6903, 6904, 6905, 6906, 6907, 6908, 6909, 6910, 6911, 6912, 6913, 6914, 6915, 6916, 6917, 6918, 6919, 6920, 6921, 6922, 6923, 6924, 6925, 6926, 6927, 6928, 6929, 6930, 6931, 6932, 6933, 6934, 6935, 6936, 6953, 6954, 6955, 6957, 6958, 6959, 6960, 6961, 6962, 6963, 6964, 6965, 6966, 6967, 6968, 6969, 6970, 6971, 6972, 6973, 6983, 6984, 6985, 6988, 6989, 6990, 6991, 6992, 6993, 6994, 6995, 7007, 7008, 7009, 7010, 7011, 7012, 7015, 7016, 7017, 7018, 7019, 7020, 7021, 7034, 7035, 7084, 7086, 7087, 7088, 7089, 7090, 7091, 7092, 7128, 7137, 7138, 7139, 7140, 7141, 7142, 7143, 7144, 7145, 7146, 7147, 7148, 7149, 7150, 7151, 7152, 7153, 7154, 7155, 7195, 7196, 7197, 7198, 7200, 7201, 7202, 7203, 7204, 7205, 7206, 7207, 7208, 7209, 7210, 7211, 7212, 7213, 7214, 7215, 7216, 7217, 7218, 7219, 7220, 7221, 7222, 7223, 7224, 7225, 7226, 7227, 7228, 7229, 7230, 7231, 7232, 7233, 7234, 7235, 7236, 7237, 7238, 7239, 7240, 7241, 7243, 7244, 7245, 7246, 7247, 7248, 7249, 7250, 7251, 7252, 7253, 7254, 7255, 7256, 7257, 7258, 7259, 7260, 7261, 7262, 7263, 7264, 7265, 7266, 7267, 7268, 7269, 7270, 7271, 7291, 7292, 7293, 7294, 7295, 7296, 7297, 7298, 7347, 7348, 7349, 7358, 7359, 7360, 7361, 7362, 7363, 7364, 7365, 7372, 7373, 7374, 7375, 7376, 7377, 7378, 7383, 7415, 7416, 7417, 7438, 7471, 7472, 7473, 7474, 7475, 7476, 7477, 7490, 7492, 7493, 7494, 7495, 7496, 7497, 7498, 7499, 7500, 7501, 7502, 7503, 7504, 7505, 7506, 7507, 7508, 7509, 7510, 7511, 7512, 7513, 7514, 7515, 7532, 7533, 7534, 7535, 7537, 7538, 7539, 7540, 7541, 7542, 7543, 7544, 7545, 7546, 7547, 7548, 7549, 7550, 7551, 7552, 7553, 7554, 7555, 7556, 7557, 7558, 7559, 7560, 7577, 7578, 7579, 7585, 7586, 7587, 7588, 7589, 7590, 7591, 7592, 7593, 7595, 7596, 7597, 7599, 7600, 7601, 7617, 7618, 7619, 7620, 7621, 7622, 7623, 7638, 7668, 7669, 7670, 7672, 7673, 7674, 7675, 7676, 7685, 7687, 7694, 7695, 7696, 7717, 7718, 7719, 7720, 7721, 7722, 7723, 7724, 7725, 7726, 7727, 7728, 7729, 7730, 7731, 7732, 7733, 7734, 7735, 7736, 7737, 7738, 7739, 7740, 7741, 7742, 7743, 7744, 7746, 7747, 7748, 7749, 7750, 7751, 7752, 7757, 7758, 7759, 7760, 7761, 7762, 7763, 7764, 7765, 7766, 7767, 7768, 7796, 7797, 7805, 7813, 7814, 7815, 7816, 7817, 7818, 7819, 7820, 7821, 7822, 7848, 7849, 7850, 7851, 7852, 7853, 7854, 7859, 7860, 7861, 7862, 7863, 7864, 7865, 7866, 7867, 7869, 7870, 7874, 7875, 7917, 7918, 7919, 7925, 7926, 7927, 7928, 7929, 7941, 7942, 7943, 7944, 7945, 7946, 7947, 7948, 7949, 7950, 7951, 7952, 7953, 7955, 7956, 7957, 7958, 7959, 7960, 7961, 7962, 7963, 7964, 7965, 7966, 7967, 7968, 7969, 7970, 7971, 7972, 7974, 7975, 7976, 7977, 7978, 7979, 7980, 7981, 7982, 7983, 7984, 7985, 7986, 7987, 7988, 7989, 7990, 7991, 7992, 7993, 7994, 7995, 7996, 7997, 7998, 7999, 8000, 8011, 8012, 8013, 8014, 8015, 8016, 8017, 8018, 8019, 8020, 8021, 8022, 8023, 8024, 8025, 8026, 8027, 8028, 8029, 8030, 8048, 8049, 8050, 8051, 8052, 8053, 8054, 8055, 8056, 8057, 8087, 8088, 8089, 8090, 8091, 8092, 8095, 8096, 8097, 8098, 8099, 8100, 8101, 8102, 8103, 8104, 8105, 8106, 8107, 8110, 8111, 8112, 8113, 8114, 8115, 8116, 8117, 8118, 8119, 8120, 8121, 8122, 8123, 8124, 8125, 8126, 8127, 8130, 8131, 8132, 8133, 8134, 8135, 8136, 8144, 8145, 8146, 8147, 8148, 8149, 8150, 8166, 8169, 8170, 8171, 8172, 8173, 8174, 8175, 8176, 8177, 8178, 8179, 8180, 8181, 8182, 8188, 8191, 8192, 8193, 8194, 8195, 8196, 8197, 8198, 8199, 8200, 8201, 8209, 8210, 8211, 8212, 8215, 8227, 8230, 8231, 8232, 8233, 8234, 8235, 8236, 8237, 8238, 8239, 8240, 8241, 8242, 8243, 8244, 8245, 8246, 8247, 8248, 8249, 8250, 8251, 8260, 8261, 8262, 8263, 8299, 8302, 8303, 8304, 8305, 8306, 8353, 8354, 8355, 8356, 8357, 8358, 8359, 8360, 8361, 8375, 8376, 8377, 8378, 8379, 8380, 8381, 8382, 8410, 8411, 8412, 8440, 8459, 8460, 8461, 8462, 8463, 8464, 8465, 8466, 8474, 8475, 8476, 8477, 8478, 8508, 8509, 8510, 8511, 8512, 8514, 8515, 8546, 8547, 8548, 8549, 8550, 8551, 8552, 8553, 8554, 8555, 8570, 8571, 8572, 8573, 8574, 8575, 8576, 8577, 8578, 8579, 8580, 8581, 8583, 8586, 8587, 8593, 8594, 8595, 8596, 8597, 8601, 8602, 8603, 8604, 8605, 8615, 8617, 8618, 8655, 8686, 8709, 8712, 8713, 8714, 8715, 8716, 8717, 8718, 8719, 8720, 8721, 8722, 8723, 8724, 8725, 8726, 8727, 8728, 8729, 8730, 8731, 8732, 8733, 8734, 8735, 8736, 8770, 8771, 8788, 8789, 8790, 8791, 8792, 8793, 8794, 8795, 8796, 8797, 8798, 8799, 8800, 8801, 8802, 8803, 8804, 8805, 8806, 8810, 8811, 8817, 8818, 8819, 8820, 8821, 8822, 8823, 8829, 8830, 8837, 8838, 8839, 8840, 8841, 8848, 8849, 8850, 8851, 8854, 8855, 8856, 8857, 8858, 8859, 8860, 8861, 8862, 8863, 8864, 8865, 8867, 8868, 8872, 8873, 8874, 8875, 8876, 8878, 8879, 8880, 8881, 8882, 8883, 8884, 8885, 8886, 8887, 8888, 8889, 8890, 8891, 8892, 8893, 8894, 8895, 8896, 8897, 8898, 8899, 8900, 8901, 8902, 8903, 8904, 8906, 8913, 8914, 8915, 8916, 8917, 8918, 8919, 8920, 8921, 8925, 8926, 8927, 8928, 8933, 8934, 8935, 8936, 8937, 8938, 8939, 8940, 8941, 8942, 8943, 8944, 8945, 8946, 8947, 8948, 8949, 8950, 8951, 8954, 8955, 8956, 8992, 8993, 8994, 8995, 8996, 8997, 8998, 8999, 9000, 9001, 9002, 9003, 9010, 9011, 9012, 9013, 9014, 9018, 9019, 9020, 9021, 9022, 9023, 9024, 9025, 9026, 9027, 9028, 9029, 9030, 9031, 9041, 9042, 9043, 9044, 9045, 9046, 9047, 9048, 9049, 9050, 9051, 9052, 9053, 9054, 9055, 9056, 9057, 9058, 9059, 9065, 9066, 9067, 9068, 9069, 9070, 9071, 9072, 9073, 9074, 9087, 9088, 9091, 9092, 9093, 9094, 9095, 9096, 9097, 9098, 9103, 9104, 9105, 9106, 9107, 9108, 9109, 9110, 9123, 9124, 9125, 9126, 9127, 9128, 9129, 9130, 9131, 9133, 9134, 9135, 9136, 9137, 9145, 9146, 9147, 9148, 9149, 9150, 9151, 9153, 9154, 9155, 9156, 9157, 9158, 9159, 9160, 9161, 9162, 9163, 9201, 9203.

### Lung Cancer

[0737] Lung cancer forms in the tissues of the lung usually in the cells lining the air passages and is classified as either small cell lung cancer or non-small cell lung cancer. There are two types of small cell lung cancer, small cell carcinoma and combined small cell carcinoma. The types of on-small cell lung cancer are squamous cell carcinoma (cancer begins in the squamous cells), large cell carcinoma (cancer may begin in several types of cells) and adenocarcinoma (cancer begins in the cells that line the alveoli and in cells that make mucus). Symptoms of lung cancer include, but are not limited to, chest discomfort or pain, cough that does not go away or gets worse over time, trouble breathing, wheezing, blood in the sputum, hoarseness, loss of appetite, weight loss for no known reason, feeling very tired, trouble swallowing and swelling in the face and/or veins in the neck.

[0738] In one embodiment, the oncology-related polynucleotides, oncology-related primary constructs or oncology-related mmRNA of the present invention may be used to treat a disease, disorder and/or condition in a subject who has been diagnosed or may be diagnosed with lung cancer by administering to said subject an isolated polynucleotide encoding an oncology-related polypeptide of interest. In one embodiment, the oncology-related polynucleotides, oncology-related primary constructs or oncology-related mmRNA of the present invention may be used to reduce, eliminate, or prevent tumor growth in a subject who has been diagnosed or may be diagnosed with lung cancer by administering to said subject an isolated polynucleotide encoding an oncology-related polypeptide of interest. In one embodiment, the oncology-related polynucleotides, oncology-related primary constructs or oncology-related mmRNA of the present invention may be used to reduce and/or ameliorate at least one symptom of cancer in a subject who has been diagnosed or may be diagnosed with lung cancer by administering to said subject an isolated polynucleotide encoding an oncology-related polypeptide of interest. In a further embodiment, the oncology-related polypeptide of interest may include, but not limited to, SEQ ID NOs: 4711, 4712, 4713, 4714, 4715, 4716, 4717, 4718, 4719, 4720, 4721, 4722, 4723, 4724, 4725, 4726, 4727, 4728, 4742, 4743, 4744, 4745, 4746, 4747, 4748, 4749, 4750, 4751, 4781, 4782, 4783, 4784, 4785, 4786, 4787, 4788, 4789, 4790, 4791, 4797, 4798, 4799, 4800, 4801, 4802, 4803, 4804, 4805, 4806, 4807, 4808, 4825, 4826, 4827, 4828, 4829, 4830, 4831, 4832, 4851, 4852, 4853, 4854, 4855, 4856, 4857, 4858, 4859, 4860, 4861, 4863, 4864, 4865, 4866, 4867, 4868, 4869, 4870, 4871, 4872, 4873, 4885, 4886, 4887, 4888, 4889, 4890, 4891, 4892, 4893, 4894, 4911, 4912, 4913, 4914, 4915, 4916, 4917, 4918, 4919, 4920, 4960, 4961, 4962, 4963, 4964, 4965, 4966, 4967, 4968, 4969, 4970, 4971, 4972, 4973, 4974, 4975, 4976, 4977, 4978, 4979, 4980, 4981, 4982, 4983, 4984, 4985, 4986, 4987, 4988, 4989, 4990, 4991, 4992, 4993, 4994, 4995, 4996, 4997, 4998, 4999, 5000, 5001, 5002, 5008, 5009, 5010, 5011, 5012, 5013, 5014, 5015, 5016, 5017, 5018, 5019, 5020, 5021, 5022, 5023, 5024, 5025, 5026, 5027, 5028, 5030, 5031, 5032, 5033, 5034, 5035, 5036, 5037, 5038, 5039, 5040, 5041, 5042, 5043, 5044, 5045, 5046, 5047, 5048, 5049, 5050, 5051, 5052, 5053, 5054, 5055, 5056, 5057, 5058, 5059, 5060, 5061, 5062, 5063, 5064, 5065, 5066, 5067, 5068, 5069, 5070, 5071, 5072, 5073, 5074, 5075, 5076, 5077, 5078, 5079, 5103, 5104, 5105, 5106, 5107, 5108, 5109, 5110, 5118, 5119, 5120, 5121, 5122, 5123, 5124, 5125, 5126, 5127, 5128, 5129, 5130, 5131, 5132, 5133, 5134, 5135, 5136, 5137, 5138, 5139, 5140, 5141, 5145, 5146, 5147, 5148, 5149, 5150, 5151, 5152, 5153, 5154, 5155, 5156, 5157, 5158, 5159, 5160, 5161, 5162, 5163, 5164, 5165, 5166, 5167, 5168, 5169, 5170, 5171, 5172, 5173, 5174, 5175, 5176, 5177, 5178, 5182, 5183, 5184, 5185, 5186, 5187, 5188, 5189, 5190, 5191, 5192, 5193, 5194, 5195, 5196, 5197, 5198, 5199, 5200, 5201, 5202, 5203, 5204, 5205, 5206, 5207, 5208, 5209, 5210, 5211, 5212, 5213, 5214, 5215, 5216, 5217, 5218, 5219, 5220, 5221, 5222, 5223, 5230, 5231, 5252, 5253, 5254, 5255, 5256, 5257, 5258, 5259, 5260, 5261, 5262, 5263, 5264, 5265, 5266, 5267, 5268, 5269, 5270, 5271, 5282, 5283, 5286, 5287, 5288, 5289, 5291, 5292, 5293, 5294, 5295, 5296, 5297, 5298, 5299, 5300, 5301, 5302, 5303, 5304, 5305, 5306, 5307, 5308, 5309, 5310, 5311, 5312, 5313, 5314, 5315, 5316, 5317, 5318, 5319, 5320, 5321, 5322, 5323, 5324, 5325, 5326, 5327, 5328, 5329, 5330, 5331, 5332, 5333, 5334, 5335, 5336, 5337, 5338, 5339, 5340, 5341, 5342, 5343, 5344, 5345, 5346, 5347, 5348, 5349, 5350, 5351, 5352, 5353, 5354, 5355, 5356, 5357, 5358, 5359, 5360, 5361, 5362, 5363, 5364, 5365, 5366, 5367, 5368, 5369, 5370, 5371, 5372, 5373, 5374, 5375, 5376, 5377, 5378, 5379, 5380, 5381, 5382, 5383, 5384, 5385, 5386, 5387, 5388, 5389, 5390, 5391, 5392, 5393, 5419, 5420, 5421, 5426, 5427, 5428, 5429, 5438, 5447, 5448, 5449, 5450, 5451, 5452, 5453, 5454, 5455, 5456, 5457, 5458, 5459, 5460, 5461, 5462, 5463, 5464, 5465, 5469, 5470, 5477, 5478, 5479, 5480, 5481, 5482, 5490, 5491, 5492, 5493, 5494, 5495, 5496, 5497, 5498, 5499, 5500, 5501, 5502, 5503, 5504, 5505, 5506, 5507, 5508, 5509, 5510, 5511, 5512, 5513, 5514, 5515, 5516, 5517, 5518, 5519, 5520, 5521, 5522, 5523, 5524, 5525, 5526, 5527, 5528, 5529, 5530, 5531, 5532, 5533, 5534, 5535, 5536, 5548, 5549, 5551, 5552, 5553, 5554, 5555, 5556, 5557, 5558, 5559, 5560, 5561, 5562, 5563, 5564, 5565, 5566, 5567, 5568, 5569, 5570, 5571, 5577, 5578, 5579, 5580, 5582, 5583, 5584, 5585, 5586, 5587, 5590, 5591, 5592, 5593, 5594, 5595, 5596, 5600, 5601, 5602, 5603, 5604, 5605, 5606, 5607, 5608, 5609, 5610, 5611, 5616, 5617, 5618, 5619, 5620, 5621, 5622, 5623, 5624, 5625, 5626, 5631, 5632, 5633, 5638, 5639, 5640, 5648, 5649, 5650, 5651, 5652, 5653, 5671, 5672, 5673, 5674, 5675, 5676, 5677, 5678, 5679, 5680, 5681, 5688, 5689, 5690, 5691, 5692, 5693, 5694, 5695, 5696, 5697, 5698, 5699, 5700, 5701, 5702, 5703, 5708, 5709, 5710, 5711, 5712, 5713, 5714, 5715, 5716, 5717, 5727, 5743, 5744, 5745, 5746, 5747, 5748, 5749, 5750, 5751, 5755, 5757, 5758, 5759, 5760, 5761, 5762, 5763, 5764, 5765, 5766, 5767, 5768, 5769, 5770, 5772, 5773, 5775, 5776, 5777, 5778, 5779, 5780, 5783, 5784, 5785, 5786, 5787, 5788, 5789, 5790, 5791, 5792, 5793, 5794, 5795, 5796, 5797, 5798, 5799, 5800, 5801, 5802, 5803, 5804, 5805, 5806, 5807, 5808, 5809, 5810, 5815, 5816, 5817, 5821, 5822, 5823, 5824, 5825, 5826, 5827, 5828, 5829, 5830, 5831, 5833, 5834, 5836, 5837, 5838, 5839, 5840, 5841, 5848, 5849, 5850, 5851, 5852, 5853, 5854, 5855, 5864, 5865, 5866, 5867, 5868, 5875, 5876, 5877, 5878, 5880, 5881, 5882, 5883, 5884, 5885, 5886, 5887, 5888, 5889, 5890, 5891, 5892, 5893, 5894, 5895, 5896, 5897, 5898, 5899, 5906, 5907, 5908, 5909, 5911, 5912, 5913, 5914, 5915, 5916, 5917, 5918, 5919, 5920, 5921, 5922, 5929, 5950, 5951, 5952, 5953, 5954, 5955, 5956, 5963, 5964, 5965, 5966, 5967, 5969, 5970, 5982, 5983, 5984, 5985, 5986, 5987, 5988, 5997, 5998, 5999, 6000, 6001, 6002, 6029, 6068, 6069, 6070, 6071, 6072, 6074, 6075, 6076, 6077, 6078, 6080, 6081, 6082, 6083, 6084, 6085, 6086, 6087, 6088, 6089, 6090, 6091, 6092, 6093, 6094, 6095, 6096, 6097, 6098, 6100, 6101, 6102, 6103, 6105, 6106, 6107, 6108, 6109, 6110, 6111, 6112, 6113, 6114, 6115, 6116, 6117, 6118, 6119, 6120, 6121, 6122, 6123, 6124, 6128, 6130, 6142, 6143, 6144, 6145, 6146, 6147, 6148, 6149, 6151, 6152, 6153, 6154, 6155, 6156, 6157, 6169, 6170, 6171, 6172, 6173, 6174, 6175, 6176, 6177, 6178, 6179, 6180, 6181, 6182, 6185, 6186, 6187, 6188, 6191, 6208, 6209, 6231, 6232, 6233, 6234, 6235, 6236, 6237, 6238, 6239, 6251, 6256, 6257, 6258, 6259, 6260, 6261, 6262, 6278, 6279, 6280, 6281, 6282, 6286, 6287, 6288, 6289, 6290, 6298, 6299, 6300, 6301, 6302, 6303, 6304, 6305, 6306, 6307, 6308, 6309, 6310, 6311, 6312, 6313, 6314, 6315, 6356, 6357, 6358, 6360, 6361, 6362, 6363, 6364, 6375, 6376, 6377, 6378, 6379, 6387, 6388, 6389, 6390, 6391, 6392, 6393, 6394, 6395, 6396, 6397, 6398, 6399, 6400, 6401, 6402, 6403, 6405, 6406, 6407, 6451, 6452, 6453, 6497, 6498, 6499, 6500, 6501, 6502, 6503, 6509, 6510, 6511, 6512, 6513, 6514, 6515, 6516, 6517, 6518, 6519, 6520, 6521, 6522, 6523, 6549, 6550, 6551, 6552, 6553, 6554, 6555, 6556, 6557, 6558, 6588, 6589, 6599, 6600, 6601, 6602, 6603, 6604, 6605, 6606, 6611, 6612, 6613, 6614, 6615, 6616, 6617, 6618, 6619, 6620, 6621, 6622, 6623, 6624, 6625, 6626, 6627, 6628, 6629, 6630, 6631, 6632, 6633, 6634, 6638, 6639, 6640, 6641, 6642, 6643, 6644, 6645, 6646, 6684, 6685, 6686, 6697, 6698, 6699, 6700, 6701, 6719, 6720, 6721, 6723, 6724, 6754, 6755, 6756, 6757, 6758, 6759, 6760, 6761, 6762, 6763, 6764, 6796, 6797, 6798, 6799, 6800, 6802, 6803, 6805, 6806, 6807, 6808, 6809, 6814, 6815, 6816, 6817, 6818, 6824, 6825, 6826, 6831, 6832, 6833, 6834, 6839, 6840, 6841, 6842, 6843, 6853, 6854, 6855, 6856, 6857, 6860, 6861, 6862, 6863, 6864, 6865, 6866, 6867, 6868, 6869, 6872, 6873, 6874, 6875, 6876, 6877, 6878, 6879, 6885, 6888, 6889, 6890, 6891, 6892, 6893, 6894, 6895, 6896, 6897, 6898, 6899, 6900, 6901, 6902, 6903, 6904, 6905, 6906, 6907, 6908, 6909, 6910, 6911, 6912, 6913, 6914, 6915, 6916, 6917, 6918, 6919, 6920, 6921, 6922, 6923, 6924, 6925, 6926, 6927, 6928, 6929, 6930, 6931, 6932, 6933, 6934, 6935, 6936, 6953, 6954, 6955, 6957, 6958, 6959, 6960, 6962, 6963, 6964, 6965, 6966, 6967, 6968, 6969, 6970, 6971, 6972, 6973, 6974, 6975, 6976, 6977, 6978, 6979, 6980, 6981, 6982, 6983, 6984, 6985, 6988, 6989, 6990, 6991, 6992, 6993, 6994, 6995, 7007, 7008, 7009, 7010, 7011, 7012, 7015, 7016, 7017, 7018, 7019, 7020, 7021, 7034, 7035, 7084, 7085, 7086, 7087, 7088, 7089, 7090, 7091, 7092, 7128, 7137, 7138, 7139, 7140, 7141, 7142, 7143, 7144, 7145, 7146, 7147, 7148, 7149, 7150, 7151, 7152, 7153, 7154, 7155, 7195, 7196, 7197, 7198, 7200, 7201, 7202, 7203, 7204, 7205, 7206, 7207, 7208, 7209, 7210, 7211, 7212, 7213, 7214, 7215, 7216, 7217, 7218, 7219, 7220, 7221, 7222, 7223, 7224, 7225, 7226, 7227, 7228, 7229, 7230, 7231, 7232, 7233, 7234, 7235, 7236, 7237, 7238, 7239, 7240, 7241, 7243, 7244, 7245, 7246, 7247, 7248, 7249, 7250, 7251, 7252, 7253, 7254, 7255, 7256, 7257, 7258, 7259, 7260, 7261, 7262, 7263, 7264, 7265, 7266, 7267, 7268, 7269, 7270, 7271, 7291, 7292, 7293, 7294, 7295, 7296, 7297, 7298, 7299, 7300, 7301, 7302, 7303, 7304, 7347, 7348, 7349, 7350, 7351, 7352, 7353, 7354, 7358, 7359, 7360, 7361, 7362, 7363, 7364, 7365, 7372, 7373, 7374, 7375, 7376, 7377, 7378, 7383, 7415, 7416, 7417, 7438, 7471, 7472, 7473, 7474, 7475, 7476, 7477, 7490, 7496, 7497, 7498, 7499, 7500, 7501, 7502, 7503, 7504, 7505, 7506, 7507, 7508, 7509, 7510, 7511, 7512, 7513, 7514, 7515, 7516, 7517, 7518, 7519, 7520, 7521, 7522, 7523, 7524, 7525, 7526, 7532, 7533, 7534, 7535, 7537, 7538, 7539, 7540, 7541, 7542, 7543, 7544, 7545, 7546, 7547, 7548, 7549, 7550, 7551, 7552, 7553, 7554, 7555, 7556, 7557, 7558, 7559, 7560, 7585, 7586, 7587, 7588, 7589, 7590, 7591, 7592, 7593, 7595, 7596, 7597, 7599, 7600, 7601, 7617, 7618, 7619, 7620, 7621, 7622, 7623, 7638, 7668, 7669, 7670, 7672, 7673, 7674, 7675, 7676, 7685, 7687, 7694, 7695, 7696, 7717, 7718, 7719, 7720, 7721, 7722, 7723, 7724, 7725, 7726, 7727, 7728, 7729, 7730, 7731, 7732, 7733, 7734, 7735, 7736, 7737, 7738, 7739, 7740, 7741, 7742, 7743, 7744, 7746, 7747, 7748, 7749, 7750, 7751, 7752, 7757, 7758, 7759, 7760, 7761, 7762, 7763, 7764, 7765, 7766, 7767, 7768, 7796, 7797, 7805, 7813, 7814, 7815, 7816, 7817, 7818, 7819, 7820, 7821, 7822, 7848, 7849, 7850, 7851, 7852, 7853, 7854, 7859, 7860, 7861, 7862, 7863, 7864, 7865, 7866, 7867, 7869, 7870, 7874, 7875, 7881, 7886, 7887, 7888, 7889, 7890, 7891, 7892, 7893, 7917, 7918, 7919, 7925, 7926, 7927, 7928, 7929, 7941, 7942, 7943, 7944, 7945, 7946, 7947, 7948, 7949, 7950, 7951, 7952, 7953, 7955, 7956, 7957, 7958, 7959, 7960, 7961, 7962, 7963, 7964, 7965, 7966, 7967, 7968, 7969, 7970, 7971, 7972, 7974, 7975, 7976, 7977, 7978, 7979, 7980, 7981, 7982, 7983, 7984, 7985, 7986, 7987, 7988, 7989, 7990, 7991, 7992, 7993, 7994, 7995, 7996, 7997, 7998, 7999, 8000, 8011, 8012, 8013, 8014, 8015, 8016, 8017, 8018, 8019, 8020, 8021, 8022, 8023, 8024, 8025, 8026, 8027, 8028, 8029, 8030, 8048, 8049, 8050, 8051, 8052, 8053, 8054, 8055, 8056, 8057, 8087, 8088, 8089, 8090, 8091, 8092, 8093, 8094, 8095, 8096, 8097, 8098, 8099, 8100, 8101, 8102, 8103, 8104, 8105, 8106, 8107, 8110, 8111, 8112, 8113, 8114, 8115, 8116, 8117, 8118, 8119, 8120, 8121, 8122, 8123, 8124, 8125, 8126, 8127, 8130, 8131, 8132, 8133, 8134, 8135, 8136, 8144, 8145, 8166, 8169, 8170, 8171, 8172, 8173, 8174, 8175, 8176, 8177, 8178, 8179, 8180, 8181, 8182, 8188, 8191, 8192, 8193, 8194, 8195, 8196, 8197, 8198, 8199, 8200, 8201, 8209, 8210, 8211, 8212, 8215, 8227, 8230, 8231, 8232, 8233, 8234, 8235, 8236, 8237, 8238, 8239, 8240, 8241, 8242, 8243, 8244, 8245, 8246, 8247, 8248, 8249, 8250, 8251, 8260, 8261, 8262, 8263, 8299, 8302, 8303, 8304, 8305, 8306, 8307, 8308, 8326, 8353, 8354, 8355, 8356, 8357, 8358, 8359, 8360, 8361, 8375, 8376, 8377, 8378, 8379, 8380, 8381, 8382, 8407, 8408, 8409, 8410, 8411, 8412, 8440, 8459, 8460, 8461, 8462, 8463, 8467, 8468, 8474, 8475, 8476, 8477, 8478, 8508, 8509, 8510, 8511, 8512, 8514, 8515, 8546, 8547, 8548, 8549, 8550, 8551, 8552, 8553, 8554, 8555, 8570, 8571, 8572, 8573, 8574, 8575, 8576, 8577, 8578, 8579, 8580, 8581, 8586, 8587, 8593, 8594, 8595, 8596, 8597, 8598, 8599, 8600, 8601, 8602, 8603, 8604, 8605, 8615, 8617, 8618, 8655, 8686, 8709, 8712, 8713, 8714, 8715, 8716, 8717, 8718, 8719, 8720, 8721, 8722, 8723, 8724, 8725, 8726, 8727, 8728, 8729, 8730, 8731, 8732, 8733, 8734, 8768, 8769, 8770, 8771, 8772, 8773, 8788, 8789, 8790, 8791, 8792, 8793, 8794, 8795, 8796, 8797, 8798, 8799, 8800, 8801, 8802, 8803, 8804, 8805, 8806, 8810, 8811, 8817, 8818, 8819, 8820, 8821, 8822, 8823, 8829, 8830, 8837, 8838, 8839, 8840, 8841, 8848, 8849, 8850, 8851, 8854, 8855, 8856, 8857, 8858, 8859, 8860, 8861, 8862, 8863, 8864, 8865, 8867, 8868, 8872, 8873, 8874, 8875, 8876, 8878, 8879, 8880, 8881, 8882, 8883, 8884, 8885, 8886, 8887, 8888, 8889, 8890, 8891, 8892, 8893, 8894, 8895, 8896, 8897, 8898, 8899, 8900, 8901, 8902, 8903, 8904, 8906, 8913, 8914, 8915, 8916, 8917, 8918, 8919, 8920, 8921, 8925, 8926, 8927, 8928, 8933, 8934, 8935, 8936, 8937, 8938, 8939, 8940, 8941, 8942, 8943, 8944, 8945, 8946, 8947, 8948, 8949, 8950, 8951, 8954, 8955, 8956, 8992, 8993, 8994, 8995, 8996, 8997, 8998, 8999, 9000, 9001, 9002, 9003, 9010, 9011, 9012, 9013, 9014, 9018, 9019, 9020, 9021, 9022, 9023, 9024, 9025, 9026, 9027, 9028, 9029, 9030, 9031, 9041, 9042, 9043, 9044, 9045, 9046, 9047, 9048, 9049, 9050, 9051, 9052, 9053, 9054, 9055, 9056, 9057, 9058, 9059, 9065, 9066, 9087, 9088, 9091, 9092, 9093, 9094, 9095, 9096, 9097, 9098, 9103, 9104, 9105, 9106, 9107, 9108, 9109, 9110, 9123, 9124, 9125, 9126, 9127, 9128, 9129, 9130, 9131, 9133, 9134, 9135, 9136, 9137, 9145, 9146, 9147, 9148, 9149, 9150, 9151, 9160, 9161, 9162, 9163, 9201, 9203.

### Lymphoma

[0739] Lymphoma is cancer that beings in the cells of the immune system. Subjects who have Hodgkin lymphoma have a cell called Reed-Sternberg cell and non-Hodgkin lymphoma includes a large group of cancers of immune system cells. Examples of Lymphoma include, but are not limited to, painless, swollen lymph nodes in the neck, underarm or groin, fever for no known reason, drenching night sweats, weight loss for no known reason, itchy skin and fatigue.

[0740] In one embodiment, the oncology-related polynucleotides, oncology-related primary constructs or oncology-related mmRNA of the present invention may be used to treat a disease, disorder and/or condition in a subject who has been diagnosed or may be diagnosed with lymphoma by administering to said subject an isolated polynucleotide encoding an oncology-related polypeptide of interest. In one embodiment, the oncology-related polynucleotides, oncology-related primary constructs or oncology-related mmRNA of the present invention may be used to reduce, eliminate, or prevent tumor growth in a subject who has been diagnosed or may be diagnosed with lymphoma by administering to said subject an isolated polynucleotide encoding an oncology-related polypeptide of interest. In one embodiment, the oncology-related polynucleotides, oncology-related primary constructs or oncology-related mmRNA of the present invention may be used to reduce and/or ameliorate at least one symptom of cancer in a subject who has been diagnosed or may be diagnosed with lymphoma by administering to said subject an isolated polynucleotide encoding an oncology-related polypeptide of interest. In a further embodiment, the oncology-related polypeptide of interest may include, but not limited to, SEQ ID NOs: 4711, 4712, 4713, 4714, 4715, 4716, 4717, 4718, 4719, 4720, 4721, 4722, 4723, 4724, 4725, 4726, 4727, 4728, 4742, 4743, 4744, 4745, 4746, 4747, 4748, 4749, 4750, 4751, 4781, 4782, 4783, 4784, 4785, 4786, 4787, 4788, 4789, 4790, 4809, 4810, 4811, 4812, 4813, 4814, 4825, 4826, 4827, 4828, 4829, 4830, 4832, 4833, 4834, 4850, 4854, 4855, 4856, 4857, 4858, 4859, 4860, 4861, 4863, 4864, 4865, 4866, 4867, 4868, 4869, 4870, 4871, 4872, 4873, 4885, 4886, 4887, 4888, 4889, 4890, 4891, 4892, 4893, 4894, 4911, 4912, 4913, 4914, 4915, 4916, 4917, 4918, 4919, 4920, 4960, 4961, 4962, 4963, 4964, 4965, 4966, 4967, 4968, 4969, 4970, 4971, 4972, 4973, 4974, 4975, 4976, 4977, 4978, 4979, 4980, 4981, 4982, 4983, 4984, 4985, 4986, 4987, 4988, 4989, 4990, 4991, 4992, 4993, 4994, 4995, 4996, 4997, 4998, 4999, 5000, 5001, 5002, 5003, 5004, 5005, 5006, 5007, 5008, 5009, 5010, 5011, 5012, 5013, 5014, 5015, 5016, 5017, 5018, 5019, 5020, 5021, 5022, 5023, 5024, 5025, 5026, 5027, 5028, 5030, 5031, 5032, 5033, 5034, 5035, 5036, 5037, 5038, 5039, 5040, 5041, 5042, 5043, 5044, 5045, 5046, 5047, 5048, 5049, 5050, 5051, 5052, 5053, 5054, 5055, 5056, 5057, 5058, 5059, 5060, 5061, 5062, 5063, 5064, 5065, 5066, 5067, 5068, 5069, 5070, 5071, 5072, 5073, 5074, 5075, 5076, 5077, 5078, 5079, 5103, 5104, 5105, 5106, 5107, 5108, 5109, 5110, 5118, 5119, 5120, 5121, 5122, 5123, 5124, 5125, 5126, 5127, 5128, 5129, 5130, 5131, 5132, 5133, 5134, 5135, 5136, 5137, 5138, 5139, 5140, 5141, 5145, 5146, 5147, 5148, 5149, 5150, 5151, 5152, 5153, 5154, 5155, 5156, 5157, 5158, 5159, 5160, 5161, 5162, 5163, 5164, 5165, 5166, 5167, 5168, 5169, 5170, 5171, 5172, 5173, 5174, 5175, 5176, 5177, 5178, 5182, 5183, 5184, 5185, 5186, 5187, 5188, 5189, 5190, 5191, 5192, 5193, 5194, 5195, 5196, 5197, 5198, 5199, 5200, 5201, 5202, 5203, 5204, 5205, 5206, 5207, 5208, 5209, 5210, 5211, 5212, 5213, 5214, 5215, 5216, 5217, 5218, 5219, 5220, 5221, 5222, 5223, 5230, 5231, 5252, 5253, 5254, 5255, 5256, 5257, 5258, 5259, 5260, 5261, 5262, 5263, 5264, 5265, 5266, 5267, 5268, 5269, 5270, 5271, 5291, 5292, 5293, 5294, 5295, 5296, 5297, 5298, 5299, 5300, 5301, 5302, 5303, 5304, 5305, 5306, 5307, 5308, 5309, 5310, 5311, 5312, 5313, 5314, 5315, 5316, 5317, 5318, 5319, 5320, 5321, 5322, 5323, 5324, 5325, 5326, 5327, 5328, 5329, 5330, 5331, 5332, 5333, 5334, 5335, 5336, 5337, 5338, 5339, 5340, 5341, 5342, 5343, 5344, 5345, 5346, 5347, 5348, 5349, 5350, 5351, 5352, 5353, 5354, 5355, 5356, 5357, 5358, 5359, 5360, 5361, 5362, 5363, 5364, 5365, 5366, 5367, 5368, 5369, 5370, 5371, 5372, 5373, 5374, 5375, 5376, 5377, 5378, 5379, 5380, 5381, 5382, 5383, 5384, 5385, 5386, 5387, 5388, 5389, 5390, 5391, 5392, 5393, 5419, 5420, 5421, 5426, 5427, 5428, 5429, 5430, 5431, 5432, 5433, 5434, 5435, 5436, 5437, 5438, 5439, 5440, 5441, 5442, 5443, 5444, 5445, 5446, 5447, 5448, 5449, 5450, 5451, 5452, 5453, 5454, 5455, 5456, 5457, 5458, 5459, 5460, 5461, 5462, 5463, 5464, 5465, 5466, 5467, 5468, 5469, 5470, 5471, 5472, 5473, 5474, 5475, 5476, 5477, 5478, 5479, 5480, 5481, 5482, 5483, 5484, 5485, 5486, 5487, 5488, 5489, 5490, 5491, 5492, 5493, 5494, 5495, 5496, 5497, 5498, 5499, 5500, 5501, 5502, 5503, 5504, 5505, 5506, 5507, 5508, 5509, 5510, 5511, 5512, 5513, 5514, 5515, 5516, 5517, 5518, 5519, 5520, 5521, 5522, 5523, 5524, 5525, 5526, 5527, 5528, 5529, 5530, 5531, 5532, 5533, 5534, 5535, 5536, 5548, 5549, 5551, 5552, 5553, 5554, 5555, 5556, 5557, 5558, 5559, 5560, 5561, 5562, 5563, 5564, 5565, 5566, 5567, 5568, 5569, 5570, 5571, 5577, 5578, 5579, 5580, 5590, 5591, 5592, 5593, 5594, 5595, 5596, 5605, 5606, 5607, 5608, 5609, 5610, 5611, 5612, 5613, 5614, 5615, 5616, 5617, 5618, 5619, 5620, 5621, 5622, 5623, 5631, 5632, 5633, 5638, 5639, 5640, 5666, 5667, 5668, 5669, 5671, 5672, 5673, 5674, 5675, 5676, 5677, 5678, 5679, 5680, 5681, 5688, 5689, 5690, 5691, 5692, 5693, 5694, 5695, 5696, 5697, 5698, 5699, 5700, 5701, 5702, 5703, 5708, 5709, 5710, 5711, 5712, 5713, 5714, 5715, 5716, 5717, 5727, 5740, 5741, 5743, 5744, 5745, 5746, 5747, 5748, 5749, 5750, 5751, 5755, 5757, 5758, 5759, 5760, 5761, 5762, 5763, 5764, 5765, 5766, 5767, 5768, 5769, 5770, 5772, 5773, 5775, 5776, 5777, 5778, 5779, 5780, 5783, 5784, 5785, 5786, 5787, 5788, 5789, 5790, 5791, 5792, 5793, 5794, 5795, 5796, 5797, 5798, 5799, 5800, 5801, 5802, 5803, 5804, 5805, 5806, 5807, 5808, 5809, 5810, 5811, 5812, 5813, 5814, 5815, 5816, 5817, 5818, 5819, 5820, 5821, 5822, 5823, 5824, 5825, 5826, 5827, 5828, 5829, 5830, 5831, 5833, 5834, 5836, 5837, 5838, 5839, 5848, 5849, 5850, 5851, 5852, 5853, 5854, 5855, 5864, 5865, 5866, 5867, 5868, 5875, 5876, 5877, 5878, 5880, 5881, 5882, 5883, 5884, 5885, 5886, 5887, 5888, 5889, 5890, 5891, 5892, 5893, 5894, 5895, 5896, 5897, 5898, 5899, 5900, 5901, 5907, 5908, 5909, 5911, 5912, 5913, 5914, 5915, 5916, 5917, 5918, 5919, 5920, 5921, 5922, 5929, 5950, 5951, 5952, 5953, 5954, 5955, 5956, 5963, 5967, 5969, 5970, 5982, 5983, 5984, 5985, 5986, 5987, 5988, 5997, 5998, 5999, 6000, 6001, 6002, 6068, 6069, 6070, 6071, 6072, 6074, 6075, 6076, 6077, 6078, 6080, 6081, 6082, 6083, 6084, 6085, 6086, 6087, 6088, 6089, 6090, 6091, 6092, 6093, 6094, 6095, 6096, 6097, 6098, 6100, 6101, 6102, 6103, 6105, 6106, 6107, 6108, 6109, 6110, 6111, 6112, 6113, 6114, 6115, 6116, 6117, 6118, 6119, 6120, 6121, 6122, 6123, 6124, 6128, 6130, 6142, 6143, 6144, 6145, 6146, 6147, 6148, 6149, 6151, 6152, 6153, 6154, 6155, 6156, 6157, 6169, 6170, 6171, 6172, 6173, 6174, 6175, 6176, 6177, 6178, 6179, 6180, 6181, 6182, 6185, 6186, 6187, 6191, 6192, 6193, 6194, 6195, 6208, 6209, 6231, 6232, 6233, 6234, 6235, 6236, 6237, 6238, 6239, 6251, 6256, 6257, 6258, 6259, 6260, 6261, 6262, 6271, 6272, 6273, 6278, 6279, 6280, 6281, 6282, 6286, 6287, 6288, 6289, 6290, 6298, 6299, 6300, 6301, 6302, 6303, 6304, 6305, 6306, 6307, 6308, 6309, 6310, 6311, 6312, 6313, 6314, 6315, 6356, 6357, 6358, 6378, 6379, 6387, 6388, 6389, 6390, 6391, 6392, 6393, 6394, 6395, 6396, 6397, 6398, 6399, 6400, 6401, 6402, 6403, 6405, 6406, 6407, 6451, 6452, 6453, 6497, 6498, 6499, 6500, 6501, 6502, 6503, 6509, 6510, 6511, 6512, 6514, 6519, 6520, 6521, 6522, 6523, 6549, 6550, 6551, 6552, 6553, 6554, 6555, 6556, 6557, 6558, 6588, 6589, 6599, 6600, 6601, 6602, 6603, 6604, 6605, 6606, 6611, 6612, 6613, 6614, 6615, 6616, 6617, 6618, 6619, 6620, 6621, 6622, 6623, 6624, 6625, 6626, 6627, 6628, 6629, 6630, 6631, 6632, 6633, 6634, 6638, 6639, 6640, 6641, 6642, 6643, 6644, 6684, 6685, 6686, 6687, 6697, 6698, 6699, 6700, 6701, 6719, 6721, 6723, 6724, 6754, 6755, 6756, 6757, 6758, 6759, 6760, 6761, 6762, 6763, 6764, 6796, 6797, 6798, 6799, 6800, 6805, 6806, 6807, 6808, 6809, 6814, 6815, 6816, 6817, 6818, 6824, 6825, 6826, 6831, 6832, 6833, 6834, 6835, 6836, 6837, 6848, 6849, 6850, 6851, 6852, 6853, 6854, 6855, 6856, 6857, 6860, 6861, 6862, 6863, 6864, 6865, 6866, 6867, 6868, 6869, 6872, 6873, 6875, 6876, 6877, 6878, 6879, 6885, 6888, 6889, 6890, 6891, 6892, 6893, 6894, 6895, 6896, 6897, 6898, 6899, 6900, 6901, 6902, 6903, 6904, 6905, 6906, 6907, 6908, 6909, 6910, 6911, 6912, 6913, 6914, 6915, 6916, 6917, 6918, 6919, 6920, 6921, 6922, 6923, 6924, 6925, 6926, 6927, 6928, 6929, 6930, 6931, 6932, 6933, 6934, 6935, 6936, 6937, 6938, 6939, 6940, 6941, 6942, 6943, 6944, 6945, 6946, 6947, 6948, 6949, 6950, 6951, 6952, 6953, 6954, 6955, 6957, 6958, 6959, 6960, 6962, 6963, 6964, 6965, 6966, 6967, 6968, 6969, 6970, 6971, 6972, 6973, 6983, 6984, 6985, 6988, 6989, 6990, 6991, 6992, 6993, 6994, 6995, 7007, 7008, 7009, 7010, 7011, 7012, 7015, 7016, 7017, 7018, 7019, 7020, 7021, 7034, 7035, 7084, 7086, 7087, 7088, 7089, 7090, 7091, 7092, 7128, 7137, 7138, 7139, 7140, 7141, 7142, 7143, 7144, 7145, 7146, 7147, 7148, 7149, 7150, 7151, 7152, 7153, 7154, 7155, 7195, 7196, 7197, 7198, 7199, 7200, 7201, 7202, 7203, 7204, 7205, 7206, 7207, 7208, 7209, 7210, 7211, 7212, 7213, 7214, 7215, 7216, 7217, 7218, 7219, 7220, 7221, 7222, 7223, 7224, 7225, 7226, 7227, 7228, 7229, 7230, 7231, 7232, 7233, 7234, 7235, 7236, 7237, 7238, 7239, 7240, 7241, 7243, 7244, 7245, 7246, 7247, 7248, 7249, 7250, 7251, 7252, 7253, 7254, 7255, 7256, 7257, 7258, 7259, 7260, 7261, 7262, 7263, 7264, 7265, 7266, 7267, 7268, 7269, 7270, 7271, 7287, 7288, 7289, 7291, 7292, 7293, 7294, 7295, 7296, 7297, 7298, 7347, 7348, 7349, 7358, 7359, 7360, 7361, 7362, 7363, 7364, 7365, 7372, 7373, 7374, 7375, 7376, 7377, 7378, 7383, 7415, 7416, 7417, 7438, 7471, 7472, 7473, 7474, 7475, 7476, 7477, 7490, 7496, 7497, 7498, 7499, 7500, 7501, 7502, 7503, 7504, 7505, 7506, 7507, 7508, 7509, 7510, 7511, 7512, 7513, 7514, 7515, 7532, 7533, 7534, 7535, 7537, 7538, 7539, 7540, 7541, 7542, 7543, 7544, 7545, 7546, 7547, 7548, 7549, 7550, 7551, 7552, 7553, 7554, 7555, 7556, 7557, 7558, 7559, 7560, 7571, 7572, 7573, 7574, 7575, 7576, 7585, 7586, 7587, 7588, 7589, 7590, 7591, 7592, 7593, 7595, 7596, 7597, 7599, 7600, 7601, 7617, 7618, 7619, 7620, 7621, 7622, 7623, 7638, 7668, 7669, 7670, 7672, 7673, 7674, 7675, 7676, 7677, 7685, 7687, 7689, 7694, 7695, 7696, 7717, 7718, 7719, 7720, 7721, 7722, 7723, 7724, 7725, 7726, 7727, 7728, 7729, 7730, 7731, 7732, 7733, 7734, 7735, 7736, 7737, 7738, 7739, 7740, 7741, 7742, 7743, 7744, 7746, 7747, 7748, 7749, 7750, 7751, 7752, 7757, 7758, 7759, 7760, 7761, 7762, 7763, 7764, 7765, 7766, 7767, 7768, 7796, 7797, 7805, 7813, 7814, 7815, 7816, 7817, 7818, 7819, 7820, 7821, 7822, 7848, 7849, 7850, 7851, 7852, 7853, 7854, 7859, 7860, 7861, 7862, 7863, 7864, 7865, 7866, 7867, 7869, 7870, 7874, 7875, 7917, 7918, 7919, 7920, 7921, 7925, 7926, 7927, 7928, 7929, 7930, 7931, 7932, 7933, 7934, 7935, 7936, 7937, 7938, 7939, 7940, 7941, 7942, 7943, 7944, 7945, 7946, 7947, 7948, 7949, 7950, 7951, 7952, 7953, 7955, 7956, 7957, 7958, 7959, 7960, 7961, 7962, 7963, 7964, 7965, 7966, 7967, 7968, 7969, 7970, 7971, 7972, 7974, 7975, 7976, 7977, 7978, 7979, 7980, 7981, 7982, 7983, 7984, 7985, 7986, 7987, 7988, 7989, 7990, 7991, 7992, 7993, 7994, 7995, 7996, 7997, 7998, 7999, 8000, 8011, 8012, 8013, 8014, 8015, 8016, 8017, 8018, 8019, 8020, 8021, 8022, 8023, 8024, 8025, 8026, 8027, 8028, 8029, 8030, 8048, 8049, 8050, 8051, 8052, 8053, 8054, 8055, 8056, 8057, 8087, 8088, 8089, 8090, 8091, 8092, 8095, 8096, 8097, 8098, 8099, 8100, 8101, 8102, 8103, 8104, 8105, 8106, 8107, 8110, 8111, 8112, 8113, 8114, 8115, 8116, 8117, 8118, 8119, 8120, 8121, 8122, 8123, 8124, 8125, 8126, 8127, 8130, 8131, 8132, 8133, 8134, 8135, 8136, 8144, 8145, 8166, 8169, 8170, 8171, 8172, 8173, 8174, 8175, 8176, 8177, 8178, 8179, 8180, 8181, 8182, 8188, 8189, 8190, 8191, 8192, 8193, 8194, 8195, 8196, 8197, 8198, 8199, 8200, 8201, 8209, 8210, 8211, 8212, 8215, 8227, 8230, 8231, 8232, 8233, 8234, 8235, 8236, 8237, 8238, 8239, 8240, 8241, 8242, 8243, 8244, 8245, 8246, 8247, 8248, 8249, 8250, 8251, 8260, 8261, 8262, 8263, 8299, 8302, 8303, 8304, 8305, 8306, 8353, 8354, 8355, 8356, 8357, 8358, 8359, 8360, 8361, 8375, 8376, 8377, 8378, 8379, 8380, 8381, 8382, 8410, 8411, 8412, 8414, 8415, 8416, 8417, 8418, 8440, 8459, 8460, 8461, 8462, 8463, 8474, 8475, 8476, 8477, 8478, 8487, 8488, 8489, 8490, 8491, 8492, 8493, 8494, 8508, 8509, 8510, 8511, 8512, 8514, 8515, 8546, 8547, 8548, 8549, 8550, 8551, 8552, 8553, 8554, 8555, 8570, 8571, 8572, 8573, 8574, 8575, 8576, 8577, 8578, 8579, 8580, 8581, 8586, 8587, 8593, 8594, 8595, 8596, 8597, 8601, 8602, 8603, 8604, 8605, 8615, 8617, 8618, 8652, 8655, 8686, 8709, 8712, 8713, 8714, 8715, 8716, 8717, 8718, 8719, 8720, 8721, 8722, 8723, 8724, 8725, 8726, 8727, 8728, 8729, 8730, 8731, 8732, 8733, 8734, 8737, 8738, 8739, 8740, 8770, 8771, 8788, 8789, 8790, 8791, 8792, 8793, 8794, 8795, 8796, 8797, 8798, 8799, 8800, 8801, 8802, 8803, 8804, 8805, 8806, 8810, 8811, 8817, 8818, 8819, 8820, 8821, 8822, 8823, 8829, 8830, 8837, 8838, 8839, 8840, 8841, 8848, 8849, 8850, 8851, 8854, 8855, 8856, 8857, 8858, 8859, 8860, 8861, 8862, 8863, 8864, 8865, 8867, 8868, 8869, 8870, 8871, 8872, 8873, 8874, 8875, 8876, 8878, 8879, 8880, 8881, 8882, 8883, 8884, 8885, 8886, 8887, 8888, 8889, 8890, 8891, 8892, 8893, 8894, 8895, 8896, 8897, 8898, 8899, 8900, 8901, 8902, 8903, 8904, 8906, 8913, 8914, 8915, 8916, 8917, 8918, 8919, 8920, 8921, 8925, 8926, 8927, 8928, 8933, 8934, 8935, 8936, 8937, 8938, 8939, 8940, 8941, 8942, 8943, 8944, 8945, 8946, 8947, 8948, 8949, 8950, 8951, 8954, 8955, 8956, 8992, 8993, 8994, 8995, 8996, 8997, 8998, 8999, 9000, 9001, 9002, 9003, 9010, 9011, 9012, 9013, 9014, 9015, 9016, 9017, 9018, 9019, 9020, 9021, 9022, 9023, 9024, 9025, 9026, 9027, 9028, 9029, 9030, 9031, 9041, 9042, 9043, 9044, 9045, 9046, 9047, 9048, 9049, 9050, 9051, 9052, 9053, 9054, 9055, 9056, 9057, 9058, 9059, 9065, 9066, 9087, 9088, 9091, 9092, 9093, 9094, 9095, 9096, 9097, 9098, 9103, 9104, 9105, 9106, 9107, 9108, 9109, 9110, 9123, 9124, 9125, 9126, 9127, 9128, 9129, 9130, 9131, 9133, 9134, 9135, 9136, 9137, 9145, 9146, 9147, 9148, 9149, 9150, 9151, 9160, 9161, 9162, 9163, 9201, 9203.

### Ovarian Cancer

[0741] Ovarian cancer is cancer which forms in the tissues of the ovary which are either ovarian epithelial carcinomas (begins on the surface of the ovary) or malignant germ cell tumors (cancer that begins in the egg cells). Symptoms of ovarian cancer include, but are not limited to, pain or swelling in the abdomen, pain in the pelvis, gastrointestinal problems such as gas, bloating, or constipation and vaginal bleeding after menopause.

[0742] In one embodiment, the oncology-related polynucleotides, oncology-related primary constructs or oncology-related mmRNA of the present invention may be used to treat a disease, disorder and/or condition in a subject who has been diagnosed or may be diagnosed with ovarian cancer by administering to said subject an isolated polynucleotide encoding an oncology-related polypeptide of interest. In one embodiment, the oncology-related polynucleotides, oncology-related primary constructs or oncology-related mmRNA of the present invention may be used to reduce, eliminate, or prevent tumor growth in a subject who has been diagnosed or may be diagnosed with ovarian cancer by administering to said subject an isolated polynucleotide encoding an oncology-related polypeptide of interest. In one embodiment, the oncology-related polynucleotides, oncology-related primary constructs or oncology-related mmRNA of the present invention may be used to reduce and/or ameliorate at least one symptom of cancer in a subject who has been diagnosed or may be diagnosed with ovarian cancer by administering to said subject an isolated polynucleotide encoding an oncology-related polypeptide of interest. In a further embodiment, the oncology-related polypeptide of interest may include, but not limited to, SEQ ID NOs: 4711, 4712, 4713, 4714, 4715, 4716, 4717, 4718, 4719, 4720, 4721, 4722, 4723, 4724, 4725, 4726, 4727, 4728, 4742, 4743, 4744, 4745, 4746, 4747, 4748, 4749, 4750, 4751, 4781, 4782, 4783, 4784, 4785, 4786, 4787, 4788, 4789, 4790, 4825, 4826, 4827, 4828, 4829, 4830, 4832, 4854, 4855, 4856, 4857, 4858, 4859, 4860, 4861, 4863, 4864, 4865, 4866, 4867, 4868, 4869, 4870, 4871, 4872, 4873, 4885, 4886, 4887, 4888, 4889, 4890, 4891, 4892, 4893, 4894, 4911, 4912, 4913, 4914, 4915, 4916, 4917, 4918, 4919, 4920, 4960, 4961, 4962, 4963, 4964, 4965, 4966, 4967, 4968, 4969, 4970, 4971, 4972, 4973, 4974, 4975, 4976, 4977, 4978, 4979, 4980, 4981, 4982, 4983, 4984, 4985, 4986, 4987, 4988, 4989, 4990, 4991, 4992, 4993, 4994, 4995, 4996, 4997, 4998, 4999, 5000, 5001, 5002, 5008, 5009, 5010, 5011, 5012, 5013, 5014, 5015, 5016, 5017, 5018, 5019, 5020, 5021, 5022, 5023, 5024, 5025, 5026, 5027, 5028, 5030, 5031, 5032, 5033, 5034, 5035, 5036, 5037, 5038, 5039, 5040, 5041, 5042, 5043, 5044, 5045, 5046, 5047, 5048, 5049, 5050, 5051, 5052, 5053, 5054, 5055, 5056, 5057, 5058, 5059, 5060, 5061, 5062, 5063, 5064, 5065, 5066, 5067, 5068, 5069, 5070, 5071, 5072, 5073, 5074, 5075, 5076, 5077, 5078, 5079, 5103, 5104, 5105, 5106, 5107, 5108, 5109, 5110, 5118, 5119, 5120, 5121, 5122, 5123, 5124, 5125, 5126, 5127, 5128, 5129, 5130, 5131, 5132, 5133, 5134, 5135, 5136, 5137, 5138, 5139, 5140, 5141, 5145, 5146, 5147, 5148, 5149, 5150, 5151, 5152, 5153, 5154, 5155, 5156, 5157, 5158, 5159, 5160, 5161, 5162, 5163, 5164, 5165, 5166, 5167, 5168, 5169, 5170, 5171, 5172, 5173, 5174, 5175, 5176, 5177, 5178, 5182, 5183, 5184, 5185, 5186, 5187, 5188, 5189, 5190, 5191, 5192, 5193, 5194, 5195, 5196, 5197, 5198, 5199, 5200, 5201, 5202, 5203, 5204, 5205, 5206, 5207, 5208, 5209, 5210, 5211, 5212, 5213, 5230, 5231, 5252, 5253, 5254, 5255, 5256, 5257, 5258, 5259, 5260, 5261, 5262, 5263, 5264, 5265, 5266, 5267, 5268, 5269, 5270, 5271, 5291, 5292, 5293, 5294, 5295, 5296, 5297, 5298, 5299, 5300, 5301, 5302, 5303, 5304, 5305, 5306, 5307, 5308, 5309, 5310, 5311, 5312, 5313, 5314, 5315, 5316, 5317, 5318, 5319, 5320, 5321, 5322, 5323, 5324, 5325, 5326, 5327, 5328, 5329, 5330, 5331, 5332, 5333, 5334, 5335, 5336, 5337, 5338, 5339, 5340, 5341, 5342, 5343, 5344, 5345, 5346, 5347, 5348, 5349, 5350, 5351, 5352, 5353, 5354, 5355, 5356, 5357, 5358, 5359, 5360, 5361, 5362, 5363, 5364, 5365, 5366, 5367, 5368, 5369, 5370, 5371, 5372, 5373, 5374, 5375, 5376, 5377, 5378, 5379, 5380, 5381, 5382, 5383, 5384, 5385, 5386, 5387, 5388, 5389, 5390, 5391, 5392, 5393, 5419, 5420, 5421, 5426, 5427, 5428, 5429, 5438, 5447, 5448, 5449, 5450, 5451, 5452, 5453, 5454, 5455, 5456, 5457, 5458, 5459, 5460, 5461, 5462, 5463, 5464, 5465, 5469, 5470, 5477, 5478, 5479, 5480, 5481, 5482, 5490, 5491, 5492, 5493, 5494, 5495, 5496, 5497, 5498, 5499, 5504, 5505, 5506, 5507, 5508, 5509, 5510, 5511, 5512, 5513, 5514, 5515, 5516, 5517, 5518, 5519, 5520, 5521, 5522, 5523, 5524, 5525, 5526, 5527, 5528, 5529, 5530, 5531, 5532, 5533, 5534, 5535, 5536, 5548, 5549, 5551, 5552, 5553, 5554, 5555, 5556, 5557, 5558, 5559, 5560, 5561, 5562, 5563, 5564, 5565, 5566, 5567, 5568, 5569, 5570, 5571, 5577, 5578, 5579, 5580, 5590, 5591, 5592, 5593, 5594, 5595, 5596, 5605, 5606, 5607, 5608, 5609, 5610, 5611, 5616, 5617, 5618, 5619, 5620, 5621, 5622, 5623, 5631, 5632, 5633, 5638, 5639, 5640, 5671, 5672, 5673, 5674, 5675, 5676, 5677, 5678, 5679, 5680, 5681, 5688, 5689, 5690, 5691, 5692, 5693, 5694, 5695, 5696, 5697, 5698, 5699, 5700, 5701, 5702, 5703, 5708, 5709, 5710, 5711, 5712, 5713, 5714, 5715, 5716, 5717, 5727, 5740, 5741, 5743, 5744, 5745, 5746, 5747, 5748, 5749, 5750, 5751, 5755, 5757, 5758, 5759, 5760, 5761, 5762, 5763, 5764, 5765, 5766, 5767, 5768, 5769, 5770, 5772, 5773, 5775, 5776, 5777, 5778, 5779, 5780, 5783, 5784, 5785, 5786, 5787, 5788, 5789, 5790, 5791, 5792, 5793, 5794, 5795, 5796, 5797, 5798, 5799, 5800, 5801, 5802, 5803, 5811, 5812, 5813, 5814, 5821, 5822, 5823, 5824, 5825, 5826, 5827, 5828, 5829, 5830, 5831, 5833, 5834, 5836, 5837, 5838, 5839, 5848, 5849, 5850, 5851, 5852, 5853, 5854, 5855, 5864, 5865, 5866, 5867, 5868, 5875, 5876, 5877, 5878, 5880, 5881, 5882, 5883, 5884, 5885, 5886, 5887, 5888, 5889, 5890, 5891, 5892, 5893, 5894, 5895, 5896, 5897, 5898, 5899, 5907, 5908, 5909, 5911, 5912, 5913, 5914, 5915, 5916, 5917, 5918, 5919, 5920, 5921, 5922, 5929, 5950, 5951, 5952, 5953, 5954, 5955, 5956, 5963, 5967, 5969, 5970, 5982, 5983, 5984, 5985, 5986, 5987, 5988, 5997, 5998, 5999, 6000, 6001, 6002, 6068, 6069, 6070, 6071, 6072, 6074, 6075, 6076, 6077, 6078, 6080, 6081, 6082, 6083, 6084, 6085, 6086, 6087, 6088, 6089, 6090, 6091, 6092, 6093, 6094, 6095, 6096, 6097, 6098, 6100, 6101, 6102, 6103, 6105, 6106, 6107, 6108, 6109, 6110, 6111, 6112, 6113, 6114, 6115, 6116, 6117, 6118, 6119, 6120, 6121, 6122, 6123, 6124, 6128, 6130, 6142, 6143, 6144, 6145, 6146, 6147, 6148, 6149, 6151, 6152, 6153, 6154, 6155, 6156, 6157, 6169, 6170, 6171, 6172, 6173, 6174, 6175, 6176, 6177, 6178, 6179, 6180, 6181, 6182, 6185, 6186, 6187, 6191, 6208, 6209, 6231, 6232, 6233, 6234, 6235, 6236, 6237, 6238, 6239, 6251, 6256, 6257, 6258, 6259, 6260, 6261, 6262, 6278, 6279, 6280, 6281, 6282, 6286, 6287, 6288, 6289, 6290, 6298, 6299, 6300, 6301, 6302, 6303, 6304, 6305, 6306, 6307, 6308, 6309, 6310, 6311, 6312, 6313, 6314, 6315, 6356, 6357, 6358, 6378, 6379, 6387, 6388, 6389, 6390, 6391, 6392, 6393, 6394, 6395, 6396, 6397, 6398, 6399, 6400, 6401, 6402, 6403, 6405, 6406, 6407, 6451, 6452, 6453, 6497, 6498, 6499, 6500, 6501, 6502, 6503, 6509, 6510, 6511, 6512, 6514, 6519, 6520, 6521, 6522, 6523, 6549, 6550, 6551, 6552, 6553, 6554, 6555, 6556, 6557, 6558, 6588, 6589, 6599, 6600, 6601, 6602, 6603, 6604, 6605, 6606, 6611, 6612, 6613, 6614, 6615, 6616, 6617, 6618, 6619, 6620, 6621, 6622, 6623, 6624, 6625, 6626, 6627, 6628, 6629, 6630, 6631, 6632, 6633, 6634, 6638, 6639, 6640, 6641, 6642, 6643, 6644, 6684, 6685, 6686, 6697, 6698, 6699, 6700, 6701, 6719, 6721, 6723, 6724, 6754, 6755, 6756, 6757, 6758, 6759, 6760, 6761, 6762, 6763, 6764, 6796, 6797, 6798, 6799, 6800, 6805, 6806, 6807, 6808, 6809, 6814, 6815, 6816, 6817, 6818, 6824, 6825, 6826, 6831, 6832, 6833, 6834, 6853, 6854, 6855, 6856, 6857, 6860, 6861, 6862, 6863, 6864, 6865, 6866, 6867, 6868, 6869, 6872, 6873, 6875, 6876, 6877, 6878, 6879, 6885, 6888, 6889, 6890, 6891, 6892, 6893, 6894, 6895, 6896, 6897, 6898, 6899, 6900, 6901, 6902, 6903, 6904, 6905, 6906, 6907, 6908, 6909, 6910, 6911, 6912, 6913, 6914, 6915, 6916, 6917, 6918, 6919, 6920, 6921, 6922, 6923, 6924, 6925, 6926, 6927, 6928, 6929, 6930, 6931, 6932, 6933, 6934, 6935, 6936, 6953, 6954, 6955, 6957, 6958, 6959, 6960, 6962, 6963, 6964, 6965, 6966, 6967, 6968, 6969, 6970, 6971, 6972, 6973, 6983, 6984, 6985, 6988, 6989, 6990, 6991, 6992, 6993, 6994, 6995, 7007, 7008, 7009, 7010, 7011, 7012, 7015, 7016, 7017, 7018, 7019, 7020, 7021, 7034, 7035, 7084, 7086, 7087, 7088, 7089, 7090, 7091, 7092, 7128, 7137, 7138, 7139, 7140, 7141, 7142, 7143, 7144, 7145, 7146, 7147, 7148, 7149, 7150, 7151, 7152, 7153, 7154, 7155, 7195, 7196, 7197, 7198, 7200, 7201, 7202, 7203, 7204, 7205, 7206, 7207, 7208, 7209, 7210, 7211, 7212, 7213, 7214, 7215, 7216, 7217, 7218, 7219, 7220, 7221, 7222, 7223, 7224, 7225, 7226, 7227, 7228, 7229, 7230, 7231, 7232, 7233, 7234, 7235, 7236, 7237, 7238, 7239, 7240, 7241, 7243, 7244, 7245, 7246, 7247, 7248, 7249, 7250, 7251, 7252, 7253, 7254, 7255, 7256, 7257, 7258, 7259, 7260, 7261, 7262, 7263, 7264, 7265, 7266, 7267, 7268, 7269, 7270, 7271, 7291, 7292, 7293, 7294, 7295, 7296, 7297, 7298, 7347, 7348, 7349, 7358, 7359, 7360, 7361, 7362, 7363, 7364, 7365, 7372, 7373, 7374, 7375, 7376, 7377, 7378, 7383, 7415, 7416, 7417, 7438, 7471, 7472, 7473, 7474, 7475, 7476, 7477, 7490, 7496, 7497, 7498, 7499, 7500, 7501, 7502, 7503, 7504, 7505, 7506, 7507, 7508, 7509, 7510, 7511, 7512, 7513, 7514, 7515, 7532, 7533, 7534, 7535, 7537, 7538, 7539, 7540, 7541, 7542, 7543, 7544, 7545, 7546, 7547, 7548, 7549, 7550, 7551, 7552, 7553, 7554, 7555, 7556, 7557, 7558, 7559, 7560, 7585, 7586, 7587, 7588, 7589, 7590, 7591, 7592, 7593, 7595, 7596, 7597, 7599, 7600, 7601, 7617, 7618, 7619, 7620, 7621, 7622, 7623, 7638, 7668, 7669, 7670, 7672, 7673, 7674, 7675, 7676, 7685, 7687, 7694, 7695, 7696, 7717, 7718, 7719, 7720, 7721, 7722, 7723, 7724, 7725, 7726, 7727, 7728, 7729, 7730, 7731, 7732, 7733, 7734, 7735, 7736, 7737, 7738, 7739, 7740, 7741, 7742, 7743, 7744, 7746, 7747, 7748, 7749, 7750, 7751, 7752, 7757, 7758, 7759, 7760, 7761, 7762, 7763, 7764, 7765, 7766, 7767, 7768, 7796, 7797, 7805, 7813, 7814, 7815, 7816, 7817, 7818, 7819, 7820, 7821, 7822, 7848, 7849, 7850, 7851, 7852, 7853, 7854, 7859, 7860, 7861, 7862, 7863, 7864, 7865, 7866, 7867, 7869, 7870, 7874, 7875, 7917, 7918, 7919, 7925, 7926, 7927, 7928, 7929, 7941, 7942, 7943, 7944, 7945, 7946, 7947, 7948, 7949, 7950, 7951, 7952, 7953, 7955, 7956, 7957, 7958, 7959, 7960, 7961, 7962, 7963, 7964, 7965, 7966, 7967, 7968, 7969, 7970, 7971, 7972, 7974, 7975, 7976, 7977, 7978, 7979, 7980, 7981, 7982, 7983, 7984, 7985, 7986, 7987, 7988, 7989, 7990, 7991, 7992, 7993, 7994, 7995, 7996, 7997, 7998, 7999, 8000, 8011, 8012, 8013, 8014, 8015, 8016, 8017, 8018, 8019, 8020, 8021, 8022, 8023, 8024, 8025, 8026, 8027, 8028, 8029, 8030, 8048, 8049, 8050, 8051, 8052, 8053, 8054, 8055, 8056, 8057, 8087, 8088, 8089, 8090, 8091, 8092, 8095, 8096, 8097, 8098, 8099, 8100, 8101, 8102, 8103, 8104, 8105, 8106, 8107, 8110, 8111, 8112, 8113, 8114, 8115, 8116, 8117, 8118, 8119, 8120, 8121, 8122, 8123, 8124, 8125, 8126, 8127, 8130, 8131, 8132, 8133, 8134, 8135, 8136, 8144, 8145, 8166, 8169, 8170, 8171, 8172, 8173, 8174, 8175, 8176, 8177, 8178, 8179, 8180, 8181, 8182, 8188, 8191, 8192, 8193, 8194, 8195, 8196, 8197, 8198, 8199, 8200, 8201, 8209, 8210, 8211, 8212, 8215, 8227, 8230, 8231, 8232, 8233, 8234, 8235, 8236, 8237, 8238, 8239, 8240, 8241, 8242, 8243, 8244, 8245, 8246, 8247, 8248, 8249, 8250, 8251, 8260, 8261, 8262, 8263, 8299, 8302, 8303, 8304, 8305, 8306, 8353, 8354, 8355, 8356, 8357, 8358, 8359, 8360, 8361, 8375, 8376, 8377, 8378, 8379, 8380, 8381, 8382, 8410, 8411, 8412, 8440, 8459, 8460, 8461, 8462, 8463, 8474, 8475, 8476, 8477, 8478, 8508, 8509, 8510, 8511, 8512, 8514, 8515, 8546, 8547, 8548, 8549, 8550, 8551, 8552, 8553, 8554, 8555, 8570, 8571, 8572, 8573, 8574, 8575, 8576, 8577, 8578, 8579, 8580, 8581, 8586, 8587, 8593, 8594, 8595, 8596, 8597, 8601, 8602, 8603, 8604, 8605, 8615, 8617, 8618, 8655, 8686, 8709, 8712, 8713, 8714, 8715, 8716, 8717, 8718, 8719, 8720, 8721, 8722, 8723, 8724, 8725, 8726, 8727, 8728, 8729, 8730, 8731, 8732, 8733, 8734, 8770, 8771, 8788, 8789, 8790, 8791, 8792, 8793, 8794, 8795, 8796, 8797, 8798, 8799, 8800, 8801, 8802, 8803, 8804, 8805, 8806, 8810, 8811, 8817, 8818, 8819, 8820, 8821, 8822, 8823, 8829, 8830, 8837, 8838, 8839, 8840, 8841, 8848, 8849, 8850, 8851, 8854, 8855, 8856, 8857, 8858, 8859, 8860, 8861, 8862, 8863, 8864, 8865, 8867, 8868, 8872, 8873, 8874, 8875, 8876, 8878, 8879, 8880, 8881, 8882, 8883, 8884, 8885, 8886, 8887, 8888, 8889, 8890, 8891, 8892, 8893, 8894, 8895, 8896, 8897, 8898, 8899, 8900, 8901, 8902, 8903, 8904, 8906, 8913, 8914, 8915, 8916, 8917, 8918, 8919, 8920, 8921, 8925, 8926, 8927, 8928, 8933, 8934, 8935, 8936, 8937, 8938, 8939, 8940, 8941, 8942, 8943, 8944, 8945, 8946, 8947, 8948, 8949, 8950, 8951, 8954, 8955, 8956, 8992, 8993, 8994, 8995, 8996, 8997, 8998, 8999, 9000, 9001, 9002, 9003, 9010, 9011, 9012, 9013, 9014, 9018, 9019, 9020, 9021, 9022, 9023, 9024, 9025, 9026, 9027, 9028, 9029, 9030, 9031, 9041, 9042, 9043, 9044, 9045, 9046, 9047, 9048, 9049, 9050, 9051, 9052, 9053, 9054, 9055, 9056, 9057, 9058, 9059, 9065, 9066, 9087, 9088, 9091, 9092, 9093, 9094, 9095, 9096, 9097, 9098, 9103, 9104, 9105, 9106, 9107, 9108, 9109, 9110, 9123, 9124, 9125, 9126, 9127, 9128, 9129, 9130, 9131, 9133, 9134, 9135, 9136, 9137, 9145, 9146, 9147, 9148, 9149, 9150, 9151, 9160, 9161, 9162, 9163, 9201, 9203.

### Prostate Cancer

[0743] Prostate that forms in the tissue of the prostate mainly affects older men. Non-limiting examples of prostate cancer include, but are not limited to, weak or interrupted flow of urine, frequent urination, trouble urinating, pain or burning during urination, blood in the urine or semen, pain in the back, hips or pelvis that does not go away and painful ejaculation.

[0744] In one embodiment, the oncology-related polynucleotides, oncology-related primary constructs or oncology-related mmRNA of the present invention may be used to treat a disease, disorder and/or condition in a subject who has been diagnosed or may be diagnosed with prostate cancer by administering to said subject an isolated polynucleotide encoding an oncology-related polypeptide of interest. In one embodiment, the oncology-related polynucleotides, oncology-related primary constructs or oncology-related mmRNA of the present invention may be used to reduce, eliminate, or prevent tumor growth in a subject who has been diagnosed or may be diagnosed with prostate cancer by administering to said subject an isolated polynucleotide encoding an oncology-related polypeptide of interest. In one embodiment, the oncology-related polynucleotides, oncology-related primary constructs or oncology-related mmRNA of the present invention may be used to reduce and/or ameliorate at least one symptom of cancer in a subject who has been diagnosed or may be diagnosed with prostate cancer by administering to said subject an isolated polynucleotide encoding an oncology-related polypeptide of interest. In a further embodiment, the oncology-related polypeptide of interest may include, but not limited to, SEQ ID NOs: 4704, 4705, 4706, 4707, 4708, 4709, 4710, 4711, 4712, 4713, 4714, 4715, 4716, 4717, 4718, 4719, 4720, 4721, 4722, 4723, 4724, 4725, 4726, 4727, 4728, 4729, 4730, 4731, 4732, 4733, 4734, 4735, 4736, 4737, 4738, 4739, 4740, 4741, 4742, 4743, 4744, 4745, 4746, 4747, 4748, 4749, 4750, 4751, 4781, 4782, 4783, 4784, 4785, 4786, 4787, 4788, 4789, 4790, 4825, 4826, 4827, 4828, 4829, 4830, 4832, 4835, 4836, 4854, 4855, 4856, 4857, 4858, 4859, 4860, 4861, 4863, 4864, 4865, 4866, 4867, 4868, 4869, 4870, 4871, 4872, 4873, 4885, 4886, 4887, 4888, 4889, 4890, 4891, 4892, 4893, 4894, 4895, 4896, 4897, 4898, 4899, 4900, 4901, 4902, 4903, 4904, 4905, 4906, 4907, 4908, 4909, 4910, 4911, 4912, 4913, 4914, 4915, 4916, 4917, 4918, 4919, 4920, 4960, 4961, 4962, 4963, 4964, 4965, 4966, 4967, 4968, 4969, 4970, 4971, 4972, 4973, 4974, 4975, 4976, 4977, 4978, 4979, 4980, 4981, 4982, 4983, 4984, 4985, 4986, 4987, 4988, 4989, 4990, 4991, 4992, 4993, 4994, 4995, 4996, 4997, 4998, 4999, 5000, 5001, 5002, 5008, 5009, 5010, 5011, 5012, 5013, 5014, 5015, 5016, 5017, 5018, 5019, 5020, 5021, 5022, 5023, 5024, 5025, 5026, 5027, 5028, 5030, 5031, 5032, 5033, 5034, 5035, 5036, 5037, 5038, 5039, 5040, 5041, 5042, 5043, 5044, 5045, 5046, 5047, 5048, 5049, 5050, 5051, 5052, 5053, 5054, 5055, 5056, 5057, 5058, 5059, 5060, 5061, 5062, 5063, 5064, 5065, 5066, 5067, 5068, 5069, 5070, 5071, 5072, 5073, 5074, 5075, 5076, 5077, 5078, 5079, 5103, 5104, 5105, 5106, 5107, 5108, 5109, 5110, 5118, 5119, 5120, 5121, 5122, 5123, 5124, 5125, 5126, 5127, 5128, 5129, 5130, 5131, 5132, 5133, 5134, 5135, 5136, 5137, 5138, 5139, 5140, 5141, 5145, 5146, 5147, 5148, 5149, 5150, 5151, 5152, 5153, 5154, 5155, 5156, 5157, 5158, 5159, 5160, 5161, 5162, 5163, 5164, 5165, 5166, 5167, 5168, 5169, 5170, 5171, 5172, 5173, 5174, 5175, 5176, 5177, 5178, 5182, 5183, 5184, 5185, 5186, 5187, 5188, 5189, 5190, 5191, 5192, 5193, 5194, 5195, 5196, 5197, 5198, 5199, 5200, 5201, 5202, 5203, 5204, 5205, 5206, 5207, 5208, 5209, 5210, 5211, 5212, 5213, 5230, 5231, 5233, 5234, 5235, 5236, 5249, 5250, 5251, 5252, 5253, 5254, 5255, 5256, 5257, 5258, 5259, 5260, 5261, 5262, 5263, 5264, 5265, 5266, 5267, 5268, 5269, 5270, 5271, 5272, 5273, 5274, 5275, 5276, 5277, 5278, 5279, 5280, 5281, 5291, 5292, 5293, 5294, 5295, 5296, 5297, 5298, 5299, 5300, 5301, 5302, 5303, 5304, 5305, 5306, 5307, 5308, 5309, 5310, 5311, 5312, 5313, 5314, 5315, 5316, 5317, 5318, 5319, 5320, 5321, 5322, 5323, 5324, 5325, 5326, 5327, 5328, 5329, 5330, 5331, 5332, 5333, 5334, 5335, 5336, 5337, 5338, 5339, 5340, 5341, 5342, 5343, 5344, 5345, 5346, 5347, 5348, 5349, 5350, 5351, 5352, 5353, 5354, 5355, 5356, 5357, 5358, 5359, 5360, 5361, 5362, 5363, 5364, 5365, 5366, 5367, 5368, 5369, 5370, 5371, 5372, 5373, 5374, 5375, 5376, 5377, 5378, 5379, 5380, 5381, 5382, 5383, 5384, 5385, 5386, 5387, 5388, 5389, 5390, 5391, 5392, 5393, 5419, 5420, 5421, 5422, 5423, 5424, 5426, 5427, 5428, 5429, 5438, 5447, 5448, 5449, 5450, 5451, 5452, 5453, 5454, 5455, 5456, 5457, 5458, 5459, 5460, 5461, 5462, 5463, 5464, 5465, 5469, 5470, 5477, 5478, 5479, 5480, 5481, 5482, 5490, 5491, 5492, 5493, 5494, 5495, 5496, 5497, 5498, 5499, 5504, 5505, 5506, 5507, 5508, 5509, 5510, 5511, 5512, 5513, 5514, 5515, 5516, 5517, 5518, 5519, 5520, 5521, 5522, 5523, 5524, 5525, 5526, 5527, 5528, 5529, 5530, 5531, 5532, 5533, 5534, 5535, 5536, 5537, 5538, 5539, 5540, 5541, 5542, 5543, 5544, 5545, 5546, 5547, 5548, 5549, 5551, 5552, 5553, 5554, 5555, 5556, 5557, 5558, 5559, 5560, 5561, 5562, 5563, 5564, 5565, 5566, 5567, 5568, 5569, 5570, 5571, 5577, 5578, 5579, 5580, 5590, 5591, 5592, 5593, 5594, 5595, 5596, 5605, 5606, 5607, 5608, 5609, 5610, 5611, 5616, 5617, 5618, 5619, 5620, 5621, 5622, 5623, 5631, 5632, 5633, 5638, 5639, 5640, 5671, 5672, 5673, 5674, 5675, 5676, 5677, 5678, 5679, 5680, 5681, 5682, 5683, 5684, 5685, 5686, 5687, 5688, 5689, 5690, 5691, 5692, 5693, 5694, 5695, 5696, 5697, 5698, 5699, 5700, 5701, 5702, 5703, 5704, 5705, 5706, 5707, 5708, 5709, 5710, 5711, 5712, 5713, 5714, 5715, 5716, 5717, 5727, 5740, 5741, 5742, 5743, 5744, 5745, 5746, 5747, 5748, 5749, 5750, 5751, 5755, 5757, 5758, 5759, 5760, 5761, 5762, 5763, 5764, 5765, 5766, 5767, 5768, 5769, 5770, 5772, 5773, 5775, 5776, 5777, 5778, 5779, 5780, 5783, 5784, 5785, 5786, 5787, 5788, 5789, 5790, 5791, 5792, 5793, 5794, 5795, 5796, 5797, 5798, 5799, 5800, 5801, 5802, 5803, 5811, 5812, 5813, 5814, 5821, 5822, 5823, 5824, 5825, 5826, 5827, 5828, 5829, 5830, 5831, 5833, 5834, 5836, 5837, 5838, 5839, 5848, 5849, 5850, 5851, 5852, 5853, 5854, 5855, 5856, 5857, 5858, 5859, 5860, 5861, 5862, 5863, 5864, 5865, 5866, 5867, 5868, 5869, 5870, 5871, 5872, 5873, 5874, 5875, 5876, 5877, 5878, 5880, 5881, 5882, 5883, 5884, 5885, 5886, 5887, 5888, 5889, 5890, 5891, 5892, 5893, 5894, 5895, 5896, 5897, 5898, 5899, 5907, 5908, 5909, 5911, 5912, 5913, 5914, 5915, 5916, 5917, 5918, 5919, 5920, 5921, 5922, 5929, 5950, 5951, 5952, 5953, 5954, 5955, 5956, 5963, 5967, 5969, 5970, 5974, 5975, 5976, 5977, 5978, 5979, 5980, 5981, 5982, 5983, 5984, 5985, 5986, 5987, 5988, 5994, 5995, 5996, 5997, 5998, 5999, 6000, 6001, 6002, 6020, 6021, 6022, 6023, 6024, 6025, 6026, 6027, 6028, 6056, 6057, 6058, 6059, 6060, 6061, 6062, 6063, 6064, 6065, 6066, 6067, 6068, 6069, 6070, 6071, 6072, 6073, 6074, 6075, 6076, 6077, 6078, 6079, 6080, 6081, 6082, 6083, 6084, 6085, 6086, 6087, 6088, 6089, 6090, 6091, 6092, 6093, 6094, 6095, 6096, 6097, 6098, 6100, 6101, 6102, 6103, 6105, 6106, 6107, 6108, 6109, 6110, 6111, 6112, 6113, 6114, 6115, 6116, 6117, 6118, 6119, 6120, 6121, 6122, 6123, 6124, 6128, 6130, 6142, 6143, 6144, 6145, 6146, 6147, 6148, 6149, 6150, 6151, 6152, 6153, 6154, 6155, 6156, 6157, 6169, 6170, 6171, 6172, 6173, 6174, 6175, 6176, 6177, 6178, 6179, 6180, 6181, 6182, 6185, 6186, 6187, 6189, 6190, 6191, 6208, 6209, 6231, 6232, 6233, 6234, 6235, 6236, 6237, 6238, 6239, 6251, 6256, 6257, 6258, 6259, 6260, 6261, 6262, 6278, 6279, 6280, 6281, 6282, 6286, 6287, 6288, 6289, 6290, 6298, 6299, 6300, 6301, 6302, 6303, 6304, 6305, 6306, 6307, 6308, 6309, 6310, 6311, 6312, 6313, 6314, 6315, 6346, 6347, 6356, 6357, 6358, 6365, 6366, 6367, 6368, 6369, 6370, 6372, 6378, 6379, 6387, 6388, 6389, 6390, 6391, 6392, 6393, 6394, 6395, 6396, 6397, 6398, 6399, 6400, 6401, 6402, 6403, 6405, 6406, 6407, 6446, 6447, 6448, 6451, 6452, 6453, 6497, 6498, 6499, 6500, 6501, 6502, 6503, 6504, 6505, 6506, 6507, 6508, 6509, 6510, 6511, 6512, 6514, 6519, 6520, 6521, 6522, 6523, 6549, 6550, 6551, 6552, 6553, 6554, 6555, 6556, 6557, 6558, 6588, 6589, 6591, 6592, 6593, 6594, 6595, 6596, 6597, 6598, 6599, 6600, 6601, 6602, 6603, 6604, 6605, 6606, 6611, 6612, 6613, 6614, 6615, 6616, 6617, 6618, 6619, 6620, 6621, 6622, 6623, 6624, 6625, 6626, 6627, 6628, 6629, 6630, 6631, 6632, 6633, 6634, 6638, 6639, 6640, 6641, 6642, 6643, 6644, 6684, 6685, 6686, 6697, 6698, 6699, 6700, 6701, 6716, 6719, 6721, 6723, 6724, 6725, 6726, 6727, 6728, 6729, 6730, 6731, 6732, 6733, 6734, 6735, 6754, 6755, 6756, 6757, 6758, 6759, 6760, 6761, 6762, 6763, 6764, 6796, 6797, 6798, 6799, 6800, 6801, 6805, 6806, 6807, 6808, 6809, 6814, 6815, 6816, 6817, 6818, 6824, 6825, 6826, 6831, 6832, 6833, 6834, 6853, 6854, 6855, 6856, 6857, 6858, 6859, 6860, 6861, 6862, 6863, 6864, 6865, 6866, 6867, 6868, 6869, 6872, 6873, 6875, 6876, 6877, 6878, 6879, 6885, 6888, 6889, 6890, 6891, 6892, 6893, 6894, 6895, 6896, 6897, 6898, 6899, 6900, 6901, 6902, 6903, 6904, 6905, 6906, 6907, 6908, 6909, 6910, 6911, 6912, 6913, 6914, 6915, 6916, 6917, 6918, 6919, 6920, 6921, 6922, 6923, 6924, 6925, 6926, 6927, 6928, 6929, 6930, 6931, 6932, 6933, 6934, 6935, 6936, 6953, 6954, 6955, 6957, 6958, 6959, 6960, 6962, 6963, 6964, 6965, 6966, 6967, 6968, 6969, 6970, 6971, 6972, 6973, 6983, 6984, 6985, 6986, 6987, 6988, 6989, 6990, 6991, 6992, 6993, 6994, 6995, 7007, 7008, 7009, 7010, 7011, 7012, 7015, 7016, 7017, 7018, 7019, 7020, 7021, 7022, 7023, 7024, 7025, 7026, 7034, 7035, 7084, 7086, 7087, 7088, 7089, 7090, 7091, 7092, 7128, 7137, 7138, 7139, 7140, 7141, 7142, 7143, 7144, 7145, 7146, 7147, 7148, 7149, 7150, 7151, 7152, 7153, 7154, 7155, 7183, 7184, 7185, 7186, 7188, 7189, 7195, 7196, 7197, 7198, 7200, 7201, 7202, 7203, 7204, 7205, 7206, 7207, 7208, 7209, 7210, 7211, 7212, 7213, 7214, 7215, 7216, 7217, 7218, 7219, 7220, 7221, 7222, 7223, 7224, 7225, 7226, 7227, 7228, 7229, 7230, 7231, 7232, 7233, 7234, 7235, 7236, 7237, 7238, 7239, 7240, 7241, 7243, 7244, 7245, 7246, 7247, 7248, 7249, 7250, 7251, 7252, 7253, 7254, 7255, 7256, 7257, 7258, 7259, 7260, 7261, 7262, 7263, 7264, 7265, 7266, 7267, 7268, 7269, 7270, 7271, 7272, 7273, 7274, 7275, 7291, 7292, 7293, 7294, 7295, 7296, 7297, 7298, 7347, 7348, 7349, 7355, 7356, 7357, 7358, 7359, 7360, 7361, 7362, 7363, 7364, 7365, 7372, 7373, 7374, 7375, 7376, 7377, 7378, 7383, 7415, 7416, 7417, 7438, 7439, 7440, 7441, 7442, 7471, 7472, 7473, 7474, 7475, 7476, 7477, 7478, 7490, 7496, 7497, 7498, 7499, 7500, 7501, 7502, 7503, 7504, 7505, 7506, 7507, 7508, 7509, 7510, 7511, 7512, 7513, 7514, 7515, 7532, 7533, 7534, 7535, 7537, 7538, 7539, 7540, 7541, 7542, 7543, 7544, 7545, 7546, 7547, 7548, 7549, 7550, 7551, 7552, 7553, 7554, 7555, 7556, 7557, 7558, 7559, 7560, 7561, 7562, 7563, 7564, 7565, 7566, 7567, 7568, 7569, 7570, 7581, 7582, 7583, 7584, 7585, 7586, 7587, 7588, 7589, 7590, 7591, 7592, 7593, 7595, 7596, 7597, 7599, 7600, 7601, 7617, 7618, 7619, 7620, 7621, 7622, 7623, 7638, 7668, 7669, 7670, 7672, 7673, 7674, 7675, 7676, 7685, 7687, 7694, 7695, 7696, 7717, 7718, 7719, 7720, 7721, 7722, 7723, 7724, 7725, 7726, 7727, 7728, 7729, 7730, 7731, 7732, 7733, 7734, 7735, 7736, 7737, 7738, 7739, 7740, 7741, 7742, 7743, 7744, 7746, 7747, 7748, 7749, 7750, 7751, 7752, 7757, 7758, 7759, 7760, 7761, 7762, 7763, 7764, 7765, 7766, 7767, 7768, 7796, 7797, 7805, 7813, 7814, 7815, 7816, 7817, 7818, 7819, 7820, 7821, 7822, 7848, 7849, 7850, 7851, 7852, 7853, 7854, 7859, 7860, 7861, 7862, 7863, 7864, 7865, 7866, 7867, 7869, 7870, 7871, 7872, 7873, 7874, 7875, 7876, 7877, 7917, 7918, 7919, 7925, 7926, 7927, 7928, 7929, 7941, 7942, 7943, 7944, 7945, 7946, 7947, 7948, 7949, 7950, 7951, 7952, 7953, 7955, 7956, 7957, 7958, 7959, 7960, 7961, 7962, 7963, 7964, 7965, 7966, 7967, 7968, 7969, 7970, 7971, 7972, 7974, 7975, 7976, 7977, 7978, 7979, 7980, 7981, 7982, 7983, 7984, 7985, 7986, 7987, 7988, 7989, 7990, 7991, 7992, 7993, 7994, 7995, 7996, 7997, 7998, 7999, 8000, 8011, 8012, 8013, 8014, 8015, 8016, 8017, 8018, 8019, 8020, 8021, 8022, 8023, 8024, 8025, 8026, 8027, 8028, 8029, 8030, 8048, 8049, 8050, 8051, 8052, 8053, 8054, 8055, 8056, 8057, 8087, 8088, 8089, 8090, 8091, 8092, 8095, 8096, 8097, 8098, 8099, 8100, 8101, 8102, 8103, 8104, 8105, 8106, 8107, 8110, 8111, 8112, 8113, 8114, 8115, 8116, 8117, 8118, 8119, 8120, 8121, 8122, 8123, 8124, 8125, 8126, 8127, 8130, 8131, 8132, 8133, 8134, 8135, 8136, 8144, 8145, 8166, 8169, 8170, 8171, 8172, 8173, 8174, 8175, 8176, 8177, 8178, 8179, 8180, 8181, 8182, 8188, 8191, 8192, 8193, 8194, 8195, 8196, 8197, 8198, 8199, 8200, 8201, 8209, 8210, 8211, 8212, 8215, 8227, 8230, 8231, 8232, 8233, 8234, 8235, 8236, 8237, 8238, 8239, 8240, 8241, 8242, 8243, 8244, 8245, 8246, 8247, 8248, 8249, 8250, 8251, 8252, 8253, 8254, 8255, 8256, 8257, 8258, 8259, 8260, 8261, 8262, 8263, 8299, 8302, 8303, 8304, 8305, 8306, 8334, 8335, 8336, 8337, 8338, 8339, 8340, 8341, 8342, 8343, 8344, 8353, 8354, 8355, 8356, 8357, 8358, 8359, 8360, 8361, 8365, 8366, 8367, 8368, 8369, 8370, 8371, 8375, 8376, 8377, 8378, 8379, 8380, 8381, 8382, 8410, 8411, 8412, 8440, 8459, 8460, 8461, 8462, 8463, 8474, 8475, 8476, 8477, 8478, 8501, 8502, 8503, 8507, 8508, 8509, 8510, 8511, 8512, 8514, 8515, 8537, 8538, 8539, 8544, 8545, 8546, 8547, 8548, 8549, 8550, 8551, 8552, 8553, 8554, 8555, 8558, 8559, 8560, 8561, 8562, 8563, 8564, 8565, 8566, 8567, 8570, 8571, 8572, 8573, 8574, 8575, 8576, 8577, 8578, 8579, 8580, 8581, 8586, 8587, 8588, 8589, 8590, 8591, 8592, 8593, 8594, 8595, 8596, 8597, 8601, 8602, 8603, 8604, 8605, 8615, 8617, 8618, 8655, 8686, 8693, 8694, 8695, 8696, 8697, 8698, 8709, 8712, 8713, 8714, 8715, 8716, 8717, 8718, 8719, 8720, 8721, 8722, 8723, 8724, 8725, 8726, 8727, 8728, 8729, 8730, 8731, 8732, 8733, 8734, 8770, 8771, 8788, 8789, 8790, 8791, 8792, 8793, 8794, 8795, 8796, 8797, 8798, 8799, 8800, 8801, 8802, 8803, 8804, 8805, 8806, 8807, 8808, 8809, 8810, 8811, 8817, 8818, 8819, 8820, 8821, 8822, 8823, 8824, 8825, 8826, 8827, 8828, 8829, 8830, 8837, 8838, 8839, 8840, 8841, 8842, 8843, 8844, 8845, 8846, 8847, 8848, 8849, 8850, 8851, 8854, 8855, 8856, 8857, 8858, 8859, 8860, 8861, 8862, 8863, 8864, 8865, 8867, 8868, 8872, 8873, 8874, 8875, 8876, 8877, 8878, 8879, 8880, 8881, 8882, 8883, 8884, 8885, 8886, 8887, 8888, 8889, 8890, 8891, 8892, 8893, 8894, 8895, 8896, 8897, 8898, 8899, 8900, 8901, 8902, 8903, 8904, 8906, 8913, 8914, 8915, 8916, 8917, 8918, 8919, 8920, 8921, 8923, 8924, 8925, 8926, 8927, 8928, 8933, 8934, 8935, 8936, 8937, 8938, 8939, 8940, 8941, 8942, 8943, 8944, 8945, 8946, 8947, 8948, 8949, 8950, 8951, 8954, 8955, 8956, 8974, 8975, 8976, 8977, 8978, 8979, 8980, 8981, 8992, 8993, 8994, 8995, 8996, 8997, 8998, 8999, 9000, 9001, 9002, 9003, 9010, 9011, 9012, 9013, 9014, 9018, 9019, 9020, 9021, 9022, 9023, 9024, 9025, 9026, 9027, 9028, 9029, 9030, 9031, 9041, 9042, 9043, 9044, 9045, 9046, 9047, 9048, 9049, 9050, 9051, 9052, 9053, 9054, 9055, 9056, 9057, 9058, 9059, 9065, 9066, 9087, 9088, 9091, 9092, 9093, 9094, 9095, 9096, 9097, 9098, 9103, 9104, 9105, 9106, 9107, 9108, 9109, 9110, 9111, 9112, 9113, 9114, 9115, 9123, 9124, 9125, 9126, 9127, 9128, 9129, 9130, 9131, 9133, 9134, 9135, 9136, 9137, 9145, 9146, 9147, 9148, 9149, 9150, 9151, 9160, 9161, 9162, 9163, 9186, 9187, 9188, 9189, 9190, 9191, 9192, 9193, 9194, 9195, 9196, 9197, 9198, 9199, 9200, 9201, 9203.

### Testicular Cancer

[0745] Testicular cancer forms in the tissues of one or both testicles and is most common in young or middle-aged men. Most testicular cancers being in germ cells and are called testicular germ cell tumors. There are two types of testicular germ cell tumors called seminomas and nonseminomas. Common symptoms of testicular cancer include, but are not limited to, a painless lump or swelling in either testicle, change in how the testicle feels, dull ache in the lower abdomen or the groin, sudden build-up of fluid in the scrotum and pain or discomfort in a testicle or in the scrotum.

[0746] In one embodiment, the oncology-related polynucleotides, oncology-related primary constructs or oncology-related mmRNA of the present invention may be used to treat a disease, disorder and/or condition in a subject who has been diagnosed or may be diagnosed with testicular cancer by administering to said subject an isolated polynucleotide encoding an oncology-related polypeptide of interest. In one embodiment, the oncology-related polynucleotides, oncology-related primary constructs or oncology-related mmRNA of the present invention may be used to reduce, eliminate, or prevent tumor growth in a subject who has been diagnosed or may be diagnosed with testicular cancer by administering to said subject an isolated polynucleotide encoding an oncology-related polypeptide of interest. In one embodiment, the oncology-related polynucleotides, oncology-related primary constructs or oncology-related mmRNA of the present invention may be used to reduce and/or ameliorate at least one symptom of cancer in a subject who has been diagnosed or may be diagnosed with testicular cancer by administering to said subject an isolated polynucleotide encoding an oncology-related polypeptide of interest. In a further embodiment, the oncology-related polypeptide of interest may include, but not limited to, SEQ ID NOs: 4711, 4712, 4713, 4714, 4715, 4716, 4717, 4718, 4719, 4720, 4721, 4722, 4723, 4724, 4725, 4726, 4727, 4728, 4742, 4743, 4744, 4745, 4746, 4747, 4748, 4749, 4750, 4751, 4781, 4782, 4783, 4784, 4785, 4786, 4787, 4788, 4789, 4790, 4825, 4826, 4827, 4828, 4829, 4830, 4832, 4854, 4855, 4856, 4857, 4858, 4859, 4860, 4861, 4863, 4864, 4865, 4866, 4867, 4868, 4869, 4870, 4871, 4872, 4873, 4885, 4886, 4887, 4888, 4889, 4890, 4891, 4892, 4893, 4894, 4911, 4912, 4913, 4914, 4915, 4916, 4917, 4918, 4919, 4920, 4960, 4961, 4962, 4963, 4964, 4965, 4966, 4967, 4968, 4969, 4970, 4971, 4972, 4973, 4974, 4975, 4976, 4977, 4978, 4979, 4980, 4981, 4982, 4983, 4984, 4985, 4986, 4987, 4988, 4989, 4990, 4991, 4992, 4993, 4994, 4995, 4996, 4997, 4998, 4999, 5000, 5001, 5002, 5008, 5009, 5010, 5011, 5012, 5013, 5014, 5015, 5016, 5017, 5018, 5019, 5020, 5021, 5022, 5023, 5024, 5025, 5026, 5027, 5028, 5030, 5031, 5032, 5033, 5034, 5035, 5036, 5037, 5038, 5039, 5040, 5041, 5042, 5043, 5044, 5045, 5046, 5047, 5048, 5049, 5050, 5051, 5052, 5053, 5054, 5055, 5056, 5057, 5058, 5059, 5060, 5061, 5062, 5063, 5064, 5065, 5066, 5067, 5068, 5069, 5070, 5071, 5072, 5073, 5074, 5075, 5076, 5077, 5078, 5079, 5103, 5104, 5105, 5106, 5107, 5108, 5109, 5110, 5118, 5119, 5120, 5121, 5122, 5123, 5124, 5125, 5126, 5127, 5128, 5129, 5130, 5131, 5132, 5133, 5134, 5135, 5136, 5137, 5138, 5139, 5140, 5141, 5145, 5146, 5147, 5148, 5149, 5150, 5151, 5152, 5153, 5154, 5155, 5156, 5157, 5158, 5159, 5160, 5161, 5162, 5163, 5164, 5165, 5166, 5167, 5168, 5169, 5170, 5171, 5172, 5173, 5174, 5175, 5176, 5177, 5178, 5182, 5183, 5184, 5185, 5186, 5187, 5188, 5189, 5190, 5191, 5192, 5193, 5194, 5195, 5196, 5197, 5198, 5199, 5200, 5201, 5202, 5203, 5204, 5205, 5206, 5207, 5208, 5209, 5210, 5211, 5212, 5213, 5230, 5231, 5252, 5253, 5254, 5255, 5256, 5257, 5258, 5259, 5260, 5261, 5262, 5263, 5264, 5265, 5266, 5267, 5268, 5269, 5270, 5271, 5291, 5292, 5293, 5294, 5295, 5296, 5297, 5298, 5299, 5300, 5301, 5302, 5303, 5304, 5305, 5306, 5307, 5308, 5309, 5310, 5311, 5312, 5313, 5314, 5315, 5316, 5317, 5318, 5319, 5320, 5321, 5322, 5323, 5324, 5325, 5326, 5327, 5328, 5329, 5330, 5331, 5332, 5333, 5334, 5335, 5336, 5337, 5338, 5339, 5340, 5341, 5342, 5343, 5344, 5345, 5346, 5347, 5348, 5349, 5350, 5351, 5352, 5353, 5354, 5355, 5356, 5357, 5358, 5359, 5360, 5361, 5362, 5363, 5364, 5365, 5366, 5367, 5368, 5369, 5370, 5371, 5372, 5373, 5374, 5375, 5376, 5377, 5378, 5379, 5380, 5381, 5382, 5383, 5384, 5385, 5386, 5387, 5388, 5389, 5390, 5391, 5392, 5393, 5394, 5395, 5396, 5397, 5398, 5399, 5400, 5401, 5402, 5419, 5420, 5421, 5426, 5427, 5428, 5429, 5438, 5447, 5448, 5449, 5450, 5451, 5452, 5453, 5454, 5455, 5456, 5457, 5458, 5459, 5460, 5461, 5462, 5463, 5464, 5465, 5469, 5470, 5477, 5478, 5479, 5480, 5481, 5482, 5490, 5491, 5492, 5493, 5494, 5495, 5496, 5497, 5498, 5499, 5504, 5505, 5506, 5507, 5508, 5509, 5510, 5511, 5512, 5513, 5514, 5515, 5516, 5517, 5518, 5519, 5520, 5521, 5522, 5523, 5524, 5525, 5526, 5527, 5528, 5529, 5530, 5531, 5532, 5533, 5534, 5535, 5536, 5548, 5549, 5551, 5552, 5553, 5554, 5555, 5556, 5557, 5558, 5559, 5560, 5561, 5562, 5563, 5564, 5565, 5566, 5567, 5568, 5569, 5570, 5571, 5577, 5578, 5579, 5580, 5590, 5591, 5592, 5593, 5594, 5595, 5596, 5605, 5606, 5607, 5608, 5609, 5610, 5611, 5616, 5617, 5618, 5619, 5620, 5621, 5622, 5623, 5631, 5632, 5633, 5638, 5639, 5640, 5671, 5672, 5673, 5674, 5675, 5676, 5677, 5678, 5679, 5680, 5681, 5688, 5689, 5690, 5691, 5692, 5693, 5694, 5695, 5696, 5697, 5698, 5699, 5700, 5701, 5702, 5703, 5708, 5709, 5710, 5711, 5712, 5713, 5714, 5715, 5716, 5717, 5727, 5740, 5741, 5743, 5744, 5745, 5746, 5747, 5748, 5749, 5750, 5751, 5755, 5757, 5758, 5759, 5760, 5761, 5762, 5763, 5764, 5765, 5766, 5767, 5768, 5769, 5770, 5772, 5773, 5775, 5776, 5777, 5778, 5779, 5780, 5783, 5784, 5785, 5786, 5787, 5788, 5789, 5790, 5791, 5792, 5793, 5794, 5795, 5796, 5797, 5798, 5799, 5800, 5801, 5802, 5803, 5811, 5812, 5813, 5814, 5821, 5822, 5823, 5824, 5825, 5826, 5827, 5828, 5829, 5830, 5831, 5833, 5834, 5836, 5837, 5838, 5839, 5848, 5849, 5850, 5851, 5852, 5853, 5854, 5855, 5864, 5865, 5866, 5867, 5868, 5875, 5876, 5877, 5878, 5880, 5881, 5882, 5883, 5884, 5885, 5886, 5887, 5888, 5889, 5890, 5891, 5892, 5893, 5894, 5895, 5896, 5897, 5898, 5899, 5907, 5908, 5909, 5911, 5912, 5913, 5914, 5915, 5916, 5917, 5918, 5919, 5920, 5921, 5922, 5929, 5950, 5951, 5952, 5953, 5954, 5955, 5956, 5963, 5967, 5969, 5970, 5982, 5983, 5984, 5985, 5986, 5987, 5988, 5997, 5998, 5999, 6000, 6001, 6002, 6068, 6069, 6070, 6071, 6072, 6074, 6075, 6076, 6077, 6078, 6080, 6081, 6082, 6083, 6084, 6085, 6086, 6087, 6088, 6089, 6090, 6091, 6092, 6093, 6094, 6095, 6096, 6097, 6098, 6100, 6101, 6102, 6103, 6105, 6106, 6107, 6108, 6109, 6110, 6111, 6112, 6113, 6114, 6115, 6116, 6117, 6118, 6119, 6120, 6121, 6122, 6123, 6124, 6128, 6130, 6142, 6143, 6144, 6145, 6146, 6147, 6148, 6149, 6151, 6152, 6153, 6154, 6155, 6156, 6157, 6169, 6170, 6171, 6172, 6173, 6174, 6175, 6176, 6177, 6178, 6179, 6180, 6181, 6182, 6185, 6186, 6187, 6191, 6208, 6209, 6231, 6232, 6233, 6234, 6235, 6236, 6237, 6238, 6239, 6251, 6256, 6257, 6258, 6259, 6260, 6261, 6262, 6278, 6279, 6280, 6281, 6282, 6286, 6287, 6288, 6289, 6290, 6298, 6299, 6300, 6301, 6302, 6303, 6304, 6305, 6306, 6307, 6308, 6309, 6310, 6311, 6312, 6313, 6314, 6315, 6356, 6357, 6358, 6378, 6379, 6387, 6388, 6389, 6390, 6391, 6392, 6393, 6394, 6395, 6396, 6397, 6398, 6399, 6400, 6401, 6402, 6403, 6405, 6406, 6407, 6451, 6452, 6453, 6497, 6498, 6499, 6500, 6501, 6502, 6503, 6509, 6510, 6511, 6512, 6514, 6519, 6520, 6521, 6522, 6523, 6549, 6550, 6551, 6552, 6553, 6554, 6555, 6556, 6557, 6558, 6588, 6589, 6599, 6600, 6601, 6602, 6603, 6604, 6605, 6606, 6611, 6612, 6613, 6614, 6615, 6616, 6617, 6618, 6619, 6620, 6621, 6622, 6623, 6624, 6625, 6626, 6627, 6628, 6629, 6630, 6631, 6632, 6633, 6634, 6638, 6639, 6640, 6641, 6642, 6643, 6644, 6658, 6684, 6685, 6686, 6697, 6698, 6699, 6700, 6701, 6702, 6703, 6704, 6705, 6706, 6707, 6708, 6709, 6710, 6719, 6721, 6723, 6724, 6754, 6755, 6756, 6757, 6758, 6759, 6760, 6761, 6762, 6763, 6764, 6796, 6797, 6798, 6799, 6800, 6805, 6806, 6807, 6808, 6809, 6814, 6815, 6816, 6817, 6818, 6824, 6825, 6826, 6831, 6832, 6833, 6834, 6853, 6854, 6855, 6856, 6857, 6860, 6861, 6862, 6863, 6864, 6865, 6866, 6867, 6868, 6869, 6872, 6873, 6875, 6876, 6877, 6878, 6879, 6885, 6888, 6889, 6890, 6891, 6892, 6893, 6894, 6895, 6896, 6897, 6898, 6899, 6900, 6901, 6902, 6903, 6904, 6905, 6906, 6907, 6908, 6909, 6910, 6911, 6912, 6913, 6914, 6915, 6916, 6917, 6918, 6919, 6920, 6921, 6922, 6923, 6924, 6925, 6926, 6927, 6928, 6929, 6930, 6931, 6932, 6933, 6934, 6935, 6936, 6953, 6954, 6955, 6957, 6958, 6959, 6960, 6962, 6963, 6964, 6965, 6966, 6967, 6968, 6969, 6970, 6971, 6972, 6973, 6983, 6984, 6985, 6988, 6989, 6990, 6991, 6992, 6993, 6994, 6995, 7007, 7008, 7009, 7010, 7011, 7012, 7015, 7016, 7017, 7018, 7019, 7020, 7021, 7034, 7035, 7084, 7086, 7087, 7088, 7089, 7090, 7091, 7092, 7128, 7137, 7138, 7139, 7140, 7141, 7142, 7143, 7144, 7145, 7146, 7147, 7148, 7149, 7150, 7151, 7152, 7153, 7154, 7155, 7195, 7196, 7197, 7198, 7200, 7201, 7202, 7203, 7204, 7205, 7206, 7207, 7208, 7209, 7210, 7211, 7212, 7213, 7214, 7215, 7216, 7217, 7218, 7219, 7220, 7221, 7222, 7223, 7224, 7225, 7226, 7227, 7228, 7229, 7230, 7231, 7232, 7233, 7234, 7235, 7236, 7237, 7238, 7239, 7240, 7241, 7243, 7244, 7245, 7246, 7247, 7248, 7249, 7250, 7251, 7252, 7253, 7254, 7255, 7256, 7257, 7258, 7259, 7260, 7261, 7262, 7263, 7264, 7265, 7266, 7267, 7268, 7269, 7270, 7271, 7291, 7292, 7293, 7294, 7295, 7296, 7297, 7298, 7305, 7306, 7307, 7308, 7309, 7310, 7311, 7312, 7313, 7314, 7315, 7316, 7317, 7347, 7348, 7349, 7358, 7359, 7360, 7361, 7362, 7363, 7364, 7365, 7372, 7373, 7374, 7375, 7376, 7377, 7378, 7383, 7415, 7416, 7417, 7438, 7471, 7472, 7473, 7474, 7475, 7476, 7477, 7490, 7496, 7497, 7498, 7499, 7500, 7501, 7502, 7503, 7504, 7505, 7506, 7507, 7508, 7509, 7510, 7511, 7512, 7513, 7514, 7515, 7532, 7533, 7534, 7535, 7537, 7538, 7539, 7540, 7541, 7542, 7543, 7544, 7545, 7546, 7547, 7548, 7549, 7550, 7551, 7552, 7553, 7554, 7555, 7556, 7557, 7558, 7559, 7560, 7585, 7586, 7587, 7588, 7589, 7590, 7591, 7592, 7593, 7594, 7595, 7596, 7597, 7599, 7600, 7601, 7617, 7618, 7619, 7620, 7621, 7622, 7623, 7638, 7668, 7669, 7670, 7672, 7673, 7674, 7675, 7676, 7685, 7687, 7694, 7695, 7696, 7717, 7718, 7719, 7720, 7721, 7722, 7723, 7724, 7725, 7726, 7727, 7728, 7729, 7730, 7731, 7732, 7733, 7734, 7735, 7736, 7737, 7738, 7739, 7740, 7741, 7742, 7743, 7744, 7746, 7747, 7748, 7749, 7750, 7751, 7752, 7757, 7758, 7759, 7760, 7761, 7762, 7763, 7764, 7765, 7766, 7767, 7768, 7796, 7797, 7805, 7813, 7814, 7815, 7816, 7817, 7818, 7819, 7820, 7821, 7822, 7848, 7849, 7850, 7851, 7852, 7853, 7854, 7859, 7860, 7861, 7862, 7863, 7864, 7865, 7866, 7867, 7869, 7870, 7874, 7875, 7917, 7918, 7919, 7925, 7926, 7927, 7928, 7929, 7941, 7942, 7943, 7944, 7945, 7946, 7947, 7948, 7949, 7950, 7951, 7952, 7953, 7955, 7956, 7957, 7958, 7959, 7960, 7961, 7962, 7963, 7964, 7965, 7966, 7967, 7968, 7969, 7970, 7971, 7972, 7974, 7975, 7976, 7977, 7978, 7979, 7980, 7981, 7982, 7983, 7984, 7985, 7986, 7987, 7988, 7989, 7990, 7991, 7992, 7993, 7994, 7995, 7996, 7997, 7998, 7999, 8000, 8011, 8012, 8013, 8014, 8015, 8016, 8017, 8018, 8019, 8020, 8021, 8022, 8023, 8024, 8025, 8026, 8027, 8028, 8029, 8030, 8048, 8049, 8050, 8051, 8052, 8053, 8054, 8055, 8056, 8057, 8087, 8088, 8089, 8090, 8091, 8092, 8095, 8096, 8097, 8098, 8099, 8100, 8101, 8102, 8103, 8104, 8105, 8106, 8107, 8110, 8111, 8112, 8113, 8114, 8115, 8116, 8117, 8118, 8119, 8120, 8121, 8122, 8123, 8124, 8125, 8126, 8127, 8130, 8131, 8132, 8133, 8134, 8135, 8136, 8144, 8145, 8166, 8169, 8170, 8171, 8172, 8173, 8174, 8175, 8176, 8177, 8178, 8179, 8180, 8181, 8182, 8188, 8191, 8192, 8193, 8194, 8195, 8196, 8197, 8198, 8199, 8200, 8201, 8209, 8210, 8211, 8212, 8215, 8227, 8230, 8231, 8232, 8233, 8234, 8235, 8236, 8237, 8238, 8239, 8240, 8241, 8242, 8243, 8244, 8245, 8246, 8247, 8248, 8249, 8250, 8251, 8260, 8261, 8262, 8263, 8299, 8302, 8303, 8304, 8305, 8306, 8353, 8354, 8355, 8356, 8357, 8358, 8359, 8360, 8361, 8375, 8376, 8377, 8378, 8379, 8380, 8381, 8382, 8410, 8411, 8412, 8440, 8459, 8460, 8461, 8462, 8463, 8474, 8475, 8476, 8477, 8478, 8508, 8509, 8510, 8511, 8512, 8514, 8515, 8546, 8547, 8548, 8549, 8550, 8551, 8552, 8553, 8554, 8555, 8570, 8571, 8572, 8573, 8574, 8575, 8576, 8577, 8578, 8579, 8580, 8581, 8586, 8587, 8593, 8594, 8595, 8596, 8597, 8601, 8602, 8603, 8604, 8605, 8615, 8617, 8618, 8655, 8686, 8709, 8712, 8713, 8714, 8715, 8716, 8717, 8718, 8719, 8720, 8721, 8722, 8723, 8724, 8725, 8726, 8727, 8728, 8729, 8730, 8731, 8732, 8733, 8734, 8770, 8771, 8788, 8789, 8790, 8791, 8792, 8793, 8794, 8795, 8796, 8797, 8798, 8799, 8800, 8801, 8802, 8803, 8804, 8805, 8806, 8810, 8811, 8817, 8818, 8819, 8820, 8821, 8822, 8823, 8829, 8830, 8837, 8838, 8839, 8840, 8841, 8848, 8849, 8850, 8851, 8854, 8855, 8856, 8857, 8858, 8859, 8860, 8861, 8862, 8863, 8864, 8865, 8867, 8868, 8872, 8873, 8874, 8875, 8876, 8878, 8879, 8880, 8881, 8882, 8883, 8884, 8885, 8886, 8887, 8888, 8889, 8890, 8891, 8892, 8893, 8894, 8895, 8896, 8897, 8898, 8899, 8900, 8901, 8902, 8903, 8904, 8906, 8913, 8914, 8915, 8916, 8917, 8918, 8919, 8920, 8921, 8925, 8926, 8927, 8928, 8933, 8934, 8935, 8936, 8937, 8938, 8939, 8940, 8941, 8942, 8943, 8944, 8945, 8946, 8947, 8948, 8949, 8950, 8951, 8954, 8955, 8956, 8992, 8993, 8994, 8995, 8996, 8997, 8998, 8999, 9000, 9001, 9002, 9003, 9010, 9011, 9012, 9013, 9014, 9018, 9019, 9020, 9021, 9022, 9023, 9024, 9025, 9026, 9027, 9028, 9029, 9030, 9031, 9041, 9042, 9043, 9044, 9045, 9046, 9047, 9048, 9049, 9050, 9051, 9052, 9053, 9054, 9055, 9056, 9057, 9058, 9059, 9065, 9066, 9087, 9088, 9091, 9092, 9093, 9094, 9095, 9096, 9097, 9098, 9103, 9104, 9105, 9106, 9107, 9108, 9109, 9110, 9123, 9124, 9125, 9126, 9127, 9128, 9129, 9130, 9131, 9133, 9134, 9135, 9136, 9137, 9145, 9146, 9147, 9148, 9149, 9150, 9151, 9160, 9161, 9162, 9163, 9201, 9203.

### Throat Cancer

[0747] Throat cancer forms in the tissues of the pharynx and includes cancer of the nasopharynx (nasopharyngeal cancer), oropharynx (oropharyngeal cancer), hypopharynx (hypopharyngeal cancer), and larynx (laryngeal cancer). Common symptoms of throat cancer include, but are not limited to, a sore throat that does not go away, ear pain, lump in the neck, painful or difficulty swallowing, change or hoarseness in the voice, trouble breathing or speaking, nosebleeds, trouble hearing, pain or ringing in the ear, headaches, dull pain behind the breast bone, cough and weight loss for no reason.

[0748] In one embodiment, the oncology-related polynucleotides, oncology-related primary constructs or oncology-related mmRNA of the present invention may be used to treat a disease, disorder and/or condition in a subject who has been diagnosed or may be diagnosed with throat cancer by administering to said subject an isolated polynucleotide encoding an oncology-related polypeptide of interest. In one embodiment, the oncology-related polynucleotides, oncology-related primary constructs or oncology-related mmRNA of the present invention may be used to reduce, eliminate, or prevent tumor growth in a subject who has been diagnosed or may be diagnosed with throat cancer by administering to said subject an isolated polynucleotide encoding an oncology-related polypeptide of interest. In one embodiment, the oncology-related polynucleotides, oncology-related primary constructs or oncology-related mmRNA of the present invention may be used to reduce and/or ameliorate at least one symptom of cancer in a subject who has been diagnosed or may be diagnosed with throat cancer by administering to said subject an isolated polynucleotide encoding an oncology-related polypeptide of interest. In a further embodiment, the oncology-related polypeptide of interest may include, but not limited to, SEQ ID NOs: 4711, 4712, 4713, 4714, 4715, 4716, 4717, 4718, 4719, 4720, 4721, 4722, 4723, 4724, 4725, 4726, 4727, 4728, 4742, 4743, 4744, 4745, 4746, 4747, 4748, 4749, 4750, 4751, 4781, 4782, 4783, 4784, 4785, 4786, 4787, 4788, 4789, 4790, 4825, 4826, 4827, 4828, 4829, 4830, 4832, 4854, 4855, 4856, 4857, 4858, 4859, 4860, 4861, 4863, 4864, 4865, 4866, 4867, 4868, 4869, 4870, 4871, 4872, 4873, 4885, 4886, 4887, 4888, 4889, 4890, 4891, 4892, 4893, 4894, 4911, 4912, 4913, 4914, 4915, 4916, 4917, 4918, 4919, 4920, 4960, 4961, 4962, 4963, 4964, 4965, 4966, 4967, 4968, 4969, 4970, 4971, 4972, 4973, 4974, 4975, 4976, 4977, 4978, 4979, 4980, 4981, 4982, 4983, 4984, 4985, 4986, 4987, 4988, 4989, 4990, 4991, 4992, 4993, 4994, 4995, 4996, 4997, 4998, 4999, 5000, 5001, 5002, 5008, 5009, 5010, 5011, 5012, 5013, 5014, 5015, 5016, 5017, 5018, 5019, 5020, 5021, 5022, 5023, 5024, 5025, 5026, 5027, 5028, 5030, 5031, 5032, 5033, 5034, 5035, 5036, 5037, 5038, 5039, 5040, 5041, 5042, 5043, 5044, 5045, 5046, 5047, 5048, 5049, 5050, 5051, 5052, 5053, 5054, 5055, 5056, 5057, 5058, 5059, 5060, 5061, 5062, 5063, 5064, 5065, 5066, 5067, 5068, 5069, 5070, 5071, 5072, 5073, 5074, 5075, 5076, 5077, 5078, 5079, 5103, 5104, 5105, 5106, 5107, 5108, 5109, 5110, 5118, 5119, 5120, 5121, 5122, 5123, 5124, 5125, 5126, 5127, 5128, 5129, 5130, 5131, 5132, 5133, 5134, 5135, 5136, 5137, 5138, 5139, 5140, 5141, 5145, 5146, 5147, 5148, 5149, 5150, 5151, 5152, 5153, 5154, 5155, 5156, 5157, 5158, 5159, 5160, 5161, 5162, 5163, 5164, 5165, 5166, 5167, 5168, 5169, 5170, 5171, 5172, 5173, 5174, 5175, 5176, 5177, 5178, 5182, 5183, 5184, 5185, 5186, 5187, 5188, 5189, 5190, 5191, 5192, 5193, 5194, 5195, 5196, 5197, 5198, 5199, 5200, 5201, 5202, 5203, 5204, 5205, 5206, 5207, 5208, 5209, 5210, 5211, 5212, 5213, 5230, 5231, 5252, 5253, 5254, 5255, 5256, 5257, 5258, 5259, 5260, 5261, 5262, 5263, 5264, 5265, 5266, 5267, 5268, 5269, 5270, 5271, 5291, 5292, 5293, 5294, 5295, 5296, 5297, 5298, 5299, 5300, 5301, 5302, 5303, 5304, 5305, 5306, 5307, 5308, 5309, 5310, 5311, 5312, 5313, 5314, 5315, 5316, 5317, 5318, 5319, 5320, 5321, 5322, 5323, 5324, 5325, 5326, 5327, 5328, 5329, 5330, 5331, 5332, 5333, 5334, 5335, 5336, 5337, 5338, 5339, 5340, 5341, 5342, 5343, 5344, 5345, 5346, 5347, 5348, 5349, 5350, 5351, 5352, 5353, 5354, 5355, 5356, 5357, 5358, 5359, 5360, 5361, 5362, 5363, 5364, 5365, 5366, 5367, 5368, 5369, 5370, 5371, 5372, 5373, 5374, 5375, 5376, 5377, 5378, 5379, 5380, 5381, 5382, 5383, 5384, 5385, 5386, 5387, 5388, 5389, 5390, 5391, 5392, 5393, 5394, 5395, 5396, 5397, 5398, 5399, 5400, 5401, 5402, 5419, 5420, 5421, 5426, 5427, 5428, 5429, 5438, 5447, 5448, 5449, 5450, 5451, 5452, 5453, 5454, 5455, 5456, 5457, 5458, 5459, 5460, 5461, 5462, 5463, 5464, 5465, 5469, 5470, 5477, 5478, 5479, 5480, 5481, 5482, 5490, 5491, 5492, 5493, 5494, 5495, 5496, 5497, 5498, 5499, 5504, 5505, 5506, 5507, 5508, 5509, 5510, 5511, 5512, 5513, 5514, 5515, 5516, 5517, 5518, 5519, 5520, 5521, 5522, 5523, 5524, 5525, 5526, 5527, 5528, 5529, 5530, 5531, 5532, 5533, 5534, 5535, 5536, 5548, 5549, 5551, 5552, 5553, 5554, 5555, 5556, 5557, 5558, 5559, 5560, 5561, 5562, 5563, 5564, 5565, 5566, 5567, 5568, 5569, 5570, 5571, 5577, 5578, 5579, 5580, 5590, 5591, 5592, 5593, 5594, 5595, 5596, 5605, 5606, 5607, 5608, 5609, 5610, 5611, 5616, 5617, 5618, 5619, 5620, 5621, 5622, 5623, 5631, 5632, 5633, 5638, 5639, 5640, 5671, 5672, 5673, 5674, 5675, 5676, 5677, 5678, 5679, 5680, 5681, 5688, 5689, 5690, 5691, 5692, 5693, 5694, 5695, 5696, 5697, 5698, 5699, 5700, 5701, 5702, 5703, 5708, 5709, 5710, 5711, 5712, 5713, 5714, 5715, 5716, 5717, 5727, 5740, 5741, 5743, 5744, 5745, 5746, 5747, 5748, 5749, 5750, 5751, 5755, 5757, 5758, 5759, 5760, 5761, 5762, 5763, 5764, 5765, 5766, 5767, 5768, 5769, 5770, 5772, 5773, 5775, 5776, 5777, 5778, 5779, 5780, 5783, 5784, 5785, 5786, 5787, 5788, 5789, 5790, 5791, 5792, 5793, 5794, 5795, 5796, 5797, 5798, 5799, 5800, 5801, 5802, 5803, 5811, 5812, 5813, 5814, 5821, 5822, 5823, 5824, 5825, 5826, 5827, 5828, 5829, 5830, 5831, 5833, 5834, 5836, 5837, 5838, 5839, 5848, 5849, 5850, 5851, 5852, 5853, 5854, 5855, 5864, 5865, 5866, 5867, 5868, 5875, 5876, 5877, 5878, 5880, 5881, 5882, 5883, 5884, 5885, 5886, 5887, 5888, 5889, 5890, 5891, 5892, 5893, 5894, 5895, 5896, 5897, 5898, 5899, 5907, 5908, 5909, 5911, 5912, 5913, 5914, 5915, 5916, 5917, 5918, 5919, 5920, 5921, 5922, 5929, 5950, 5951, 5952, 5953, 5954, 5955, 5956, 5963, 5967, 5969, 5970, 5982, 5983, 5984, 5985, 5986, 5987, 5988, 5997, 5998, 5999, 6000, 6001, 6002, 6068, 6069, 6070, 6071, 6072, 6074, 6075, 6076, 6077, 6078, 6080, 6081, 6082, 6083, 6084, 6085, 6086, 6087, 6088, 6089, 6090, 6091, 6092, 6093, 6094, 6095, 6096, 6097, 6098, 6100, 6101, 6102, 6103, 6105, 6106, 6107, 6108, 6109, 6110, 6111, 6112, 6113, 6114, 6115, 6116, 6117, 6118, 6119, 6120, 6121, 6122, 6123, 6124, 6128, 6130, 6142, 6143, 6144, 6145, 6146, 6147, 6148, 6149, 6151, 6152, 6153, 6154, 6155, 6156, 6157, 6169, 6170, 6171, 6172, 6173, 6174, 6175, 6176, 6177, 6178, 6179, 6180, 6181, 6182, 6185, 6186, 6187, 6191, 6208, 6209, 6231, 6232, 6233, 6234, 6235, 6236, 6237, 6238, 6239, 6251, 6256, 6257, 6258, 6259, 6260, 6261, 6262, 6278, 6279, 6280, 6281, 6282, 6286, 6287, 6288, 6289, 6290, 6298, 6299, 6300, 6301, 6302, 6303, 6304, 6305, 6306, 6307, 6308, 6309, 6310, 6311, 6312, 6313, 6314, 6315, 6356, 6357, 6358, 6378, 6379, 6387, 6388, 6389, 6390, 6391, 6392, 6393, 6394, 6395, 6396, 6397, 6398, 6399, 6400, 6401, 6402, 6403, 6405, 6406, 6407, 6451, 6452, 6453, 6497, 6498, 6499, 6500, 6501, 6502, 6503, 6509, 6510, 6511, 6512, 6514, 6519, 6520, 6521, 6522, 6523, 6549, 6550, 6551, 6552, 6553, 6554, 6555, 6556, 6557, 6558, 6588, 6589, 6599, 6600, 6601, 6602, 6603, 6604, 6605, 6606, 6611, 6612, 6613, 6614, 6615, 6616, 6617, 6618, 6619, 6620, 6621, 6622, 6623, 6624, 6625, 6626, 6627, 6628, 6629, 6630, 6631, 6632, 6633, 6634, 6638, 6639, 6640, 6641, 6642, 6643, 6644, 6658, 6684, 6685, 6686, 6697, 6698, 6699, 6700, 6701, 6702, 6703, 6704, 6705, 6706, 6707, 6708, 6709, 6710, 6719, 6721, 6723, 6724, 6754, 6755, 6756, 6757, 6758, 6759, 6760, 6761, 6762, 6763, 6764, 6796, 6797, 6798, 6799, 6800, 6805, 6806, 6807, 6808, 6809, 6814, 6815, 6816, 6817, 6818, 6824, 6825, 6826, 6831, 6832, 6833, 6834, 6853, 6854, 6855, 6856, 6857, 6860, 6861, 6862, 6863, 6864, 6865, 6866, 6867, 6868, 6869, 6872, 6873, 6875, 6876, 6877, 6878, 6879, 6885, 6888, 6889, 6890, 6891, 6892, 6893, 6894, 6895, 6896, 6897, 6898, 6899, 6900, 6901, 6902, 6903, 6904, 6905, 6906, 6907, 6908, 6909, 6910, 6911, 6912, 6913, 6914, 6915, 6916, 6917, 6918, 6919, 6920, 6921, 6922, 6923, 6924, 6925, 6926, 6927, 6928, 6929, 6930, 6931, 6932, 6933, 6934, 6935, 6936, 6953, 6954, 6955, 6957, 6958, 6959, 6960, 6962, 6963, 6964, 6965, 6966, 6967, 6968, 6969, 6970, 6971, 6972, 6973, 6983, 6984, 6985, 6988, 6989, 6990, 6991, 6992, 6993, 6994, 6995, 7007, 7008, 7009, 7010, 7011, 7012, 7015, 7016, 7017, 7018, 7019, 7020, 7021, 7034, 7035, 7084, 7086, 7087, 7088, 7089, 7090, 7091, 7092, 7128, 7137, 7138, 7139, 7140, 7141, 7142, 7143, 7144, 7145, 7146, 7147, 7148, 7149, 7150, 7151, 7152, 7153, 7154, 7155, 7195, 7196, 7197, 7198, 7200, 7201, 7202, 7203, 7204, 7205, 7206, 7207, 7208, 7209, 7210, 7211, 7212, 7213, 7214, 7215, 7216, 7217, 7218, 7219, 7220, 7221, 7222, 7223, 7224, 7225, 7226, 7227, 7228, 7229, 7230, 7231, 7232, 7233, 7234, 7235, 7236, 7237, 7238, 7239, 7240, 7241, 7243, 7244, 7245, 7246, 7247, 7248, 7249, 7250, 7251, 7252, 7253, 7254, 7255, 7256, 7257, 7258, 7259, 7260, 7261, 7262, 7263, 7264, 7265, 7266, 7267, 7268, 7269, 7270, 7271, 7291, 7292, 7293, 7294, 7295, 7296, 7297, 7298, 7305, 7306, 7307, 7308, 7309, 7310, 7311, 7312, 7313, 7314, 7315, 7316, 7317, 7347, 7348, 7349, 7358, 7359, 7360, 7361, 7362, 7363, 7364, 7365, 7372, 7373, 7374, 7375, 7376, 7377, 7378, 7383, 7415, 7416, 7417, 7438, 7471, 7472, 7473, 7474, 7475, 7476, 7477, 7490, 7496, 7497, 7498, 7499, 7500, 7501, 7502, 7503, 7504, 7505, 7506, 7507, 7508, 7509, 7510, 7511, 7512, 7513, 7514, 7515, 7532, 7533, 7534, 7535, 7537, 7538, 7539, 7540, 7541, 7542, 7543, 7544, 7545, 7546, 7547, 7548, 7549, 7550, 7551, 7552, 7553, 7554, 7555, 7556, 7557, 7558, 7559, 7560, 7585, 7586, 7587, 7588, 7589, 7590, 7591, 7592, 7593, 7594, 7595, 7596, 7597, 7599, 7600, 7601, 7617, 7618, 7619, 7620, 7621, 7622, 7623, 7638, 7668, 7669, 7670, 7672, 7673, 7674, 7675, 7676, 7685, 7687, 7694, 7695, 7696, 7717, 7718, 7719, 7720, 7721, 7722, 7723, 7724, 7725, 7726, 7727, 7728, 7729, 7730, 7731, 7732, 7733, 7734, 7735, 7736, 7737, 7738, 7739, 7740, 7741, 7742, 7743, 7744, 7746, 7747, 7748, 7749, 7750, 7751, 7752, 7757, 7758, 7759, 7760, 7761, 7762, 7763, 7764, 7765, 7766, 7767, 7768, 7796, 7797, 7805, 7813, 7814, 7815, 7816, 7817, 7818, 7819, 7820, 7821, 7822, 7848, 7849, 7850, 7851, 7852, 7853, 7854, 7859, 7860, 7861, 7862, 7863, 7864, 7865, 7866, 7867, 7869, 7870, 7874, 7875, 7917, 7918, 7919, 7925, 7926, 7927, 7928, 7929, 7941, 7942, 7943, 7944, 7945, 7946, 7947, 7948, 7949, 7950, 7951, 7952, 7953, 7955, 7956, 7957, 7958, 7959, 7960, 7961, 7962, 7963, 7964, 7965, 7966, 7967, 7968, 7969, 7970, 7971, 7972, 7974, 7975, 7976, 7977, 7978, 7979, 7980, 7981, 7982, 7983, 7984, 7985, 7986, 7987, 7988, 7989, 7990, 7991, 7992, 7993, 7994, 7995, 7996, 7997, 7998, 7999, 8000, 8011, 8012, 8013, 8014, 8015, 8016, 8017, 8018, 8019, 8020, 8021, 8022, 8023, 8024, 8025, 8026, 8027, 8028, 8029, 8030, 8048, 8049, 8050, 8051, 8052, 8053, 8054, 8055, 8056, 8057, 8087, 8088, 8089, 8090, 8091, 8092, 8095, 8096, 8097, 8098, 8099, 8100, 8101, 8102, 8103, 8104, 8105, 8106, 8107, 8110, 8111, 8112, 8113, 8114, 8115, 8116, 8117, 8118, 8119, 8120, 8121, 8122, 8123, 8124, 8125, 8126, 8127, 8130, 8131, 8132, 8133, 8134, 8135, 8136, 8144, 8145, 8166, 8169, 8170, 8171, 8172, 8173, 8174, 8175, 8176, 8177, 8178, 8179, 8180, 8181, 8182, 8188, 8191, 8192, 8193, 8194, 8195, 8196, 8197, 8198, 8199, 8200, 8201, 8209, 8210, 8211, 8212, 8215, 8227, 8230, 8231, 8232, 8233, 8234, 8235, 8236, 8237, 8238, 8239, 8240, 8241, 8242, 8243, 8244, 8245, 8246, 8247, 8248, 8249, 8250, 8251, 8260, 8261, 8262, 8263, 8299, 8302, 8303, 8304, 8305, 8306, 8353, 8354, 8355, 8356, 8357, 8358, 8359, 8360, 8361, 8375, 8376, 8377, 8378, 8379, 8380, 8381, 8382, 8410, 8411, 8412, 8440, 8459, 8460, 8461, 8462, 8463, 8474, 8475, 8476, 8477, 8478, 8508, 8509, 8510, 8511, 8512, 8514, 8515, 8546, 8547, 8548, 8549, 8550, 8551, 8552, 8553, 8554, 8555, 8570, 8571, 8572, 8573, 8574, 8575, 8576, 8577, 8578, 8579, 8580, 8581, 8586, 8587, 8593, 8594, 8595, 8596, 8597, 8601, 8602, 8603, 8604, 8605, 8615, 8617, 8618, 8655, 8686, 8709, 8712, 8713, 8714, 8715, 8716, 8717, 8718, 8719, 8720, 8721, 8722, 8723, 8724, 8725, 8726, 8727, 8728, 8729, 8730, 8731, 8732, 8733, 8734, 8770, 8771, 8788, 8789, 8790, 8791, 8792, 8793, 8794, 8795, 8796, 8797, 8798, 8799, 8800, 8801, 8802, 8803, 8804, 8805, 8806, 8810, 8811, 8817, 8818, 8819, 8820, 8821, 8822, 8823, 8829, 8830, 8837, 8838, 8839, 8840, 8841, 8848, 8849, 8850, 8851, 8854, 8855, 8856, 8857, 8858, 8859, 8860, 8861, 8862, 8863, 8864, 8865, 8867, 8868, 8872, 8873, 8874, 8875, 8876, 8878, 8879, 8880, 8881, 8882, 8883, 8884, 8885, 8886, 8887, 8888, 8889, 8890, 8891, 8892, 8893, 8894, 8895, 8896, 8897, 8898, 8899, 8900, 8901, 8902, 8903, 8904, 8906, 8913, 8914, 8915, 8916, 8917, 8918, 8919, 8920, 8921, 8925, 8926, 8927, 8928, 8933, 8934, 8935, 8936, 8937, 8938, 8939, 8940, 8941, 8942, 8943, 8944, 8945, 8946, 8947, 8948, 8949, 8950, 8951, 8954, 8955, 8956, 8992, 8993, 8994, 8995, 8996, 8997, 8998, 8999, 9000, 9001, 9002, 9003, 9010, 9011, 9012, 9013, 9014, 9018, 9019, 9020, 9021, 9022, 9023, 9024, 9025, 9026, 9027, 9028, 9029, 9030, 9031, 9041, 9042, 9043, 9044, 9045, 9046, 9047, 9048, 9049, 9050, 9051, 9052, 9053, 9054, 9055, 9056, 9057, 9058, 9059, 9065, 9066, 9087, 9088, 9091, 9092, 9093, 9094, 9095, 9096, 9097, 9098, 9103, 9104, 9105, 9106, 9107, 9108, 9109, 9110, 9123, 9124, 9125, 9126, 9127, 9128, 9129, 9130, 9131, 9133, 9134, 9135, 9136, 9137, 9145, 9146, 9147, 9148, 9149, 9150, 9151, 9160, 9161, 9162, 9163, 9201, 9203.

### Avoidance of the Immune Response

[0749] As described herein, a useful feature of the oncology-related polynucleotides, primary constructs or mmRNA of the invention is the capacity to reduce, evade or avoid the innate immune response of a cell. In one aspect, provided herein are polynucleotides, primary constructs or mmRNA encoding a polypeptide of interest which when delivered to cells, results in a reduced immune response from the host as compared to the response triggered by a reference compound, e.g. an unmodified polynucleotide corresponding to a polynucleotide, primary construct or mmRNA of the invention, or a different polynucleotide, primary construct or mmRNA of the invention. As used herein, a “reference compound” is any molecule or substance which when administered to a mammal, results in an innate immune response having a known degree, level or amount of immune stimulation. A reference compound need not be a nucleic acid molecule and it need not be any of the oncology-related polynucleotides, primary constructs or mmRNA of the invention. Hence, the measure of a polynucleotides, primary constructs or mmRNA avoidance, evasion or failure to trigger an immune response can be expressed in terms relative to any compound or substance which is known to trigger such a response.

[0750] The term “innate immune response” includes a cellular response to exogenous single stranded nucleic acids, generally of viral or bacterial origin, which involves the induction of cytokine expression and release, particularly the interferons, and cell death. As used herein, the innate immune response or interferon response operates at the single cell level causing cytokine expression, cytokine release, global inhibition of protein synthesis, global destruction of cellular RNA, upregulation of major histocompatibility molecules, and/or induction of apoptotic death, induction of gene transcription of genes involved in apoptosis, anti-growth, and innate and adaptive immune cell activation. Some of the genes induced by type I IFNs include PKR, ADAR (adenosine deaminase acting on RNA), OAS (2′,5′-oligoadenylate synthetase), RNase L, and Mx proteins. PKR and ADAR lead to inhibition of translation initiation and RNA editing, respectively. OAS is a dsRNA-dependent synthetase that activates the endoribonuclease RNase L to degrade ssRNA.

[0751] In some embodiments, the innate immune response comprises expression of a Type I or Type II interferon, and the expression of the Type I or Type II interferon is not increased more than two-fold compared to a reference from a cell which has not been contacted with a polynucleotide, primary construct or mmRNA of the invention.

[0752] In some embodiments, the innate immune response comprises expression of one or more IFN signature genes and where the expression of the one of more IFN signature genes is not increased more than three-fold compared to a reference from a cell which has not been contacted with the polynucleotide, primary construct or mmRNA of the invention.

[0753] While in some circumstances, it might be advantageous to eliminate the innate immune response in a cell, the invention provides polynucleotides, primary constructs and mmRNA that upon administration result in a substantially reduced (significantly less) the immune response, including interferon signaling, without entirely eliminating such a response.

[0754] In some embodiments, the immune response is lower by 10%, 20%, 30%, 40%, 50%, 60%, 70%, 80%, 90%, 95%, 99%, 99.9%, or greater than 99.9% as compared to the immune response induced by a reference compound. The immune response itself may be measured by determining the expression or activity level of Type 1 interferons or the expression of interferon-regulated genes such as the toll-like receptors (e.g., TLR7 and TLR8). Reduction of innate immune response can also be measured by measuring the level of decreased cell death following one or more administrations to a cell population; e.g., cell death is 10%, 25%, 50%, 75%, 85%, 90%, 95%, or over 95% less than the cell death frequency observed with a reference compound. Moreover, cell death may affect fewer than 50%, 40%, 30%, 20%, 10%, 5%, 1%, 0.1%, 0.01% or fewer than 0.01% of cells contacted with the polynucleotide, primary construct or mmRNA.

[0755] In another embodiment, the polynucleotide, primary construct or mmRNA of the present invention is significantly less immunogenic than an unmodified in vitro-synthesized RNA molecule polynucleotide, or primary construct with the same sequence or a reference compound. As used herein, “significantly less immunogenic” refers to a detectable decrease in immunogenicity. In another embodiment, the term refers to a fold decrease in immunogenicity. In another embodiment, the term refers to a decrease such that an effective amount of the polynucleotide, primary construct or mmRNA can be administered without triggering a detectable immune response. In another embodiment, the term refers to a decrease such that the polynucleotide, primary construct or mmRNA can be repeatedly administered without eliciting an immune response sufficient to detectably reduce expression of the recombinant protein. In another embodiment, the decrease is such that the polynucleotide, primary construct or mmRNA can be repeatedly administered without eliciting an immune response sufficient to eliminate detectable expression of the recombinant protein.

[0756] In another embodiment, the polynucleotide, primary construct or mmRNA is 2-fold less immunogenic than its unmodified counterpart or reference compound. In another embodiment, immunogenicity is reduced by a 3-fold factor. In another embodiment, immunogenicity is reduced by a 5-fold factor. In another embodiment, immunogenicity is reduced by a 7-fold factor. In another embodiment, immunogenicity is reduced by a 10-fold factor. In another embodiment, immunogenicity is reduced by a 15-fold factor. In another embodiment, immunogenicity is reduced by a fold factor. In another embodiment, immunogenicity is reduced by a 50-fold factor. In another embodiment, immunogenicity is reduced by a 100-fold factor. In another embodiment, immunogenicity is reduced by a 200-fold factor. In another embodiment, immunogenicity is reduced by a 500-fold factor. In another embodiment, immunogenicity is reduced by a 1000-fold factor. In another embodiment, immunogenicity is reduced by a 2000-fold factor. In another embodiment, immunogenicity is reduced by another fold difference.

[0757] Methods of determining immunogenicity are well known in the art, and include, e.g. measuring secretion of cytokines (e.g. IL-12, IFNalpha, TNF-alpha, RANTES, MIP-1alpha or beta, IL-6, IFN-beta, or IL-8), measuring expression of DC activation markers (e.g. CD83, HLA-DR, CD80 and CD86), or measuring ability to act as an adjuvant for an adaptive immune response.

[0758] The the polynucleotide, primary construct or mmRNA of the invention, including the combination of modifications taught herein may have superior properties making them more suitable as therapeutic modalities.

[0759] It has been determined that the “all or none” model in the art is sorely insufficient to describe the biological phenomena associated with the therapeutic utility of modified mRNA. The present inventors have determined that to improve protein production, one may consider the nature of the modification, or combination of modifications, the percent modification and survey more than one cytokine or metric to determine the efficacy and risk profile of a particular modified mRNA.

[0760] In one aspect of the invention, methods of determining the effectiveness of a modified mRNA as compared to unmodified involves the measure and analysis of one or more cytokines whose expression is triggered by the administration of the exogenous nucleic acid of the invention. These values are compared to administration of an unmodified nucleic acid or to a standard metric such as cytokine response, PolyIC, R-848 or other standard known in the art.

[0761] One example of a standard metric developed herein is the measure of the ratio of the level or amount of encoded polypeptide (protein) produced in the cell, tissue or organism to the level or amount of one or more (or a panel) of cytokines whose expression is triggered in the cell, tissue or organism as a result of administration or contact with the modified nucleic acid. Such ratios are referred to herein as the Protein:Cytokine Ratio or “PC” Ratio. The higher the PC ratio, the more efficacious the modified nucleic acid (polynucleotide encoding the protein measured). Preferred PC Ratios, by cytokine, of the present invention may be greater than 1, greater than 10, greater than 100, greater than 1000, greater than 10,000 or more. Modified nucleic acids having higher PC Ratios than a modified nucleic acid of a different or unmodified construct are preferred.

[0762] The PC ratio may be further qualified by the percent modification present in the polynucleotide. For example, normalized to a 100% modified nucleic acid, the protein production as a function of cytokine (or risk) or cytokine profile can be determined.

[0763] In one embodiment, the present invention provides a method for determining, across chemistries, cytokines or percent modification, the relative efficacy of any particular modified the polynucleotide, primary construct or mmRNA by comparing the PC Ratio of the modified nucleic acid (polynucleotide, primary construct or mmRNA).

[0764] mmRNA containing varying levels of nucleobase substitutions could be produced that maintain increased protein production and decreased immunostimulatory potential. The relative percentage of any modified nucleotide to its naturally occurring nucleotide counterpart can be varied during the IVT reaction (for instance, 100, 50, 25, 10, 5, 2.5, 1, 0.1, 0.01% 5 methyl cytidine usage versus cytidine; 100, 50, 25, 10, 5, 2.5, 1, 0.1, 0.01% pseudouridine or N1-methyl-pseudouridine usage versus uridine). mmRNA can also be made that utilize different ratios using 2 or more different nucleotides to the same base (for instance, different ratios of pseudouridine and N1-methyl-pseudouridine). mmRNA can also be made with mixed ratios at more than 1 “base” position, such as ratios of 5 methyl cytidine/cytidine and pseudouridine/N1-methyl-pseudouridine/uridine at the same time. Use of modified mRNA with altered ratios of modified nucleotides can be beneficial in reducing potential exposure to chemically modified nucleotides. Lastly, positional introduction of modified nucleotides into the mmRNA which modulate either protein production or immunostimulatory potential or both is also possible. The ability of such mmRNA to demonstrate these improved properties can be assessed in vitro (using assays such as the PBMC assay described herein), and can also be assessed in vivo through measurement of both mmRNA-encoded protein production and mediators of innate immune recognition such as cytokines.

[0765] In another embodiment, the relative immunogenicity of the polynucleotide, primary construct or mmRNA and its unmodified counterpart are determined by determining the quantity of the polynucleotide, primary construct or mmRNA required to elicit one of the above responses to the same degree as a given quantity of the unmodified nucleotide or reference compound. For example, if twice as much polynucleotide, primary construct or mmRNA is required to elicit the same response, than the polynucleotide, primary construct or mmRNA is two-fold less immunogenic than the unmodified nucleotide or the reference compound.

[0766] In another embodiment, the relative immunogenicity of the polynucleotide, primary construct or mmRNA and its unmodified counterpart are determined by determining the quantity of cytokine (e.g. IL-12, IFNalpha, TNF-alpha, RANTES, MIP-1alpha or beta, IL-6, IFN-beta, or IL-8) secreted in response to administration of the polynucleotide, primary construct or mmRNA, relative to the same quantity of the unmodified nucleotide or reference compound. For example, if one-half as much cytokine is secreted, than the polynucleotide, primary construct or mmRNA is two-fold less immunogenic than the unmodified nucleotide. In another embodiment, background levels of stimulation are subtracted before calculating the immunogenicity in the above methods.

[0767] Provided herein are also methods for performing the titration, reduction or elimination of the immune response in a cell or a population of cells. In some embodiments, the cell is contacted with varied doses of the same polynucleotides, primary constructs or mmRNA and dose response is evaluated. In some embodiments, a cell is contacted with a number of different polynucleotides, primary constructs or mmRNA at the same or different doses to determine the optimal composition for producing the desired effect. Regarding the immune response, the desired effect may be to avoid, evade or reduce the immune response of the cell. The desired effect may also be to alter the efficiency of protein production.

[0768] The polynucleotides, primary constructs and/or mmRNA of the present invention may be used to reduce the immune response using the method described in International Publication No. WO2013003475, herein incorporated by reference in its entirety.

### Activation of the Immune Response: Vaccines

[0769] Additionally, certain modified nucleosides, or combinations thereof, when introduced into the oncology-related polynucleotides, primary constructs or mmRNA of the invention will activate the innate immune response. Such activating molecules are useful as adjuvants when combined with polypeptides and/or other vaccines. In certain embodiments, the activating molecules contain a translatable region which encodes for a polypeptide sequence useful as a vaccine, thus providing the ability to be a self-adjuvant.

[0770] In one embodiment, the oncology-related polynucleotides, primary constructs and/or mmRNA of the invention may encode an immunogen. The delivery of the oncology-related polynucleotides, primary constructs and/or mmRNA encoding an immunogen may activate the immune response. As a non-limiting example, the oncology-related polynucleotides, primary constructs and/or mmRNA encoding an immunogen may be delivered to cells to trigger multiple innate response pathways (see International Pub. No. WO2012006377; herein incorporated by reference in its entirety). As another non-limiting example, the oncology-related polynucleotides, primary constructs and mmRNA of the present invention encoding an immunogen may be delivered to a vertebrate in a dose amount large enough to be immunogenic to the vertebrate (see International Pub. Nos. WO2012006372 and WO2012006369; each of which is herein incorporated by reference in their entirety).

[0771] The oncology-related polynucleotides, primary constructs or mmRNA of invention may encode a polypeptide sequence for a vaccine and may further comprise an inhibitor. The inhibitor may impair antigen presentation and/or inhibit various pathways known in the art. As a non-limiting example, the oncology-related polynucleotides, primary constructs or mmRNA of the invention may be used for a vaccine in combination with an inhibitor which can impair antigen presentation (see International Pub. No. WO2012089225 and WO2012089338; each of which is herein incorporated by reference in their entirety).

[0772] In one embodiment, the oncology-related polynucleotides, primary constructs or mmRNA of the invention may be self-replicating RNA. Self-replicating RNA molecules can enhance efficiency of RNA delivery and expression of the enclosed gene product. In one embodiment, the oncology-related polynucleotides, primary constructs or mmRNA may comprise at least one modification described herein and/or known in the art. In one embodiment, the self-replicating RNA can be designed so that the self-replicating RNA does not induce production of infectious viral particles. As a non-limiting example the self-replicating RNA may be designed by the methods described in US Pub. No. US20110300205 and International Pub. No. WO2011005799, each of which is herein incorporated by reference in their entirety.

[0773] In one embodiment, the self-replicating polynucleotides, primary constructs or mmRNA of the invention may encode a protein which may raise the immune response. As a non-limiting example, the oncology-related polynucleotides, primary constructs or mmRNA may be self-replicating mRNA may encode at least one antigen (see US Pub. No. US20110300205 and International Pub. Nos. WO2011005799, WO2013006838 and WO2013006842; each of which is herein incorporated by reference in their entirety).

[0774] In one embodiment, the self-replicating polynucleotides, primary constructs or mmRNA of the invention may be formulated using methods described herein or known in the art. As a non-limiting example, the self-replicating RNA may be formulated for delivery by the methods described in Geall et al (Nonviral delivery of self-amplifying RNA vaccines, PNAS 2012; PMID: 22908294).

[0775] In one embodiment, the oncology-related polynucleotides, primary constructs or mmRNA of the present invention may encode amphipathic and/or immunogenic amphipathic peptides.

[0776] In on embodiment, a formulation of the oncology-related polynucleotides, primary constructs or mmRNA of the present invention may further comprise an amphipathic and/or immunogenic amphipathic peptide. As a non-limiting example, the oncology-related polynucleotides, primary constructs or mmRNA comprising an amphipathic and/or immunogenic amphipathic peptide may be formulated as described in US. Pub. No. US20110250237 and International Pub. Nos. WO2010009277 and WO2010009065; each of which is herein incorporated by reference in their entirety.

[0777] In one embodiment, the oncology-related polynucleotides, primary constructs or mmRNA of the present invention may be immunostimulatory. As a non-limiting example, the oncology-related polynucleotides, primary constructs or mmRNA may encode all or a part of a positive-sense or a negative-sense stranded RNA virus genome (see International Pub No. WO2012092569 and US Pub No. US20120177701, each of which is herein incorporated by reference in their entirety). In another non-limiting example, the immunostimulatory polynucleotides, primary constructs or mmRNA of the present invention may be formulated with an excipient for administration as described herein and/or known in the art (see International Pub No. WO2012068295 and US Pub No. US20120213812, each of which is herein incorporated by reference in their entirety).

[0778] In one embodiment, the response of the vaccine formulated by the methods described herein may be enhanced by the addition of various compounds to induce the therapeutic effect. As a non-limiting example, the vaccine formulation may include a MHC II binding peptide or a peptide having a similar sequence to a MHC II binding peptide (see International Pub Nos. WO2012027365, WO2011031298 and US Pub No. US20120070493, US20110110965, each of which is herein incorporated by reference in their entirety). As another example, the vaccine formulations may comprise modified nicotinic compounds which may generate an antibody response to nicotine residue in a subject (see International Pub No. WO2012061717 and US Pub No. US20120114677, each of which is herein incorporated by reference in their entirety).

### Naturally Occurring Mutants

[0779] In another embodiment, the oncology-related polynucleotides, primary construct and/or mmRNA can be utilized to express variants of naturally occurring proteins that have an improved disease modifying activity, including increased biological activity, improved patient outcomes, or a protective function, etc. Many such modifier genes have been described in mammals (Nadeau, Current Opinion in Genetics & Development 2003 13:290-295; Hamilton and Yu, PLoS Genet. 2012; 8:e1002644; Corder et al., Nature Genetics 1994 7:180-184; all herein incorporated by reference in their entireties). Examples in humans include Apo E2 protein, Apo A-I variant proteins (Apo A-I Milano, Apo A-I Paris), hyperactive Factor IX protein (Factor IX Padua Arg338Lys), transthyretin mutants (TTR Thr1 l9Met). Expression of ApoE2 (cys112, cys158) has been shown to confer protection relative to other ApoE isoforms (ApoE3 (cys112, arg158), and ApoE4 (arg112, arg158)) by reducing susceptibility to Alzheimer's disease and possibly other conditions such as cardiovascular disease (Corder et al., Nature Genetics 1994 7:180-184; Seripa et al., Rejuvenation Res. 2011 14:491-500; Liu et al. Nat Rev Neurol. 2013 9:106-118; all herein incorporated by reference in their entireties). Expression of Apo A-I variants has been associated with reduced cholesterol (deGoma and Rader, 2011 Nature Rev Cardiol 8:266-271; Nissen et al., 2003 JAMA 290:2292-2300; all herein incorporated by reference in its entirety). The amino acid sequence of ApoA-I in certain populations has been changed to cysteine in Apo A-I Milano (Arg 173 changed to Cys) and in Apo A-I Paris (Arg 151 changed to Cys). Factor IX mutation at position R338L (FIX Padua) results in a Factor IX protein that has ˜10-fold increased activity (Simioni et al., N Engl J Med. 2009 361:1671-1675; Finn et al., Blood. 2012 120:4521-4523; Cantore et al., Blood. 2012 120:4517-20; all herein incorporated by reference in their entireties). Mutation of transthyretin at positions 104 or 119 (Arg104 His, Thr119Met) has been shown to provide protection to patients also harboring the disease causing Val30Met mutations (Saraiva, Hum Mutat. 2001 17:493-503; DATA BASE ON TRANSTHYRETIN MUTATIONS www.ibmc.up.pt/mjsaraiva/ttrmut.html; all herein incorporated by reference in its entirety). Differences in clinical presentation and severity of symptoms among Portuguese and Japanese Met 30 patients carrying respectively the Met 119 and the His104 mutations are observed with a clear protective effect exerted by the non pathogenic mutant (Coelho et al. 1996 Neuromuscular Disorders (Suppl) 6: S20; Terazaki et al. 1999. Biochem Biophys Res Commun 264: 365-370; all herein incorporated by reference in its entirety), which confer more stability to the molecule. A modified mRNA encoding these protective TTR alleles can be expressed in TTR amyloidosis patients, thereby reducing the effect of the pathogenic mutant TTR protein.

### Major Groove Interacting Partners

[0780] As described herein, the phrase “major groove interacting partner” refers to RNA recognition receptors that detect and respond to RNA ligands through interactions, e.g. binding, with the major groove face of a nucleotide or nucleic acid. As such, RNA ligands comprising modified nucleotides or nucleic acids such as the polynucleotide, primary construct or mmRNA as described herein decrease interactions with major groove binding partners, and therefore decrease an innate immune response.

[0781] Example major groove interacting, e.g. binding, partners include, but are not limited to the following nucleases and helicases. Within membranes, TLRs (Toll-like Receptors) 3, 7, and 8 can respond to single- and double-stranded RNAs. Within the cytoplasm, members of the superfamily 2 class of DEX(D/H) helicases and ATPases can sense RNAs to initiate antiviral responses. These helicases include the RIG-I (retinoic acid-inducible gene I) and MDA5 (melanoma differentiation-associated gene 5). Other examples include laboratory of genetics and physiology 2 (LGP2), HIN-200 domain containing proteins, or Helicase-domain containing proteins.

### Targeting of Pathogenic Organisms or Diseased Cells

[0782] Provided herein are methods for targeting pathogenic microorganisms, such as bacteria, yeast, protozoa, helminthes and the like, or diseased cells such as cancer cells using polynucleotides, primary constructs or mmRNA that encode cytostatic or cytotoxic polypeptides. Preferably the mRNA introduced contains modified nucleosides or other nucleic acid sequence modifications that are translated exclusively, or preferentially, in the target pathogenic organism, to reduce possible off-target effects of the therapeutic. Such methods are useful for removing pathogenic organisms or killing diseased cells found in any biological material, including blood, semen, eggs, and transplant materials including embryos, tissues, and organs.

### Bioprocessing

[0783] The methods provided herein may be useful for enhancing protein product yield in a cell culture process. In a cell culture containing a plurality of host cells, introduction of a polynucleotide, primary construct or mmRNA described herein results in increased protein production efficiency relative to a corresponding unmodified nucleic acid. Such increased protein production efficiency can be demonstrated, e.g., by showing increased cell transfection, increased protein translation from the polynucleotide, primary construct or mmRNA, decreased nucleic acid degradation, and/or reduced innate immune response of the host cell. Protein production can be measured by enzyme-linked immunosorbent assay (ELISA), and protein activity can be measured by various functional assays known in the art. The protein production may be generated in a continuous or a batch-fed mammalian process.

[0784] Additionally, it is useful to optimize the expression of a specific polypeptide in a cell line or collection of cell lines of potential interest, particularly a polypeptide of interest such as a protein variant of a reference protein having a known activity. In one embodiment, provided is a method of optimizing expression of a polypeptide of interest in a target cell, by providing a plurality of target cell types, and independently contacting with each of the plurality of target cell types a polynucleotide, primary construct or mmRNA encoding a polypeptide of interest. The cells may be transfected with two or more polynucleotide, primary construct or mmRNA simultaneously or sequentially.

[0785] In certain embodiments, multiple rounds of the methods described herein may be used to obtain cells with increased expression of one or more nucleic acids or proteins of interest. For example, cells may be transfected with one or more polynucleotide, primary construct or mmRNA that encode a nucleic acid or protein of interest. The cells may be isolated according to methods described herein before being subjected to further rounds of transfections with one or more other nucleic acids which encode a nucleic acid or protein of interest before being isolated again. This method may be useful for generating cells with increased expression of a complex of proteins, nucleic acids or proteins in the same or related biological pathway, nucleic acids or proteins that act upstream or downstream of each other, nucleic acids or proteins that have a modulating, activating or repressing function to each other, nucleic acids or proteins that are dependent on each other for function or activity, or nucleic acids or proteins that share homology.

[0786] Additionally, culture conditions may be altered to increase protein production efficiency. Subsequently, the presence and/or level of the polypeptide of interest in the plurality of target cell types is detected and/or quantitated, allowing for the optimization of a polypeptide's expression by selection of an efficient target cell and cell culture conditions relating thereto. Such methods are particularly useful when the polypeptide contains one or more post-translational modifications or has substantial tertiary structure, situations which often complicate efficient protein production.

[0787] In one embodiment, the cells used in the methods of the present invention may be cultured. The cells may be cultured in suspension or as adherent cultures. The cells may be cultured in a varied of vessels including, but not limited to, bioreactors, cell bags, wave bags, culture plates, flasks and other vessels well known to those of ordinary skill in the art. Cells may be cultured in IMDM (Invitrogen, Catalog number 12440-53) or any other suitable media including, but not limited to, chemically defined media formulations. The ambient conditions which may be suitable for cell culture, such as temperature and atmospheric composition, are well known to those skilled in the art. The methods of the invention may be used with any cell that is suitable for use in protein production.

[0788] The invention provides for the repeated introduction (e.g., transfection) of modified nucleic acids into a target cell population, e.g., in vitro, ex vivo, in situ, or in vivo. For example, contacting the same cell population may be repeated one or more times (such as two, three, four, five or more than five times). In some embodiments, the step of contacting the cell population with the oncology-related polynucleotides, primary constructs or mmRNA is repeated a number of times sufficient such that a predetermined efficiency of protein translation in the cell population is achieved. Given the often reduced cytotoxicity of the target cell population provided by the nucleic acid modifications, repeated transfections are achievable in a diverse array of cell types and within a variety of tissues, as provided herein.

[0789] In one embodiment, the bioprocessing methods of the present invention may be used to produce antibodies or functional fragments thereof. The functional fragments may comprise a Fab, Fab′, F(ab′)₂, an Fv domain, an scFv, or a diabody. They may be variable in any region including the complement determining region (CDR). In one embodiment, there is complete diversity in the CDR3 region. In another embodiment, the antibody is substantially conserved except in the CDR3 region.

[0790] Antibodies may be made which bind or associate with any biomolecule, whether human, pathogenic or non-human in origin. The pathogen may be present in a non-human mammal, a clinical specimen or from a commercial product such as a oncology-related or pharmaceutical material. They may also bind to any specimen or sample including clinical specimens or tissue samples from any organism.

[0791] In some embodiments, the contacting step is repeated multiple times at a frequency selected from the group consisting of: 6 hour, 12 hour, 24 hour, 36 hour, 48 hour, 72 hour, 84 hour, 96 hour, and 108 hour and at concentrations of less than 20 nM, less than 50 nM, less than 80 nM or less than 100 nM. Compositions may also be administered at less than 1 mM, less than 5 mM, less than 10 mM, less than 100 mM or less than 500 mM.

[0792] In some embodiments, the oncology-related polynucleotides, primary constructs or mmRNA are added at an amount of 50 molecules per cell, 100 molecules/cell, 200 molecules/cell, 300 molecules/cell, 400 molecules/cell, 500 molecules/cell, 600 molecules/cell, 700 molecules/cell, 800 molecules/cell, 900 molecules/cell, 1000 molecules/cell, 2000 molecules/cell, or 5000 molecules/cell.

[0793] In other embodiments, the oncology-related polynucleotides, primary constructs or mmRNA are added at a concentration selected from the group consisting of: 0.01 fmol/106 cells, 0.1 fmol/106 cells, 0.5 fmol/106 cells, 0.75 fmol/106 cells, 1 fmol/106 cells, 2 fmol/106 cells, 5 fmol/106 cells, 10 fmol/106 cells, 20 fmol/106 cells, 30 fmol/106 cells, 40 fmol/106 cells, 50 fmol/106 cells, 60 fmol/106 cells, 100 fmol/106 cells, 200 fmol/106 cells, 300 fmol/106 cells, 400 fmol/106 cells, 500 fmol/106 cells, 700 fmol/106 cells, 800 fmol/106 cells, 900 fmol/106 cells, and 1 pmol/106 cells.

[0794] In some embodiments, the production of a biological product upon is detected by monitoring one or more measurable bioprocess parameters, such as a parameter selected from the group consisting of: cell density, pH, oxygen levels, glucose levels, lactic acid levels, temperature, and protein production. Protein production can be measured as specific productivity (SP) (the concentration of a product, such as a heterologously expressed polypeptide, in solution) and can be expressed as mg/L or g/L; in the alternative, specific productivity can be expressed as pg/cell/day. An increase in SP can refer to an absolute or relative increase in the concentration of a product produced under two defined set of conditions (e.g., when compared with controls not treated with modified mRNA(s)).

### Cells

[0795] In one embodiment, the cells are selected from the group consisting of mammalian cells, bacterial cells, plant, microbial, algal and fungal cells. In some embodiments, the cells are mammalian cells, such as, but not limited to, human, mouse, rat, goat, horse, rabbit, hamster or cow cells. In a further embodiment, the cells may be from an established cell line, including, but not limited to, HeLa, NS0, SP2/0, KEK 293T, Vero, Caco, Caco-2, MDCK, COS-1, COS-7, K562, Jurkat, CHO-K1, DG44, CHOK1SV, CHO—S, Huvec, CV-1, Huh-7, NIH3T3, HEK293, 293, A549, HepG2, EVIR-90, MCF-7, U-20S, Per.C6, SF9, SF21 or Chinese Hamster Ovary (CHO) cells.

[0796] In certain embodiments, the cells are fungal cells, such as, but not limited to, Chrysosporium cells, Aspergillus cells, Trichoderma cells, Dictyostelium cells, Candida cells, Saccharomyces cells, Schizosaccharomyces cells, and Penicillium cells.

[0797] In certain embodiments, the cells are bacterial cells such as, but not limited to, E. coli, B. subtilis, or BL21 cells. Primary and secondary cells to be transfected by the methods of the invention can be obtained from a variety of tissues and include, but are not limited to, all cell types which can be maintained in culture. For examples, primary and secondary cells which can be transfected by the methods of the invention include, but are not limited to, fibroblasts, keratinocytes, epithelial cells (e.g., mammary epithelial cells, intestinal epithelial cells), endothelial cells, glial cells, neural cells, formed elements of the blood (e.g., lymphocytes, bone marrow cells), muscle cells and precursors of these somatic cell types. Primary cells may also be obtained from a donor of the same species or from another species (e.g., mouse, rat, rabbit, cat, dog, pig, cow, bird, sheep, goat, horse).

### Purification and Isolation

[0798] Those of ordinary skill in the art should be able to make a determination of the methods to use to purify or isolate of a protein of interest from cultured cells. Generally, this is done through a capture method using affinity binding or non-affinity purification. If the protein of interest is not secreted by the cultured cells, then a lysis of the cultured cells should be performed prior to purification or isolation. One may use unclarified cell culture fluid containing the protein of interest along with cell culture media components as well as cell culture additives, such as anti-foam compounds and other nutrients and supplements, cells, cellular debris, host cell proteins, DNA, viruses and the like in the present invention. The process may be conducted in the bioreactor itself. The fluid may either be preconditioned to a desired stimulus such as pH, temperature or other stimulus characteristic or the fluid can be conditioned upon the addition of polymer(s) or the polymer(s) can be added to a carrier liquid that is properly conditioned to the required parameter for the stimulus condition required for that polymer to be solubilized in the fluid. The polymer may be allowed to circulate thoroughly with the fluid and then the stimulus may be applied (change in pH, temperature, salt concentration, etc) and the desired protein and polymer(s) precipitate can out of the solution. The polymer and the desired protein(s) can be separated from the rest of the fluid and optionally washed one or more times to remove any trapped or loosely bound contaminants. The desired protein may then be recovered from the polymer(s) by, for example, elution and the like. Preferably, the elution may be done under a set of conditions such that the polymer remains in its precipitated form and retains any impurities to it during the selected elution of the desired protein. The polymer and protein as well as any impurities may be solubilized in a new fluid such as water or a buffered solution and the protein may be recovered by a means such as affinity, ion exchanged, hydrophobic, or some other type of chromatography that has a preference and selectivity for the protein over that of the polymer or impurities. The eluted protein may then be recovered and may be subjected to additional processing steps, either batch like steps or continuous flow through steps if appropriate.

[0799] In another embodiment, it may be useful to optimize the expression of a specific polypeptide in a cell line or collection of cell lines of potential interest, particularly a polypeptide of interest such as a protein variant of a reference protein having a known activity. In one embodiment, provided is a method of optimizing expression of a polypeptide of interest in a target cell, by providing a plurality of target cell types, and independently contacting with each of the plurality of target cell types a modified mRNA encoding a polypeptide. Additionally, culture conditions may be altered to increase protein production efficiency. Subsequently, the presence and/or level of the polypeptide of interest in the plurality of target cell types is detected and/or quantitated, allowing for the optimization of a polypeptide of interest's expression by selection of an efficient target cell and cell culture conditions relating thereto. Such methods may be useful when the polypeptide of interest contains one or more post-translational modifications or has substantial tertiary structure, which often complicate efficient protein production.

### Protein Recovery

[0800] The protein of interest may be preferably recovered from the culture medium as a secreted polypeptide, or it can be recovered from host cell lysates if expressed without a secretory signal. It may be necessary to purify the protein of interest from other recombinant proteins and host cell proteins in a way that substantially homogenous preparations of the protein of interest are obtained. The cells and/or particulate cell debris may be removed from the culture medium or lysate. The product of interest may then be purified from contaminant soluble proteins, polypeptides and nucleic acids by, for example, fractionation on immunoaffinity or ion-exchange columns, ethanol precipitation, reverse phase HPLC (RP-HPLC), SEPHADEX® chromatography, chromatography on silica or on a cation exchange resin such as DEAE. Methods of purifying a protein heterologous expressed by a host cell are well known in the art.

[0801] Methods and compositions described herein may be used to produce proteins which are capable of attenuating or blocking the endogenous agonist biological response and/or antagonizing a receptor or signaling molecule in a mammalian subject. For example, IL-12 and IL-23 receptor signaling may be enhanced in chronic autoimmune disorders such as multiple sclerosis and inflammatory diseases such as rheumatoid arthritis, psoriasis, lupus erythematosus, ankylosing spondylitis and Chron's disease (Kikly K, Liu L, Na S, Sedgwich J D (2006) Cur. Opin. Immunol. 18(6): 670-5). In another embodiment, a nucleic acid encodes an antagonist for chemokine receptors. Chemokine receptors CXCR-4 and CCR-5 are required for HIV enry into host cells (Arenzana-Seisdedos F et al, (1996) Nature. October 3; 383 (6599):400).

### Gene Silencing

[0802] The oncology-related polynucleotides, primary constructs and mmRNA described herein are useful to silence (i.e., prevent or substantially reduce) expression of one or more target genes in a cell population. A polynucleotide, primary construct or mmRNA encoding a polypeptide of interest capable of directing sequence-specific histone H3 methylation is introduced into the cells in the population under conditions such that the polypeptide is translated and reduces gene transcription of a target gene via histone H3 methylation and subsequent heterochromatin formation. In some embodiments, the silencing mechanism is performed on a cell population present in a mammalian subject. By way of non-limiting example, a useful target gene is a mutated Janus Kinase-2 family member, wherein the mammalian subject expresses the mutant target gene suffers from a myeloproliferative disease resulting from aberrant kinase activity.

[0803] Co-administration of oncology-related polynucleotides, primary constructs and mmRNA and RNAi agents are also provided herein.

### Modulation of Biological Pathways

[0804] The rapid translation polynucleotides, primary constructs and mmRNA introduced into cells provides a desirable mechanism of modulating target biological pathways. Such modulation includes antagonism or agonism of a given pathway. In one embodiment, a method is provided for antagonizing a biological pathway in a cell by contacting the cell with an effective amount of a composition comprising a polynucleotide, primary construct or mmRNA encoding a polypeptide of interest, under conditions such that the oncology-related polynucleotides, primary constructs and mmRNA is localized into the cell and the polypeptide is capable of being translated in the cell from the oncology-related polynucleotides, primary constructs and mmRNA, wherein the polypeptide inhibits the activity of a polypeptide functional in the biological pathway. Exemplary biological pathways are those defective in an autoimmune or inflammatory disorder such as multiple sclerosis, rheumatoid arthritis, psoriasis, lupus erythematosus, ankylosing spondylitis colitis, or Crohn's disease; in particular, antagonism of the IL-12 and IL-23 signaling pathways are of particular utility. (See Kikly K, Liu L, Na S, Sedgwick J D (2006) Curr. Opin. Immunol. 18 (6): 670-5; herein incorporated by reference in its entirety).

[0805] Further, provided are oncology-related polynucleotide, primary construct or mmRNA encoding an antagonist for chemokine receptors; chemokine receptors CXCR-4 and CCR-5 are required for, e.g., HIV entry into host cells (Arenzana-Seisdedos F et al, (1996) Nature. October 3; 383(6599):400; herein incorporated by reference in its entirety).

[0806] Alternatively, provided are methods of agonizing a biological pathway in a cell by contacting the cell with an effective amount of an oncology-related polynucleotide, primary construct or mmRNA encoding a recombinant polypeptide under conditions such that the nucleic acid is localized into the cell and the recombinant polypeptide is capable of being translated in the cell from the nucleic acid, and the recombinant polypeptide induces the activity of a polypeptide functional in the biological pathway. Exemplary agonized biological pathways include pathways that modulate cell fate determination. Such agonization is reversible or, alternatively, irreversible.

### Expression of Ligand or Receptor on Cell Surface

[0807] In some aspects and embodiments of the aspects described herein, the oncology-related polynucleotides, primary constructs or mmRNA described herein can be used to express a ligand or ligand receptor on the surface of a cell (e.g., a homing moiety). A ligand or ligand receptor moiety attached to a cell surface can permit the cell to have a desired biological interaction with a tissue or an agent in vivo. A ligand can be an antibody, an antibody fragment, an aptamer, a peptide, a vitamin, a carbohydrate, a protein or polypeptide, a receptor, e.g., cell-surface receptor, an adhesion molecule, a glycoprotein, a sugar residue, a therapeutic agent, a drug, a glycosaminoglycan, or any combination thereof. For example, a ligand can be an antibody that recognizes a cancer-cell specific antigen, rendering the cell capable of preferentially interacting with tumor cells to permit tumor-specific localization of a modified cell. A ligand can confer the ability of a cell composition to accumulate in a tissue to be treated, since a preferred ligand may be capable of interacting with a target molecule on the external face of a tissue to be treated. Ligands having limited cross-reactivity to other tissues are generally preferred.

[0808] In some cases, a ligand can act as a homing moiety which permits the cell to target to a specific tissue or interact with a specific ligand. Such homing moieties can include, but are not limited to, any member of a specific binding pair, antibodies, monoclonal antibodies, or derivatives or analogs thereof, including without limitation: Fv fragments, single chain Fv (scFv) fragments, Fab′ fragments, F(ab′)2 fragments, single domain antibodies, camelized antibodies and antibody fragments, humanized antibodies and antibody fragments, and multivalent versions of the foregoing; multivalent binding reagents including without limitation: monospecific or bispecific antibodies, such as disulfide stabilized Fv fragments, scFv tandems ((SCFV)2 fragments), diabodies, tribodies or tetrabodies, which typically are covalently linked or otherwise stabilized (i.e., leucine zipper or helix stabilized) scFv fragments; and other homing moieties include for example, aptamers, receptors, and fusion proteins.

[0809] In some embodiments, the homing moiety may be a surface-bound antibody, which can permit tuning of cell targeting specificity. This is especially useful since highly specific antibodies can be raised against an epitope of interest for the desired targeting site. In one embodiment, multiple antibodies are expressed on the surface of a cell, and each antibody can have a different specificity for a desired target. Such approaches can increase the avidity and specificity of homing interactions.

[0810] A skilled artisan can select any homing moiety based on the desired localization or function of the cell, for example an estrogen receptor ligand, such as tamoxifen, can target cells to estrogen-dependent breast cancer cells that have an increased number of estrogen receptors on the cell surface. Other non-limiting examples of ligand/receptor interactions include CCRI (e.g., for treatment of inflamed joint tissues or brain in rheumatoid arthritis, and/or multiple sclerosis), CCR7, CCR8 (e.g., targeting to lymph node tissue), CCR6, CCR9, CCR10 (e.g., to target to intestinal tissue), CCR4, CCR10 (e.g., for targeting to skin), CXCR4 (e.g., for general enhanced transmigration), HCELL (e.g., for treatment of inflammation and inflammatory disorders, bone marrow), Alpha4beta7 (e.g., for intestinal mucosa targeting), VLA-4/VCAM-1 (e.g., targeting to endothelium). In general, any receptor involved in targeting (e.g., cancer metastasis) can be harnessed for use in the methods and compositions described herein.

### Modulation of Cell Lineage

[0811] Provided are methods of inducing an alteration in cell fate in a target mammalian cell. The target mammalian cell may be a precursor cell and the alteration may involve driving differentiation into a lineage, or blocking such differentiation. Alternatively, the target mammalian cell may be a differentiated cell, and the cell fate alteration includes driving de-differentiation into a pluripotent precursor cell, or blocking such de-differentiation, such as the dedifferentiation of cancer cells into cancer stem cells. In situations where a change in cell fate is desired, effective amounts of mRNAs encoding a cell fate inductive polypeptide is introduced into a target cell under conditions such that an alteration in cell fate is induced. In some embodiments, the modified mRNAs are useful to reprogram a subpopulation of cells from a first phenotype to a second phenotype. Such a reprogramming may be temporary or permanent.

[0812] Optionally, the reprogramming induces a target cell to adopt an intermediate phenotype.

[0813] Additionally, the methods of the present invention are particularly useful to generate induced pluripotent stem cells (iPS cells) because of the high efficiency of transfection, the ability to re-transfect cells, and the tenability of the amount of recombinant polypeptides produced in the target cells. Further, the use of iPS cells generated using the methods described herein is expected to have a reduced incidence of teratoma formation.

[0814] Also provided are methods of reducing cellular differentiation in a target cell population. For example, a target cell population containing one or more precursor cell types is contacted with a composition having an effective amount of a polynucleotides, primary constructs and mmRNA encoding a polypeptide, under conditions such that the polypeptide is translated and reduces the differentiation of the precursor cell. In non-limiting embodiments, the target cell population contains injured tissue in a mammalian subject or tissue affected by a surgical procedure. The precursor cell is, e.g., a stromal precursor cell, a neural precursor cell, or a mesenchymal precursor cell.

[0815] In a specific embodiment, provided are polynucleotide, primary construct or mmRNA that encode one or more differentiation factors Gata4, Mef2c and Tbx4. These mRNA-generated factors are introduced into fibroblasts and drive the reprogramming into cardiomyocytes. Such a reprogramming can be performed in vivo, by contacting an mRNA-containing patch or other material to damaged cardiac tissue to facilitate cardiac regeneration. Such a process promotes cardiomyocyte genesis as opposed to fibrosis.

### Mediation of Cell Death

[0816] In one embodiment, polynucleotides, primary constructs or mmRNA compositions can be used to induce apoptosis in a cell (e.g., a cancer cell) by increasing the expression of a death receptor, a death receptor ligand or a combination thereof. This method can be used to induce cell death in any desired cell and has particular usefulness in the treatment of cancer where cells escape natural apoptotic signals.

[0817] Apoptosis can be induced by multiple independent signaling pathways that converge upon a final effector mechanism consisting of multiple interactions between several “death receptors” and their ligands, which belong to the tumor necrosis factor (TNF) receptor/ligand superfamily. The best-characterized death receptors are CD95 (“Fas”), TNFR1 (p55), death receptor 3 (DR3 or Apo3/TRAMO), DR4 and DR5 (apo2-TRAIL-R2). The final effector mechanism of apoptosis may be the activation of a series of proteinases designated as caspases. The activation of these caspases results in the cleavage of a series of vital cellular proteins and cell death. The molecular mechanism of death receptors/ligands-induced apoptosis is well known in the art. For example, Fas/FasL-mediated apoptosis is induced by binding of three FasL molecules which induces trimerization of Fas receptor via C-terminus death domains (DDs), which in turn recruits an adapter protein FADD (Fas-associated protein with death domain) and Caspase-8. The oligomerization of this trimolecular complex, Fas/FAIDD/caspase-8, results in proteolytic cleavage of proenzyme caspase-8 into active caspase-8 that, in turn, initiates the apoptosis process by activating other downstream caspases through proteolysis, including caspase-3. Death ligands in general are apoptotic when formed into trimers or higher order of structures. As monomers, they may serve as antiapoptotic agents by competing with the trimers for binding to the death receptors.

[0818] In one embodiment, the oncology-related polynucleotides, primary constructs or mmRNA composition encodes for a death receptor (e.g., Fas, TRAIL, TRAMO, TNFR, TLR etc). Cells made to express a death receptor by transfection of oncology-related polynucleotides, primary constructs and mmRNA become susceptible to death induced by the ligand that activates that receptor. Similarly, cells made to express a death ligand, e.g., on their surface, will induce death of cells with the receptor when the transfected cell contacts the target cell. In another embodiment, the oncology-related polynucleotides, primary constructs and mmRNA composition encodes for a death receptor ligand (e.g., FasL, TNF, etc). In another embodiment, the oncology-related polynucleotides, primary constructs and mmRNA composition encodes a caspase (e.g., caspase 3, caspase 8, caspase 9 etc). Where cancer cells often exhibit a failure to properly differentiate to a non-proliferative or controlled proliferative form, in another embodiment, the synthetic, polynucleotides, primary constructs and mmRNA composition encodes for both a death receptor and its appropriate activating ligand. In another embodiment, the synthetic, polynucleotides, primary constructs and mmRNA composition encodes for a differentiation factor that when expressed in the cancer cell, such as a cancer stem cell, will induce the cell to differentiate to a non-pathogenic or nonself-renewing phenotype (e.g., reduced cell growth rate, reduced cell division etc) or to induce the cell to enter a dormant cell phase (e.g., Go resting phase).

[0819] One of skill in the art will appreciate that the use of apoptosis-inducing techniques may require that the oncology-related polynucleotides, primary constructs or mmRNA are appropriately targeted to e.g., tumor cells to prevent unwanted wide-spread cell death. Thus, one can use a delivery mechanism (e.g., attached ligand or antibody, targeted liposome etc) that recognizes a cancer antigen such that the oncology-related polynucleotides, primary constructs or mmRNA are expressed only in cancer cells.

### VI. Kits and Devices

### Kits

[0820] The invention provides a variety of kits for conveniently and/or effectively carrying out methods of the present invention. Typically kits will comprise sufficient amounts and/or numbers of components to allow a user to perform multiple treatments of a subject(s) and/or to perform multiple experiments.

[0821] In one aspect, the present invention provides kits comprising the molecules (oncology-related polynucleotides, oncology-related primary constructs or oncology-related mmRNA) of the invention. In one embodiment, the kit comprises one or more functional antibodies or function fragments thereof.

[0822] Said kits can be for oncology-related protein production, comprising a first oncology-related polynucleotide, oncology-related primary construct or oncology-related mmRNA comprising a translatable region. The kit may further comprise packaging and instructions and/or a delivery agent to form a formulation composition. The delivery agent may comprise a saline, a buffered solution, a lipidoid or any delivery agent disclosed herein.

[0823] In one embodiment, the buffer solution may include sodium chloride, calcium chloride, phosphate and/or EDTA. In another embodiment, the buffer solution may include, but is not limited to, saline, saline with 2 mM calcium, 5% sucrose, 5% sucrose with 2 mM calcium, 5% Mannitol, 5% Mannitol with 2 mM calcium, Ringer's lactate, sodium chloride, sodium chloride with 2 mM calcium. In a further embodiment, the buffer solutions may be precipitated or it may be lyophilized. The amount of each component may be varied to enable consistent, reproducible higher concentration saline or simple buffer formulations. The components may also be varied in order to increase the stability of modified RNA in the buffer solution over a period of time and/or under a variety of conditions. In one aspect, the present invention provides kits for oncology-related protein production, comprising: an oncology-related polynucleotide, oncology-related primary construct or oncology-related mmRNA comprising a translatable region, provided in an amount effective to produce a desired amount of an oncology-related protein encoded by the translatable region when introduced into a target cell; a second oncology-related polynucleotide comprising an inhibitory nucleic acid, provided in an amount effective to substantially inhibit the innate immune response of the cell; and packaging and instructions.

[0824] In one aspect, the present invention provides kits for oncology-related protein production, comprising an oncology-related polynucleotide, oncology-related primary construct or oncology-related mmRNA comprising a translatable region, wherein the oncology-related polynucleotide exhibits reduced degradation by a cellular nuclease, and packaging and instructions.

[0825] In one aspect, the present invention provides kits for oncology-related protein production, comprising an oncology-related polynucleotide, oncology-related primary construct or oncology-related mmRNA comprising a translatable region, wherein the oncology-related polynucleotide exhibits reduced degradation by a cellular nuclease, and a mammalian cell suitable for translation of the translatable region of the first nucleic acid.

[0826] In one embodiment, the levels of Protein C may be measured by immunoassay. The assay may be purchased and is available from any number of suppliers including BioMerieux, Inc. (Durham, NC), Abbott Laboratories (Abbott Park, IL), Siemens Medical Solutions USA, Inc. (Malvern, PA), BIOPORTO® Diagnostics A/S (Gentofte, Denmark), USCN® Life Science Inc. (Houston, TX) or Roche Diagnostic Corporation (Indianapolis, IN). In this embodiment, the assay may be used to assess levels of Protein C or its activated form or a variant delivered as or in response to administration of a modified mRNA molecule.

### Devices

[0827] The present invention provides for devices which may incorporate oncology-related polynucleotides, oncology-related primary constructs or oncology-related mmRNA that encode oncology-related polypeptides of interest. These devices contain in a stable formulation the reagents to synthesize an oncology-related polynucleotide in a formulation available to be immediately delivered to a subject in need thereof, such as a human patient. Non-limiting examples of such a polypeptide of interest include a growth factor and/or angiogenesis stimulator for wound healing, a peptide antibiotic to facilitate infection control, and an antigen to rapidly stimulate an immune response to a newly identified virus.

[0828] Devices may also be used in conjunction with the present invention. In one embodiment, a device is used to assess levels of a protein which has been administered in the form of a modified mRNA. The device may comprise a blood, urine or other biofluidic test. It may be as large as to include an automated central lab platform or a small decentralized bench top device. It may be point of care or a handheld device. In this embodiment, for example, Protein C or APC may be quantitated before, during or after treatment with a modified mRNA encoding Protein C (its zymogen), APC or any variants thereof. Protein C, also known as autoprothrombin IIA and blood coagulation factor XIV is a zymogen, or precursor, of a serine protease which plays an important role in the regulation of blood coagulation and generation of fibrinolytic activity in vivo. It is synthesized in the liver as a single-chain polypeptide but undergoes posttranslational processing to give rise to a two-chain intermediate. The intermediate form of Protein C is converted via thrombin-mediated cleavage of a 12-residue peptide from the amino-terminus of the heavy chain to of the molecule to the active form, known as “activated protein C” (APC). The device may be useful in drug discovery efforts as a companion diagnostic test associated with Protein C, or APC treatment such as for sepsis or severe sepsis. In early studies it was suggested that APC had the ability to reduce mortality in severe sepsis. Following this line of work, clinical studies lead to the FDA approval of one compound, activated drotrecogin alfa (recombinant protein C). However, in late 2011, the drug was withdrawn from sale in all markets following results of the PROWESS-SHOCK study, which showed the study did not meet the primary endpoint of a statistically significant reduction in 28-day all-cause mortality in patients with septic shock. The present invention provides modified mRNA molecules which may be used in the diagnosis and treatment of sepsis, severe sepsis and septicemia which overcome prior issues or problems associated with increasing protein expression efficiencies in mammals.

[0829] In some embodiments the device is self-contained, and is optionally capable of wireless remote access to obtain instructions for synthesis and/or analysis of the generated oncology-related polynucleotide, oncology-related primary construct or oncology-related mmRNA. The device is capable of mobile synthesis of at least one oncology-related polynucleotide, oncology-related primary construct or oncology-related mmRNA and preferably an unlimited number of different oncology-related polynucleotides, oncology-related primary constructs or oncology-related mmRNA. In certain embodiments, the device is capable of being transported by one or a small number of individuals. In other embodiments, the device is scaled to fit on a benchtop or desk. In other embodiments, the device is scaled to fit into a suitcase, backpack or similarly sized object. In another embodiment, the device may be a point of care or handheld device. In further embodiments, the device is scaled to fit into a vehicle, such as a car, truck or ambulance, or a military vehicle such as a tank or personnel carrier. The information necessary to generate a modified oncology-related mRNA encoding oncology-related polypeptide of interest is present within a computer readable medium present in the device.

[0830] In one embodiment, a device may be used to assess levels of an oncology-related protein which has been administered in the form of an oncology-related polynucleotide, oncology-related primary construct or oncology-related mmRNA. The device may comprise a blood, urine or other biofluidic test.

[0831] In some embodiments, the device is capable of communication (e.g., wireless communication) with a database of nucleic acid and polypeptide sequences which may be oncology-related nucleic acid and oncology-related polypeptide sequences. The device contains at least one sample block for insertion of one or more sample vessels. Such sample vessels are capable of accepting in liquid or other form any number of materials such as template DNA, nucleotides, enzymes, buffers, and other reagents. The sample vessels are also capable of being heated and cooled by contact with the sample block. The sample block is generally in communication with a device base with one or more electronic control units for the at least one sample block. The sample block preferably contains a heating module, such heating molecule capable of heating and/or cooling the sample vessels and contents thereof to temperatures between about −20 C and above +100 C. The device base is in communication with a voltage supply such as a battery or external voltage supply. The device also contains means for storing and distributing the materials for RNA synthesis.

[0832] Optionally, the sample block contains a module for separating the synthesized nucleic acids. Alternatively, the device contains a separation module operably linked to the sample block. Preferably the device contains a means for analysis of the synthesized nucleic acid. Such analysis includes sequence identity (demonstrated such as by hybridization), absence of non-desired sequences, measurement of integrity of synthesized mRNA (such has by microfluidic viscometry combined with spectrophotometry), and concentration and/or potency of modified RNA (such as by spectrophotometry).

[0833] In certain embodiments, the device is combined with a means for detection of pathogens present in a biological material obtained from a subject, e.g., the IBIS PLEX-ID system (Abbott, Abbott Park, IL) for microbial identification.

[0834] Suitable devices for use in delivering intradermal pharmaceutical compositions described herein include short needle devices such as those described in U.S. Pat. Nos. 4,886,499; 5,190,521; 5,328,483; 5,527,288; 4,270,537; 5,015,235; 5,141,496; and 5,417,662; each of which is herein incorporated by reference in their entirety. Intradermal compositions may be administered by devices which limit the effective penetration length of a needle into the skin, such as those described in PCT publication WO 99/34850 (herein incorporated by reference in its entirety) and functional equivalents thereof. Jet injection devices which deliver liquid compositions to the dermis via a liquid jet injector and/or via a needle which pierces the stratum corneum and produces a jet which reaches the dermis are suitable. Jet injection devices are described, for example, in U.S. Pat. Nos. 5,480,381; 5,599,302; 5,334,144; 5,993,412; 5,649,912; 5,569,189; 5,704,911; 5,383,851; 5,893,397; 5,466,220; 5,339,163; 5,312,335; 5,503,627; 5,064,413; 5,520,639; 4,596,556; 4,790,824; 4,941,880; 4,940,460; and PCT publications WO 97/37705 and WO 97/13537; each of which are herein incorporated by reference in their entirety. Ballistic powder/particle delivery devices which use compressed gas to accelerate vaccine in powder form through the outer layers of the skin to the dermis are suitable. Alternatively or additionally, conventional syringes may be used in the classical mantoux method of intradermal administration.

[0835] In some embodiments, the device may be a pump or comprise a catheter for administration of compounds or compositions of the invention across the blood brain barrier. Such devices include but are not limited to a pressurized olfactory delivery device, iontophoresis devices, multi-layered microfluidic devices, and the like. Such devices may be portable or stationary. They may be implantable or externally tethered to the body or combinations thereof.

[0836] Devices for administration may be employed to deliver the oncology-related polynucleotides, oncology-related primary constructs or oncology-related mmRNA of the present invention according to single, multi- or split-dosing regimens taught herein. Such devices are described below.

[0837] Method and devices known in the art for multi-administration to cells, organs and tissues are contemplated for use in conjunction with the methods and compositions disclosed herein as embodiments of the present invention. These include, for example, those methods and devices having multiple needles, hybrid devices employing for example lumens or catheters as well as devices utilizing heat, electric current or radiation driven mechanisms.

[0838] According to the present invention, these multi-administration devices may be utilized to deliver the single, multi- or split doses contemplated herein.

[0839] A method for delivering therapeutic agents to a solid tissue has been described by Bahrami et al. and is taught for example in US Patent Publication 20110230839, the contents of which are incorporated herein by reference in their entirety. According to Bahrami, an array of needles is incorporated into a device which delivers a substantially equal amount of fluid at any location in said solid tissue along each needle's length.

[0840] A device for delivery of biological material across the biological tissue has been described by Kodgule et al. and is taught for example in US Patent Publication 20110172610, the contents of which are incorporated herein by reference in their entirety. According to Kodgule, multiple hollow micro-needles made of one or more metals and having outer diameters from about 200 microns to about 350 microns and lengths of at least 100 microns are incorporated into the device which delivers peptides, proteins, carbohydrates, nucleic acid molecules, lipids and other pharmaceutically active ingredients or combinations thereof.

[0841] A delivery probe for delivering a therapeutic agent to a tissue has been described by Gunday et al. and is taught for example in US Patent Publication 20110270184, the contents of each of which are incorporated herein by reference in their entirety. According to Gunday, multiple needles are incorporated into the device which moves the attached capsules between an activated position and an inactivated position to force the agent out of the capsules through the needles.

[0842] A multiple-injection medical apparatus has been described by Assaf and is taught for example in US Patent Publication 20110218497, the contents of which are incorporated herein by reference in their entirety. According to Assaf, multiple needles are incorporated into the device which has a chamber connected to one or more of said needles and a means for continuously refilling the chamber with the medical fluid after each injection.

[0843] In one embodiment, the oncology-related polynucleotide, oncology-related primary construct, or oncology-related mmRNA is administered subcutaneously or intramuscularly via at least 3 needles to three different, optionally adjacent, sites simultaneously, or within a 60 minutes period (e.g., administration to 4, 5, 6, 7, 8, 9, or 10 sites simultaneously or within a 60 minute period). The split doses can be administered simultaneously to adjacent tissue using the devices described in U.S. Patent Publication Nos. 20110230839 and 20110218497, each of which is incorporated herein by reference in their entirety.

[0844] An at least partially implantable system for injecting a substance into a patient's body, in particular a penis erection stimulation system has been described by Forsell and is taught for example in US Patent Publication 20110196198, the contents of which are incorporated herein by reference in their entirety. According to Forsell, multiple needles are incorporated into the device which is implanted along with one or more housings adjacent the patient's left and right corpora cavernosa. A reservoir and a pump are also implanted to supply drugs through the needles.

[0845] A method for the transdermal delivery of a therapeutic effective amount of iron has been described by Berenson and is taught for example in US Patent Publication 20100130910, the contents of which are incorporated herein by reference in their entirety. According to Berenson, multiple needles may be used to create multiple micro channels in stratum corneum to enhance transdermal delivery of the ionic iron on an iontophoretic patch.

[0846] A method for delivery of biological material across the biological tissue has been described by Kodgule et al and is taught for example in US Patent Publication 20110196308, the contents of which are incorporated herein by reference in their entirety. According to Kodgule, multiple biodegradable microneedles containing a therapeutic active ingredient are incorporated in a device which delivers proteins, carbohydrates, nucleic acid molecules, lipids and other pharmaceutically active ingredients or combinations thereof.

[0847] A transdermal patch comprising a botulinum toxin composition has been described by Donovan and is taught for example in US Patent Publication 20080220020, the contents of which are incorporated herein by reference in their entirety. According to Donovan, multiple needles are incorporated into the patch which delivers botulinum toxin under stratum corneum through said needles which project through the stratum corneum of the skin without rupturing a blood vessel.

[0848] A small, disposable drug reservoir, or patch pump, which can hold approximately 0.2 to 15 mL of liquid formulations can be placed on the skin and deliver the formulation continuously subcutaneously using a small bore needed (e.g., 26 to 34 gauge). As non-limiting examples, the patch pump may be 50 mm by 76 mm by 20 mm spring loaded having a 30 to 34 gauge needle (BD™ Microinfuser, Franklin Lakes NJ), 41 mm by 62 mm by 17 mm with a 2 mL reservoir used for drug delivery such as insulin (OMNIPOD®, Insulet Corporation Bedford, MA), or 43-60 mm diameter, 10 mm thick with a 0.5 to 10 mL reservoir (PATCHPUMP®, SteadyMed Therapeutics, San Francisco, CA). Further, the patch pump may be battery powered and/or rechargeable.

[0849] A cryoprobe for administration of an active agent to a location of cryogenic treatment has been described by Toubia and is taught for example in US Patent Publication 20080140061, the contents of which are incorporated herein by reference in their entirety. According to Toubia, multiple needles are incorporated into the probe which receives the active agent into a chamber and administers the agent to the tissue.

[0850] A method for treating or preventing inflammation or promoting healthy joints has been described by Stock et al and is taught for example in US Patent Publication 20090155186, the contents of which are incorporated herein by reference in their entirety. According to Stock, multiple needles are incorporated in a device which administers compositions containing signal transduction modulator compounds.

[0851] A multi-site injection system has been described by Kimmell et al. and is taught for example in US Patent Publication 20100256594, the contents of which are incorporated herein by reference in their entirety. According to Kimmell, multiple needles are incorporated into a device which delivers a medication into a stratum corneum through the needles.

[0852] A method for delivering interferons to the intradermal compartment has been described by Dekker et al. and is taught for example in US Patent Publication 20050181033, the contents of which are incorporated herein by reference in their entirety. According to Dekker, multiple needles having an outlet with an exposed height between 0 and 1 mm are incorporated into a device which improves pharmacokinetics and bioavailability by delivering the substance at a depth between 0.3 mm and 2 mm.

[0853] A method for delivering genes, enzymes and biological agents to tissue cells has described by Desai and is taught for example in US Patent Publication 20030073908, the contents of which are incorporated herein by reference in their entirety. According to Desai, multiple needles are incorporated into a device which is inserted into a body and delivers a medication fluid through said needles.

[0854] A method for treating cardiac arrhythmias with fibroblast cells has been described by Lee et al and is taught for example in US Patent Publication 20040005295, the contents of which are incorporated herein by reference in their entirety. According to Lee, multiple needles are incorporated into the device which delivers fibroblast cells into the local region of the tissue.

[0855] A method using a magnetically controlled pump for treating a brain tumor has been described by Shachar et al. and is taught for example in U.S. Pat. No. 7,799,012 (method) and 7799016 (device), the contents of which are incorporated herein by reference in their entirety. According Shachar, multiple needles were incorporated into the pump which pushes a medicating agent through the needles at a controlled rate.

[0856] Methods of treating functional disorders of the bladder in mammalian females have been described by Versi et al. and are taught for example in U.S. Pat. No. 8,029,496, the contents of which are incorporated herein by reference in their entirety. According to Versi, an array of micro-needles is incorporated into a device which delivers a therapeutic agent through the needles directly into the trigone of the bladder.

[0857] A micro-needle transdermal transport device has been described by Angel et al and is taught for example in U.S. Pat. No. 7,364,568, the contents of which are incorporated herein by reference in their entirety. According to Angel, multiple needles are incorporated into the device which transports a substance into a body surface through the needles which are inserted into the surface from different directions. The micro-needle transdermal transport device may be a solid micro-needle system or a hollow micro-needle system. As a non-limiting example, the solid micro-needle system may have up to a 0.5 mg capacity, with 300-1500 solid micro-needles per cm² about 150-700 μm tall coated with a drug. The micro-needles penetrate the stratum corneum and remain in the skin for short duration (e.g., 20 seconds to 15 minutes). In another example, the hollow micro-needle system has up to a 3 mL capacity to deliver liquid formulations using 15-20 microneedles per cm2 being approximately 950 μm tall. The micro-needles penetrate the skin to allow the liquid formulations to flow from the device into the skin. The hollow micro-needle system may be worn from 1 to 30 minutes depending on the formulation volume and viscocity.

[0858] A device for subcutaneous infusion has been described by Dalton et al and is taught for example in U.S. Pat. No. 7,150,726, the contents of which are incorporated herein by reference in their entirety. According to Dalton, multiple needles are incorporated into the device which delivers fluid through the needles into a subcutaneous tissue.

[0859] A device and a method for intradermal delivery of vaccines and gene therapeutic agents through microcannula have been described by Mikszta et al. and are taught for example in U.S. Pat. No. 7,473,247, the contents of which are incorporated herein by reference in their entirety. According to Mitszta, at least one hollow micro-needle is incorporated into the device which delivers the vaccines to the subject's skin to a depth of between 0.025 mm and 2 mm.

[0860] A method of delivering insulin has been described by Pettis et al and is taught for example in U.S. Pat. No. 7,722,595, the contents of which are incorporated herein by reference in their entirety. According to Pettis, two needles are incorporated into a device wherein both needles insert essentially simultaneously into the skin with the first at a depth of less than 2.5 mm to deliver insulin to intradermal compartment and the second at a depth of greater than 2.5 mm and less than 5.0 mm to deliver insulin to subcutaneous compartment.

[0861] Cutaneous injection delivery under suction has been described by Kochamba et al. and is taught for example in U.S. Pat. No. 6,896,666, the contents of which are incorporated herein by reference in their entirety. According to Kochamba, multiple needles in relative adjacency with each other are incorporated into a device which injects a fluid below the cutaneous layer.

[0862] A device for withdrawing or delivering a substance through the skin has been described by Down et al and is taught for example in U.S. Pat. No. 6,607,513, the contents of which are incorporated herein by reference in their entirety. According to Down, multiple skin penetrating members which are incorporated into the device have lengths of about 100 microns to about 2000 microns and are about 30 to 50 gauge.

[0863] A device for delivering a substance to the skin has been described by Palmer et al and is taught for example in U.S. Pat. No. 6,537,242, the contents of which are incorporated herein by reference in their entirety. According to Palmer, an array of micro-needles is incorporated into the device which uses a stretching assembly to enhance the contact of the needles with the skin and provides a more uniform delivery of the substance.

[0864] A perfusion device for localized drug delivery has been described by Zamoyski and is taught for example in U.S. Pat. No. 6,468,247, the contents of which are incorporated herein by reference in their entirety. According to Zamoyski, multiple hypodermic needles are incorporated into the device which injects the contents of the hypodermics into a tissue as said hypodermics are being retracted.

[0865] A method for enhanced transport of drugs and biological molecules across tissue by improving the interaction between micro-needles and human skin has been described by Prausnitz et al. and is taught for example in U.S. Pat. No. 6,743,211, the contents of which are incorporated herein by reference in their entirety. According to Prausnitz, multiple micro-needles are incorporated into a device which is able to present a more rigid and less deformable surface to which the micro-needles are applied.

[0866] A device for intraorgan administration of medicinal agents has been described by Ting et al and is taught for example in U.S. Pat. No. 6,077,251, the contents of which are incorporated herein by reference in their entirety. According to Ting, multiple needles having side openings for enhanced administration are incorporated into a device which by extending and retracting said needles from and into the needle chamber forces a medicinal agent from a reservoir into said needles and injects said medicinal agent into a target organ.

[0867] A multiple needle holder and a subcutaneous multiple channel infusion port has been described by Brown and is taught for example in U.S. Pat. No. 4,695,273, the contents of which are incorporated herein by reference in their entirety. According to Brown, multiple needles on the needle holder are inserted through the septum of the infusion port and communicate with isolated chambers in said infusion port.

[0868] A dual hypodermic syringe has been described by Horn and is taught for example in U.S. Pat. No. 3,552,394, the contents of which are incorporated herein by reference in their entirety. According to Horn, two needles incorporated into the device are spaced apart less than 68 mm and may be of different styles and lengths, thus enabling injections to be made to different depths.

[0869] A syringe with multiple needles and multiple fluid compartments has been described by Hershberg and is taught for example in U.S. Pat. No. 3,572,336, the contents of which are incorporated herein by reference in their entirety. According to Hershberg, multiple needles are incorporated into the syringe which has multiple fluid compartments and is capable of simultaneously administering incompatible drugs which are not able to be mixed for one injection.

[0870] A surgical instrument for intradermal injection of fluids has been described by Eliscu et al. and is taught for example in U.S. Pat. No. 2,588,623, the contents of which are incorporated herein by reference in their entirety. According to Eliscu, multiple needles are incorporated into the instrument which injects fluids intradermally with a wider disperse.

[0871] An apparatus for simultaneous delivery of a substance to multiple breast milk ducts has been described by Hung and is taught for example in EP 1818017, the contents of which are incorporated herein by reference in their entirety. According to Hung, multiple lumens are incorporated into the device which inserts though the orifices of the ductal networks and delivers a fluid to the ductal networks.

[0872] A catheter for introduction of medications to the tissue of a heart or other organs has been described by Tkebuchava and is taught for example in WO2006138109, the contents of which are incorporated herein by reference in their entirety. According to Tkebuchava, two curved needles are incorporated which enter the organ wall in a flattened trajectory.

[0873] Devices for delivering medical agents have been described by Mckay et al. and are taught for example in WO2006118804, the content of which are incorporated herein by reference in their entirety. According to Mckay, multiple needles with multiple orifices on each needle are incorporated into the devices to facilitate regional delivery to a tissue, such as the interior disc space of a spinal disc.

[0874] A method for directly delivering an immunomodulatory substance into an intradermal space within a mammalian skin has been described by Pettis and is taught for example in WO2004020014, the contents of which are incorporated herein by reference in their entirety. According to Pettis, multiple needles are incorporated into a device which delivers the substance through the needles to a depth between 0.3 mm and 2 mm.

[0875] Methods and devices for administration of substances into at least two compartments in skin for systemic absorption and improved pharmacokinetics have been described by Pettis et al. and are taught for example in WO2003094995, the contents of which are incorporated herein by reference in their entirety. According to Pettis, multiple needles having lengths between about 300 μm and about 5 mm are incorporated into a device which delivers to intradermal and subcutaneous tissue compartments simultaneously.

[0876] A drug delivery device with needles and a roller has been described by Zimmerman et al. and is taught for example in WO2012006259, the contents of which are incorporated herein by reference in their entirety. According to Zimmerman, multiple hollow needles positioned in a roller are incorporated into the device which delivers the content in a reservoir through the needles as the roller rotates.

[0877] A drug delivery device such as a stent is known in the art and is taught for example in U.S. Pat. No. 8,333,799, U.S. Pub. Nos. US20060020329, US20040172127 and US20100161032; the contents of each of which are herein incorporated by reference in their entirety. Formulations of the polynucleotides, primary constructs, mmRNA described herein may be delivered using stents. Additionally, stents used herein may be able to deliver multiple polynucleotides, primary constructs and/or mmRNA and/or formulations at the same or varied rates of delivery. Non-limiting examples of manufacturers of stents include CORDIS® (Miami, FL) (CYPHER®), Boston Scientific Corporation (Natick, MA) (TAXUS®), Medtronic (Minneapolis, MN) (ENDEAVOUR®) and Abbott (Abbott Park, TL) (XIENCE V®).

Methods and Devices Utilizing Catheters and/or Lumens

[0878] Methods and devices using catheters and lumens may be employed to administer the oncology-related mmRNA of the present invention on a single, multi- or split dosing schedule. Such methods and devices are described below.

[0879] A catheter-based delivery of skeletal myoblasts to the myocardium of damaged hearts has been described by Jacoby et al and is taught for example in US Patent Publication 20060263338, the contents of which are incorporated herein by reference in their entirety. According to Jacoby, multiple needles are incorporated into the device at least part of which is inserted into a blood vessel and delivers the cell composition through the needles into the localized region of the subject's heart.

[0880] An apparatus for treating asthma using neurotoxin has been described by Deem et al and is taught for example in US Patent Publication 20060225742, the contents of which are incorporated herein by reference in their entirety. According to Deem, multiple needles are incorporated into the device which delivers neurotoxin through the needles into the bronchial tissue.

[0881] A method for administering multiple-component therapies has been described by Nayak and is taught for example in U.S. Pat. No. 7,699,803, the contents of which are incorporated herein by reference in their entirety. According to Nayak, multiple injection cannulas may be incorporated into a device wherein depth slots may be included for controlling the depth at which the therapeutic substance is delivered within the tissue.

[0882] A surgical device for ablating a channel and delivering at least one therapeutic agent into a desired region of the tissue has been described by McIntyre et al and is taught for example in U.S. Pat. No. 8,012,096, the contents of which are incorporated herein by reference in their entirety. According to McIntyre, multiple needles are incorporated into the device which dispenses a therapeutic agent into a region of tissue surrounding the channel and is particularly well suited for transmyocardial revascularization operations.

[0883] Methods of treating functional disorders of the bladder in mammalian females have been described by Versi et al and are taught for example in U.S. Pat. No. 8,029,496, the contents of which are incorporated herein by reference in their entirety. According to Versi, an array of micro-needles is incorporated into a device which delivers a therapeutic agent through the needles directly into the trigone of the bladder.

[0884] A device and a method for delivering fluid into a flexible biological barrier have been described by Yeshurun et al. and are taught for example in U.S. Pat. No. 7,998,119 (device) and U.S. Pat. No. 8,007,466 (method), the contents of which are incorporated herein by reference in their entirety. According to Yeshurun, the micro-needles on the device penetrate and extend into the flexible biological barrier and fluid is injected through the bore of the hollow micro-needles.

[0885] A method for epicardially injecting a substance into an area of tissue of a heart having an epicardial surface and disposed within a torso has been described by Bonner et al and is taught for example in U.S. Pat. No. 7,628,780, the contents of which are incorporated herein by reference in their entirety. According to Bonner, the devices have elongate shafts and distal injection heads for driving needles into tissue and injecting medical agents into the tissue through the needles.

[0886] A device for sealing a puncture has been described by Nielsen et al and is taught for example in U.S. Pat. No. 7,972,358, the contents of which are incorporated herein by reference in their entirety. According to Nielsen, multiple needles are incorporated into the device which delivers a closure agent into the tissue surrounding the puncture tract.

[0887] A method for myogenesis and angiogenesis has been described by Chiu et al. and is taught for example in U.S. Pat. No. 6,551,338, the contents of which are incorporated herein by reference in their entirety. According to Chiu, 5 to 15 needles having a maximum diameter of at least 1.25 mm and a length effective to provide a puncture depth of 6 to 20 mm are incorporated into a device which inserts into proximity with a myocardium and supplies an exogeneous angiogenic or myogenic factor to said myocardium through the conduits which are in at least some of said needles.

[0888] A method for the treatment of prostate tissue has been described by Bolmsj et al. and is taught for example in U.S. Pat. No. 6,524,270, the contents of which are incorporated herein by reference in their entirety. According to Bolmsj, a device comprising a catheter which is inserted through the urethra has at least one hollow tip extendible into the surrounding prostate tissue. An astringent and analgesic medicine is administered through said tip into said prostate tissue.

[0889] A method for infusing fluids to an intraosseous site has been described by Findlay et al. and is taught for example in U.S. Pat. No. 6,761,726, the contents of which are incorporated herein by reference in their entirety. According to Findlay, multiple needles are incorporated into a device which is capable of penetrating a hard shell of material covered by a layer of soft material and delivers a fluid at a predetermined distance below said hard shell of material.

[0890] A device for injecting medications into a vessel wall has been described by Vigil et al. and is taught for example in U.S. Pat. No. 5,713,863, the contents of which are incorporated herein by reference in their entirety. According to Vigil, multiple injectors are mounted on each of the flexible tubes in the device which introduces a medication fluid through a multi-lumen catheter, into said flexible tubes and out of said injectors for infusion into the vessel wall.

[0891] A catheter for delivering therapeutic and/or diagnostic agents to the tissue surrounding a bodily passageway has been described by Faxon et al. and is taught for example in U.S. Pat. No. 5,464,395, the contents of which are incorporated herein by reference in their entirety. According to Faxon, at least one needle cannula is incorporated into the catheter which delivers the desired agents to the tissue through said needles which project outboard of the catheter.

[0892] Balloon catheters for delivering therapeutic agents have been described by Orr and are taught for example in WO2010024871, the contents of which are incorporated herein by reference in their entirety. According to Orr, multiple needles are incorporated into the devices which deliver the therapeutic agents to different depths within the tissue. In another aspect, drug-eluting balloons may be used to deliver the formulations described herein. The drug-eluting balloons may be used in target lesion applications such as, but are not limited to, in-stent restenosis, treating lesion in tortuous vessels, bifurcation lesions, femoral/popliteal lesions and below the knee lesions.

[0893] A device for delivering therapeutic agents (e.g., oncology-related polynucleotides, primary constructs or mmRNA) to tissue disposed about a lumin has been described by Perry et al. and is taught for example in U.S. Pat. Pub. US20100125239, the contents of which are herein incorporated by reference in their entirety. According to Perry, the catheter has a balloon which may be coated with a therapeutic agent by methods known in the art and described in Perry. When the balloon expands, the therapeutic agent will contact the surrounding tissue. The device may additionally have a heat source to change the temperature of the coating on the balloon to release the therapeutic agent to the tissue.

### Methods and Devices Utilizing Electrical Current

[0894] Methods and devices utilizing electric current may be employed to deliver the mmRNA of the present invention according to the single, multi- or split dosing regimens taught herein. Such methods and devices are described below.

[0895] An electro collagen induction therapy device has been described by Marquez and is taught for example in US Patent Publication 20090137945, the contents of which are incorporated herein by reference in their entirety. According to Marquez, multiple needles are incorporated into the device which repeatedly pierce the skin and draw in the skin a portion of the substance which is applied to the skin first.

[0896] An electrokinetic system has been described by Etheredge et al. and is taught for example in US Patent Publication 20070185432, the contents of which are incorporated herein by reference in their entirety. According to Etheredge, micro-needles are incorporated into a device which drives by an electrical current the medication through the needles into the targeted treatment site.

[0897] An iontophoresis device has been described by Matsumura et al. and is taught for example in U.S. Pat. No. 7,437,189, the contents of which are incorporated herein by reference in their entirety. According to Matsumura, multiple needles are incorporated into the device which is capable of delivering ionizable drug into a living body at higher speed or with higher efficiency.

[0898] Intradermal delivery of biologically active agents by needle-free injection and electroporation has been described by Hoffmann et al and is taught for example in U.S. Pat. No. 7,171,264, the contents of which are incorporated herein by reference in their entirety. According to Hoffmann, one or more needle-free injectors are incorporated into an electroporation device and the combination of needle-free injection and electroporation is sufficient to introduce the agent into cells in skin, muscle or mucosa.

[0899] A method for electropermeabilization-mediated intracellular delivery has been described by Lundkvist et al. and is taught for example in U.S. Pat. No. 6,625,486, the contents of which are incorporated herein by reference in their entirety. According to Lundkvist, a pair of needle electrodes is incorporated into a catheter. Said catheter is positioned into a body lumen followed by extending said needle electrodes to penetrate into the tissue surrounding said lumen. Then the device introduces an agent through at least one of said needle electrodes and applies electric field by said pair of needle electrodes to allow said agent pass through the cell membranes into the cells at the treatment site.

[0900] A delivery system for transdermal immunization has been described by Levin et al. and is taught for example in WO2006003659, the contents of which are incorporated herein by reference in their entirety. According to Levin, multiple electrodes are incorporated into the device which applies electrical energy between the electrodes to generate micro channels in the skin to facilitate transdermal delivery.

[0901] A method for delivering RF energy into skin has been described by Schomacker and is taught for example in WO2011163264, the contents of which are incorporated herein by reference in their entirety. According to Schomacker, multiple needles are incorporated into a device which applies vacuum to draw skin into contact with a plate so that needles insert into skin through the holes on the plate and deliver RF energy.

### VII. Definitions

[0902] At various places in the present specification, substituents of compounds of the present disclosure are disclosed in groups or in ranges. It is specifically intended that the present disclosure include each and every individual subcombination of the members of such groups and ranges. For example, the term “C₁₋₆ alkyl” is specifically intended to individually disclose methyl, ethyl, C₃ alkyl, C₄ alkyl, C₅ alkyl, and C₆ alkyl.

[0903] About: As used herein, the term “about” means+/−10% of the recited value.

[0904] Administered in combination: As used herein, the term “administered in combination” or “combined administration” means that two or more agents are administered to a subject at the same time or within an interval such that there may be an overlap of an effect of each agent on the patient. In some embodiments, they are administered within about 60, 30, 15, 10, 5, or 1 minute of one another. In some embodiments, the administrations of the agents are spaced sufficiently closely together such that a combinatorial (e.g., a synergistic) effect is achieved.

[0905] Animal: As used herein, the term “animal” refers to any member of the animal kingdom. In some embodiments, “animal” refers to humans at any stage of development. In some embodiments, “animal” refers to non-human animals at any stage of development. In certain embodiments, the non-human animal is a mammal (e.g., a rodent, a mouse, a rat, a rabbit, a monkey, a dog, a cat, a sheep, cattle, a primate, or a pig). In some embodiments, animals include, but are not limited to, mammals, birds, reptiles, amphibians, fish, and worms. In some embodiments, the animal is a transgenic animal, genetically-engineered animal, or a clone.

[0906] Antigens of interest or desired antigens: As used herein, the terms “antigens of interest” or “desired antigens” include those proteins and other biomolecules provided herein that are immunospecifically bound by the antibodies and fragments, mutants, variants, and alterations thereof described herein. Examples of antigens of interest include, but are not limited to, insulin, insulin-like growth factor, hGH, tPA, cytokines, such as interleukins (IL), e.g., IL-1, IL-2, IL-3, IL-4, IL-5, IL-6, IL-7, IL-8, IL-9, IL-10, IL-11, IL-12, IL-13, IL-14, IL-15, IL-16, IL-17, IL-18, interferon (IFN) alpha, IFN beta, IFN gamma, IFN omega or IFN tau, tumor necrosis factor (TNF), such as TNF alpha and TNF beta, TNF gamma, TRAIL; G-CSF, GM-CSF, M-CSF, MCP-1 and VEGF.

[0907] Approximately: As used herein, the term “approximately” or “about,” as applied to one or more values of interest, refers to a value that is similar to a stated reference value. In certain embodiments, the term “approximately” or “about” refers to a range of values that fall within 25%, 20%, 19%, 18%, 17%, 16%, 15%, 14%, 13%, 12%, 11%, 10%, 9%, 8%, 7%, 6%, 5%, 4%, 3%, 2%, 1%, or less in either direction (greater than or less than) of the stated reference value unless otherwise stated or otherwise evident from the context (except where such number would exceed 100% of a possible value).

[0908] Associated with: As used herein, the terms “associated with,” “conjugated,” “linked,” “attached,” and “tethered,” when used with respect to two or more moieties, means that the moieties are physically associated or connected with one another, either directly or via one or more additional moieties that serves as a linking agent, to form a structure that is sufficiently stable so that the moieties remain physically associated under the conditions in which the structure is used, e.g., physiological conditions. An “association” need not be strictly through direct covalent chemical bonding. It may also suggest ionic or hydrogen bonding or a hybridization based connectivity sufficiently stable such that the “associated” entities remain physically associated.

[0909] Bifunctional: As used herein, the term “bifunctional” refers to any substance, molecule or moiety which is capable of or maintains at least two functions. The functions may effect the same outcome or a different outcome. The structure that produces the function may be the same or different. For example, bifunctional modified RNAs of the present invention may encode a cytotoxic peptide (a first function) while those nucleosides which comprise the encoding RNA are, in and of themselves, cytotoxic (second function). In this example, delivery of the bifunctional modified RNA to a cancer cell would produce not only a peptide or protein molecule which may ameliorate or treat the cancer but would also deliver a cytotoxic payload of nucleosides to the cell should degradation, instead of translation of the modified RNA, occur.

[0910] Biocompatible: As used herein, the term “biocompatible” means compatible with living cells, tissues, organs or systems posing little to no risk of injury, toxicity or rejection by the immune system.

[0911] Biodegradable: As used herein, the term “biodegradable” means capable of being broken down into innocuous products by the action of living things.

[0912] Biologically active: As used herein, the phrase “biologically active” refers to a characteristic of any substance that has activity in a biological system and/or organism. For instance, a substance that, when administered to an organism, has a biological effect on that organism, is considered to be biologically active. In particular embodiments, an oncology-related polynucleotide, oncology-related primary construct or oncology-related mmRNA of the present invention may be considered biologically active if even a portion of the oncology-related polynucleotide, oncology-related primary construct or oncology-related mmRNA is biologically active or mimics an activity considered biologically relevant.

[0913] Cancer: As used herein, the term “cancer” in a subject refers to the presence of cells possessing characteristics, such as uncontrolled proliferation, immortality, metastatic potential, rapid growth and proliferation rate, and certain characteristic morphological features. Often, cancer cells will be in the form of a tumor, but such cells may exist alone within a subject, or may circulate in the blood stream as independent cells, such as leukemic cells.

[0914] Cell growth: As used herein, the term “cell growth” is principally associated with growth in cell numbers, which occurs by means of cell reproduction (i.e. proliferation) when the rate of the latter is greater than the rate of cell death (e.g. by apoptosis or necrosis).

[0915] Chemical terms: The following provides the definition of various chemical terms from “acyl” to “thiol.”

[0916] The term “acyl,” as used herein, represents a hydrogen or an alkyl group (e.g., a haloalkyl group), as defined herein, that is attached to the parent molecular group through a carbonyl group, as defined herein, and is exemplified by formyl (i.e., a carboxyaldehyde group), acetyl, propionyl, butanoyl and the like. Exemplary unsubstituted acyl groups include from 1 to 7, from 1 to 11, or from 1 to 21 carbons. In some embodiments, the alkyl group is further substituted with 1, 2, 3, or 4 substituents as described herein.

[0917] The term “acylamino,” as used herein, represents an acyl group, as defined herein, attached to the parent molecular group though an amino group, as defined herein (i.e., —N(R^{N1})—C(O)—R, where R is H or an optionally substituted C₁₋₆, C₁₋₁₀, or C₁₋₂₀ alkyl group and R^{N1} is as defined herein). Exemplary unsubstituted acylamino groups include from 1 to 41 carbons (e.g., from 1 to 7, from 1 to 13, from 1 to 21, from 2 to 7, from 2 to 13, from 2 to 21, or from 2 to 41 carbons). In some embodiments, the alkyl group is further substituted with 1, 2, 3, or 4 substituents as described herein, and/or the amino group is —NH₂ or —N—R^{N1}, wherein R^{N1} is, independently, OH, NO₂, NH₂, NR^{N2}₂, SO₂OR^{N2}, SO₂R^{N2}, SOR^{N2}, alkyl, or aryl, and each R^{N2} can be H, alkyl, or aryl.

[0918] The term “acyloxy,” as used herein, represents an acyl group, as defined herein, attached to the parent molecular group though an oxygen atom (i.e., —O—C(O)—R, where R is H or an optionally substituted C₁₋₆, C₁₋₁₀, or C₁₋₂₀ alkyl group). Exemplary unsubstituted acyloxy groups include from 1 to 21 carbons (e.g., from 1 to 7 or from 1 to 11 carbons). In some embodiments, the alkyl group is further substituted with 1, 2, 3, or 4 substituents as described herein, and/or the amino group is —NH₂ or -M-R^{N1}, wherein R^{N1} is, independently, OH, NO₂, NH₂, NR^{N2}₂, SO₂OR^{N2}, SO₂R^{N2}, SOR^{N2}, alkyl, or aryl, and each R^{N2} can be H, alkyl, or aryl.

[0919] The term “alkaryl,” as used herein, represents an aryl group, as defined herein, attached to the parent molecular group through an alkylene group, as defined herein. Exemplary unsubstituted alkaryl groups are from 7 to 30 carbons (e.g., from 7 to 16 or from 7 to 20 carbons, such as C₁₋₆ alk-C₆₋₁₀ aryl, C₁₋₁₀ alk-C₆₋₁₀ aryl, or C₁₋₂₀ alk-C₆₋₁₀ aryl). In some embodiments, the alkylene and the aryl each can be further substituted with 1, 2, 3, or 4 substituent groups as defined herein for the respective groups. Other groups preceded by the prefix “alk-” are defined in the same manner, where “alk” refers to a C₁₋₆ alkylene, unless otherwise noted, and the attached chemical structure is as defined herein.

[0920] The term “alkcycloalkyl” represents a cycloalkyl group, as defined herein, attached to the parent molecular group through an alkylene group, as defined herein (e.g., an alkylene group of from 1 to 4, from 1 to 6, from 1 to 10, or form 1 to 20 carbons). In some embodiments, the alkylene and the cycloalkyl each can be further substituted with 1, 2, 3, or 4 substituent groups as defined herein for the respective group.

[0921] The term “alkenyl,” as used herein, represents monovalent straight or branched chain groups of, unless otherwise specified, from 2 to 20 carbons (e.g., from 2 to 6 or from 2 to 10 carbons) containing one or more carbon-carbon double bonds and is exemplified by ethenyl, 1-propenyl, 2-propenyl, 2-methyl-1-propenyl, 1-butenyl, 2-butenyl, and the like. Alkenyls include both cis and trans isomers. Alkenyl groups may be optionally substituted with 1, 2, 3, or 4 substituent groups that are selected, independently, from amino, aryl, cycloalkyl, or heterocyclyl (e.g., heteroaryl), as defined herein, or any of the exemplary alkyl substituent groups described herein.

[0922] The term “alkenyloxy” represents a chemical substituent of formula —OR, where R is a C₂₋₂₀ alkenyl group (e.g., C₂₋₆ or C₂₋₁₀ alkenyl), unless otherwise specified. Exemplary alkenyloxy groups include ethenyloxy, propenyloxy, and the like. In some embodiments, the alkenyl group can be further substituted with 1, 2, 3, or 4 substituent groups as defined herein (e.g., a hydroxy group).

[0923] The term “alkheteroaryl” refers to a heteroaryl group, as defined herein, attached to the parent molecular group through an alkylene group, as defined herein. Exemplary unsubstituted alkheteroaryl groups are from 2 to 32 carbons (e.g., from 2 to 22, from 2 to 18, from 2 to 17, from 2 to 16, from 3 to 15, from 2 to 14, from 2 to 13, or from 2 to 12 carbons, such as C₁₋₆ alk-C₁₋₁₂ heteroaryl, C₁₋₁₀ alk-C₁₋₁₂ heteroaryl, or C₁₋₂₀ alk-C₁₋₁₂ heteroaryl). In some embodiments, the alkylene and the heteroaryl each can be further substituted with 1, 2, 3, or 4 substituent groups as defined herein for the respective group. Alkheteroaryl groups are a subset of alkheterocyclyl groups.

[0924] The term “alkheterocyclyl” represents a heterocyclyl group, as defined herein, attached to the parent molecular group through an alkylene group, as defined herein. Exemplary unsubstituted alkheterocyclyl groups are from 2 to 32 carbons (e.g., from 2 to 22, from 2 to 18, from 2 to 17, from 2 to 16, from 3 to 15, from 2 to 14, from 2 to 13, or from 2 to 12 carbons, such as C₁₋₆ alk-C₁₋₁₂ heterocyclyl, C₁₋₁₀ alk-C₁₋₁₂ heterocyclyl, or C₁₋₂₀ alk-C₁₋₁₂ heterocyclyl). In some embodiments, the alkylene and the heterocyclyl each can be further substituted with 1, 2, 3, or 4 substituent groups as defined herein for the respective group.

[0925] The term “alkoxy” represents a chemical substituent of formula —OR, where R is a C₁₋₂₀ alkyl group (e.g., C₁₋₆ or C₁₋₁₀ alkyl), unless otherwise specified. Exemplary alkoxy groups include methoxy, ethoxy, propoxy (e.g., n-propoxy and isopropoxy), t-butoxy, and the like. In some embodiments, the alkyl group can be further substituted with 1, 2, 3, or 4 substituent groups as defined herein (e.g., hydroxy or alkoxy).

[0926] The term “alkoxyalkoxy” represents an alkoxy group that is substituted with an alkoxy group. Exemplary unsubstituted alkoxyalkoxy groups include between 2 to 40 carbons (e.g., from 2 to 12 or from 2 to 20 carbons, such as C₁₋₆ alkoxy-C₁₋₆ alkoxy, C₁₋₁₀ alkoxy-C₁₋₁₀ alkoxy, or C₁₋₂₀ alkoxy-C₁₋₂₀ alkoxy). In some embodiments, the each alkoxy group can be further substituted with 1, 2, 3, or 4 substituent groups as defined herein.

[0927] The term “alkoxyalkyl” represents an alkyl group that is substituted with an alkoxy group. Exemplary unsubstituted alkoxyalkyl groups include between 2 to 40 carbons (e.g., from 2 to 12 or from 2 to 20 carbons, such as C₁₋₆ alkoxy-C₁₋₆ alkyl, C₁₋₁₀ alkoxy-C₁₋₁₀ alkyl, or C₁₋₂₀ alkoxy-C₁₋₂₀ alkyl). In some embodiments, the alkyl and the alkoxy each can be further substituted with 1, 2, 3, or 4 substituent groups as defined herein for the respective group.

[0928] The term “alkoxycarbonyl,” as used herein, represents an alkoxy, as defined herein, attached to the parent molecular group through a carbonyl atom (e.g., —C(O)—OR, where R is H or an optionally substituted C₁₋₆, C₁₋₁₀, or C₁₋₂₀ alkyl group). Exemplary unsubstituted alkoxycarbonyl include from 1 to 21 carbons (e.g., from 1 to 11 or from 1 to 7 carbons). In some embodiments, the alkoxy group is further substituted with 1, 2, 3, or 4 substituents as described herein.

[0929] The term “alkoxycarbonylalkoxy,” as used herein, represents an alkoxy group, as defined herein, that is substituted with an alkoxycarbonyl group, as defined herein (e.g., —O-alkyl-C(O)—OR, where R is an optionally substituted C₁₋₆, C₁₋₁₀, or C₁₋₂₀ alkyl group). Exemplary unsubstituted alkoxycarbonylalkoxy include from 3 to 41 carbons (e.g., from 3 to 10, from 3 to 13, from 3 to 17, from 3 to 21, or from 3 to 31 carbons, such as C₁₋₆ alkoxycarbonyl-C₁₋₆ alkoxy, C₁₋₁₀ alkoxycarbonyl-C₁₋₁₀ alkoxy, or C₁₋₂₀ alkoxycarbonyl-C₁₋₂₀ alkoxy). In some embodiments, each alkoxy group is further independently substituted with 1, 2, 3, or 4 substituents, as described herein (e.g., a hydroxy group).

[0930] The term “alkoxycarbonylalkyl,” as used herein, represents an alkyl group, as defined herein, that is substituted with an alkoxycarbonyl group, as defined herein (e.g., -alkyl-C(O)—OR, where R is an optionally substituted C₁₋₂₀, C₁₋₁₀, or C₁₋₆ alkyl group). Exemplary unsubstituted alkoxycarbonylalkyl include from 3 to 41 carbons (e.g., from 3 to 10, from 3 to 13, from 3 to 17, from 3 to 21, or from 3 to 31 carbons, such as C₁₋₆ alkoxycarbonyl-C₁₋₆ alkyl, C₁₋₁₀ alkoxycarbonyl-C₁₋₁₀ alkyl, or C₁₋₂₀ alkoxycarbonyl-C₁₋₂₀ alkyl). In some embodiments, each alkyl and alkoxy group is further independently substituted with 1, 2, 3, or 4 substituents as described herein (e.g., a hydroxy group).

[0931] The term “alkyl,” as used herein, is inclusive of both straight chain and branched chain saturated groups from 1 to 20 carbons (e.g., from 1 to 10 or from 1 to 6), unless otherwise specified. Alkyl groups are exemplified by methyl, ethyl, n- and iso-propyl, n-, sec-, iso- and tert-butyl, neopentyl, and the like, and may be optionally substituted with one, two, three, or, in the case of alkyl groups of two carbons or more, four substituents independently selected from the group consisting of: (1) C₁₋₆ alkoxy; (2) C₁₋₆ alkylsulfinyl; (3) amino, as defined herein (e.g., unsubstituted amino (i.e., —NH₂) or a substituted amino (i.e., —N(R^{N1})₂, where R^{N1} is as defined for amino); (4) C₆₋₁₀ aryl-C₁₋₆ alkoxy; (5) azido; (6) halo; (7) (C₂₋₉ heterocyclyl)oxy; (8) hydroxy; (9) nitro; (10) oxo (e.g., carboxyaldehyde or acyl); (11) C₁₋₇ spirocyclyl; (12) thioalkoxy; (13) thiol; (14) —CO₂R^{A′}, where R^{A′} is selected from the group consisting of (a) C₁₋₂₀ alkyl (e.g., C₁₋₆ alkyl), (b) C₂₋₂₀ alkenyl (e.g., C₂₋₆ alkenyl), (c) C₆₋₁₀ aryl, (d) hydrogen, (e) C₁₋₆ alk-C₆₋₁₀ aryl, (f) amino-C₁₋₂₀ alkyl, (g) polyethylene glycol of —(CH₂)ₛ₂(OCH₂CH₂)ₛ₁(CH₂)ₛ₃OR′, wherein s1 is an integer from 1 to 10 (e.g., from 1 to 6 or from 1 to 4), each of s2 and s3, independently, is an integer from 0 to 10 (e.g., from 0 to 4, from 0 to 6, from 1 to 4, from 1 to 6, or from 1 to 10), and R′ is H or C₁₋₂₀ alkyl, and (h) amino-polyethylene glycol of —NR^{N1}(CH₂)ₛ₂(CH₂CH₂O)ₛ₁(CH₂)ₛ₃NR^{N1}, wherein s1 is an integer from 1 to 10 (e.g., from 1 to 6 or from 1 to 4), each of s2 and s3, independently, is an integer from 0 to 10 (e.g., from 0 to 4, from 0 to 6, from 1 to 4, from 1 to 6, or from 1 to 10), and each R^{N1} is, independently, hydrogen or optionally substituted C₁₋₆ alkyl; (15) —C(O)NR^{B′}R^{C′}, where each of R^{B′} and R^{C′} is, independently, selected from the group consisting of (a) hydrogen, (b) C₁₋₆ alkyl, (c) C₆₋₁₀ aryl, and (d) C₁₋₆ alk-C₁₋₁₀ aryl; (16) —SO₂R^{D′}, where R^{D′} is selected from the group consisting of (a) C₁₋₆ alkyl, (b) C₆₋₁₀ aryl, (c) C₁₋₆ alk-C₆₋₁₀ aryl, and (d) hydroxy; (17) —SO₂NR^{E′}R^{F′}, where each of R^{E′} and R^{F′} is, independently, selected from the group consisting of (a) hydrogen, (b) C₁₋₆ alkyl, (c) C₆₋₁₀ aryl and (d) C₁₋₆ alk-C₆₋₁₀ aryl; (18) —C(O)R^{G′}, where R^{G′} is selected from the group consisting of (a) C₁₋₂₀ alkyl (e.g., C₁₋₆ alkyl), (b) C₂₋₂₀ alkenyl (e.g., C₂₋₆ alkenyl), (c) C₆₋₁₀ aryl, (d) hydrogen, (e) C₁₋₆ alk-C₆₋₁₀ aryl, (f) amino-C₁₋₂₀ alkyl, (g) polyethylene glycol of —(CH₂)ₛ₂(OCH₂CH₂)ₛ₁(CH₂)ₛ₃OR′, wherein s1 is an integer from 1 to 10 (e.g., from 1 to 6 or from 1 to 4), each of s2 and s3, independently, is an integer from 0 to 10 (e.g., from 0 to 4, from 0 to 6, from 1 to 4, from 1 to 6, or from 1 to 10), and R′ is H or C₁₋₂₀ alkyl, and (h) amino-polyethylene glycol of —NR^{N1}(CH₂)ₛ₂(CH₂CH₂O)ₛ₁(CH₂)ₛ₃NR^{N1}, wherein s1 is an integer from 1 to 10 (e.g., from 1 to 6 or from 1 to 4), each of s2 and s3, independently, is an integer from 0 to 10 (e.g., from 0 to 4, from 0 to 6, from 1 to 4, from 1 to 6, or from 1 to 10), and each R^{N1} is, independently, hydrogen or optionally substituted C₁₋₆ alkyl; (19) —NR^{H′}C(O)R^{I′}, wherein R^{H′} is selected from the group consisting of (a1) hydrogen and (b1) C₁₋₆ alkyl, and R′ is selected from the group consisting of (a2) C₁₋₂₀ alkyl (e.g., C₁₋₆ alkyl), (b2) C₂₋₂₀ alkenyl (e.g., C₂₋₆ alkenyl), (c2) C₆₋₁₀ aryl, (d2) hydrogen, (e2) C₁₋₆ alk-C₁₋₁₀ aryl, (f2) amino-C₁₋₂₀ alkyl, (g2) polyethylene glycol of —(CH₂)ₛ₂(OCH₂CH₂)ₛ₁(CH₂)ₛ₃OR′, wherein s1 is an integer from 1 to 10 (e.g., from 1 to 6 or from 1 to 4), each of s2 and s3, independently, is an integer from 0 to 10 (e.g., from 0 to 4, from 0 to 6, from 1 to 4, from 1 to 6, or from 1 to 10), and R′ is H or C₁₋₂₀ alkyl, and (h2) amino-polyethylene glycol of —NR^{N1}(CH₂)ₛ₂(CH₂CH₂O)ₛ₁(CH₂)ₛ₃NR^{N1}, wherein s1 is an integer from 1 to 10 (e.g., from 1 to 6 or from 1 to 4), each of s2 and s3, independently, is an integer from 0 to 10 (e.g., from 0 to 4, from 0 to 6, from 1 to 4, from 1 to 6, or from 1 to 10), and each R^{N1} is, independently, hydrogen or optionally substituted C₁₋₆ alkyl; (20) —NR^{J′}C(O)OR^{K′}, wherein R^{J′} is selected from the group consisting of (a1) hydrogen and (b1) C₁₋₆ alkyl, and R^{K′} is selected from the group consisting of (a2) C₁₋₂₀ alkyl (e.g., C₁₋₆ alkyl), (b2) C₂₋₂₀ alkenyl (e.g., C₂₋₆ alkenyl), (c2) C₆₋₁₀ aryl, (d2) hydrogen, (e2) C₁₋₆ alk-C₁₋₁₀ aryl, (f2) amino-C₁₋₂₀ alkyl, (g2) polyethylene glycol of —(CH₂)ₛ₂(OCH₂CH₂)ₛ₁(CH₂)ₛ₃OR′, wherein s1 is an integer from 1 to 10 (e.g., from 1 to 6 or from 1 to 4), each of s2 and s3, independently, is an integer from 0 to 10 (e.g., from 0 to 4, from 0 to 6, from 1 to 4, from 1 to 6, or from 1 to 10), and R′ is H or C₁₋₂₀ alkyl, and (h2) amino-polyethylene glycol of —NR^{N1}(CH₂)ₛ₂(CH₂CH₂O)ₛ₁(CH₂)ₛ₃NR^{N1}, wherein s1 is an integer from 1 to 10 (e.g., from 1 to 6 or from 1 to 4), each of s2 and s3, independently, is an integer from 0 to 10 (e.g., from 0 to 4, from 0 to 6, from 1 to 4, from 1 to 6, or from 1 to 10), and each R^{N1} is, independently, hydrogen or optionally substituted C₁₋₆ alkyl; and (21) amidine. In some embodiments, each of these groups can be further substituted as described herein. For example, the alkylene group of a C₁-alkaryl can be further substituted with an oxo group to afford the respective aryloyl substituent.

[0932] The term “alkylene” and the prefix “alk-,” as used herein, represent a saturated divalent hydrocarbon group derived from a straight or branched chain saturated hydrocarbon by the removal of two hydrogen atoms, and is exemplified by methylene, ethylene, isopropylene, and the like. The term “C_{x-y} alkylene” and the prefix “C_{x-y} alk-” represent alkylene groups having between x and y carbons. Exemplary values for x are 1, 2, 3, 4, 5, and 6, and exemplary values for y are 2, 3, 4, 5, 6, 7, 8, 9, 10, 12, 14, 16, 18, or 20 (e.g., C₁₋₆, C₁₋₁₀, C₂₋₂₀, C₂₋₆, C₂₋₁₀, or C₂₋₂₀ alkylene). In some embodiments, the alkylene can be further substituted with 1, 2, 3, or 4 substituent groups as defined herein for an alkyl group.

[0933] The term “alkylsulfinyl,” as used herein, represents an alkyl group attached to the parent molecular group through an —S(O)— group. Exemplary unsubstituted alkylsulfinyl groups are from 1 to 6, from 1 to 10, or from 1 to 20 carbons. In some embodiments, the alkyl group can be further substituted with 1, 2, 3, or 4 substituent groups as defined herein.

[0934] The term “alkylsulfinylalkyl,” as used herein, represents an alkyl group, as defined herein, substituted by an alkylsulfinyl group. Exemplary unsubstituted alkylsulfinylalkyl groups are from 2 to 12, from 2 to 20, or from 2 to 40 carbons. In some embodiments, each alkyl group can be further substituted with 1, 2, 3, or 4 substituent groups as defined herein.

[0935] The term “alkynyl,” as used herein, represents monovalent straight or branched chain groups from 2 to 20 carbon atoms (e.g., from 2 to 4, from 2 to 6, or from 2 to 10 carbons) containing a carbon-carbon triple bond and is exemplified by ethynyl, 1-propynyl, and the like. Alkynyl groups may be optionally substituted with 1, 2, 3, or 4 substituent groups that are selected, independently, from aryl, cycloalkyl, or heterocyclyl (e.g., heteroaryl), as defined herein, or any of the exemplary alkyl substituent groups described herein.

[0936] The term “alkynyloxy” represents a chemical substituent of formula —OR, where R is a C₂₋₂₀ alkynyl group (e.g., C₂₋₆ or C₂₋₁₀ alkynyl), unless otherwise specified. Exemplary alkynyloxy groups include ethynyloxy, propynyloxy, and the like. In some embodiments, the alkynyl group can be further substituted with 1, 2, 3, or 4 substituent groups as defined herein (e.g., a hydroxy group).

[0937] The term “amidine,” as used herein, represents a —C(═NH)NH₂ group.

[0938] The term “amino,” as used herein, represents —N(R^{N1})₂, wherein each R^{N1} is, independently, H, OH, NO₂, N(R^{N2})₂, SO₂OR^{N2}, SO₂R^{N2}, SOR^{N2}, an N-protecting group, alkyl, alkenyl, alkynyl, alkoxy, aryl, alkaryl, cycloalkyl, alkcycloalkyl, carboxyalkyl, sulfoalkyl, heterocyclyl (e.g., heteroaryl), or alkheterocyclyl (e.g., alkheteroaryl), wherein each of these recited R^{N1} groups can be optionally substituted, as defined herein for each group; or two R^{N1} combine to form a heterocyclyl or an N-protecting group, and wherein each R^{N2} is, independently, H, alkyl, or aryl. The amino groups of the invention can be an unsubstituted amino (i.e., —NH₂) or a substituted amino (i.e., —N(R^{N1})₂). In a preferred embodiment, amino is —NH₂ or —NR^{N1}, wherein R^{N1} is, independently, OH, NO₂, NH₂, NR^{N2}₂, SO₂OR^{N2}, SO₂R^{N2}, SOR^{N2}, alkyl, carboxyalkyl, sulfoalkyl, or aryl, and each R^{N2} can be H, C₁₋₂₀ alkyl (e.g., C₁₋₆ alkyl), or C₆₋₁₀ aryl.

[0939] The term “amino acid,” as described herein, refers to a molecule having a side chain, an amino group, and an acid group (e.g., a carboxy group of —CO₂H or a sulfo group of —SO₃H), wherein the amino acid is attached to the parent molecular group by the side chain, amino group, or acid group (e.g., the side chain). In some embodiments, the amino acid is attached to the parent molecular group by a carbonyl group, where the side chain or amino group is attached to the carbonyl group. Exemplary side chains include an optionally substituted alkyl, aryl, heterocyclyl, alkaryl, alkheterocyclyl, aminoalkyl, carbamoylalkyl, and carboxyalkyl. Exemplary amino acids include alanine, arginine, asparagine, aspartic acid, cysteine, glutamic acid, glutamine, glycine, histidine, hydroxynorvaline, isoleucine, leucine, lysine, methionine, norvaline, ornithine, phenylalanine, proline, pyrrolysine, selenocysteine, serine, taurine, threonine, tryptophan, tyrosine, and valine. Amino acid groups may be optionally substituted with one, two, three, or, in the case of amino acid groups of two carbons or more, four substituents independently selected from the group consisting of: (1) C₁₋₆ alkoxy; (2) C₁₋₆ alkylsulfinyl; (3) amino, as defined herein (e.g., unsubstituted amino (i.e., —NH₂) or a substituted amino (i.e., —N(R^{N1})₂, where R^{N1} is as defined for amino); (4) C₆₋₁₀ aryl-C₁₋₆ alkoxy; (5) azido; (6) halo; (7) (C₂₋₉ heterocyclyl)oxy; (8) hydroxy; (9) nitro; (10) oxo (e.g., carboxyaldehyde or acyl); (11) C₁₋₇ spirocyclyl; (12) thioalkoxy; (13) thiol; (14) —CO₂R^{A′}, where R^{A′} is selected from the group consisting of (a) C₁₋₂₀ alkyl (e.g., C₁₋₆ alkyl), (b) C₂₋₂₀ alkenyl (e.g., C₂₋₆ alkenyl), (c) C₆₋₁₀ aryl, (d) hydrogen, (e) C₁₋₆ alk-C₆₋₁₀ aryl, (f) amino-C₁₋₂₀ alkyl, (g) polyethylene glycol of —(CH₂)ₛ₂(OCH₂CH₂)ₛ₁(CH₂)ₛ₃OR′, wherein s1 is an integer from 1 to 10 (e.g., from 1 to 6 or from 1 to 4), each of s2 and s3, independently, is an integer from 0 to 10 (e.g., from 0 to 4, from 0 to 6, from 1 to 4, from 1 to 6, or from 1 to 10), and R′ is H or C₁₋₂₀ alkyl, and (h) amino-polyethylene glycol of —NR^{N1}(CH₂)ₛ₂(CH₂CH₂O)ₛ₁(CH₂)ₛ₃NR^{N1}, wherein s1 is an integer from 1 to 10 (e.g., from 1 to 6 or from 1 to 4), each of s2 and s3, independently, is an integer from 0 to 10 (e.g., from 0 to 4, from 0 to 6, from 1 to 4, from 1 to 6, or from 1 to 10), and each R^{N1} is, independently, hydrogen or optionally substituted C₁₋₆ alkyl; (15) —C(O)NR^{B′}R^{C′}, where each of R^{B′} and R^{C′} is, independently, selected from the group consisting of (a) hydrogen, (b) C₁₋₆ alkyl, (c) C₆₋₁₀ aryl, and (d) C₁₋₆ alk-C₁₋₁₀ aryl; (16) —SO₂R^{D′}, where R^{D′} is selected from the group consisting of (a) C₁₋₆ alkyl, (b) C₆₋₁₀ aryl, (c) C₁₋₆ alk-C₆₋₁₀ aryl, and (d) hydroxy; (17) —SO₂NR^{E′}R^{F′}, where each of R^{E′} and R^{F′} is, independently, selected from the group consisting of (a) hydrogen, (b) C₁₋₆ alkyl, (c) C₆₋₁₀ aryl and (d) C₁₋₆ alk-C₆₋₁₀ aryl; (18) —C(O)R^{G′}, where R^{G′} is selected from the group consisting of (a) C₁₋₂₀ alkyl (e.g., C₁₋₆ alkyl), (b) C₂₋₂₀ alkenyl (e.g., C₂₋₆ alkenyl), (c) C₆₋₁₀ aryl, (d) hydrogen, (e) C₁₋₆ alk-C₆₋₁₀ aryl, (f) amino-C₁₋₂₀ alkyl, (g) polyethylene glycol of —(CH₂)ₛ₂(OCH₂CH₂)ₛ₁(CH₂)ₛ₃OR′, wherein s1 is an integer from 1 to 10 (e.g., from 1 to 6 or from 1 to 4), each of s2 and s3, independently, is an integer from 0 to 10 (e.g., from 0 to 4, from 0 to 6, from 1 to 4, from 1 to 6, or from 1 to 10), and R′ is H or C₁₋₂₀ alkyl, and (h) amino-polyethylene glycol of —NR^{N1}(CH₂)ₛ₂(CH₂CH₂O)ₛ₁(CH₂)ₛ₃NR^{N1}, wherein s1 is an integer from 1 to 10 (e.g., from 1 to 6 or from 1 to 4), each of s2 and s3, independently, is an integer from 0 to 10 (e.g., from 0 to 4, from 0 to 6, from 1 to 4, from 1 to 6, or from 1 to 10), and each R^{N1} is, independently, hydrogen or optionally substituted C₁₋₆ alkyl; (19) —NR^{H′}C(O)R^{I′}, wherein R^{H′} is selected from the group consisting of (a1) hydrogen and (b1) C₁₋₆ alkyl, and R^{H′} is selected from the group consisting of (a2) C₁₋₂₀ alkyl (e.g., C₁₋₆ alkyl), (b2) C₂₋₂₀ alkenyl (e.g., C₂₋₆ alkenyl), (c2) C₆₋₁₀ aryl, (d2) hydrogen, (e2) C₁₋₆ alk-C₁₋₁₀ aryl, (f2) amino-C₁₋₂₀ alkyl, (g2) polyethylene glycol of —(CH₂)ₛ₂(OCH₂CH₂)ₛ₁(CH₂)ₛ₃OR′, wherein s1 is an integer from 1 to 10 (e.g., from 1 to 6 or from 1 to 4), each of s2 and s3, independently, is an integer from 0 to 10 (e.g., from 0 to 4, from 0 to 6, from 1 to 4, from 1 to 6, or from 1 to 10), and R′ is H or C₁₋₂₀ alkyl, and (h2) amino-polyethylene glycol of —NR^{N1}(CH₂)ₛ₂(CH₂CH₂O)ₛ₁(CH₂)ₛ₃NR^{N1}, wherein s1 is an integer from 1 to 10 (e.g., from 1 to 6 or from 1 to 4), each of s2 and s3, independently, is an integer from 0 to 10 (e.g., from 0 to 4, from 0 to 6, from 1 to 4, from 1 to 6, or from 1 to 10), and each R^{N}1 is, independently, hydrogen or optionally substituted C₁₋₆ alkyl; (20) —NR^{J′}C(O)OR^{K′}, wherein R^{J′} is selected from the group consisting of (a1) hydrogen and (b1) C₁₋₆ alkyl, and R^{K′} is selected from the group consisting of (a2) C₁₋₂₀ alkyl (e.g., C₁₋₆ alkyl), (b2) C₂₋₂₀ alkenyl (e.g., C₂₋₆ alkenyl), (c2) C₆₋₁₀ aryl, (d2) hydrogen, (e2) C₁₋₆ alk-C₁₋₁₀ aryl, (f2) amino-C₁₋₂₀ alkyl, (g2) polyethylene glycol of —(CH₂)ₛ₂(OCH₂CH₂)ₛ₁(CH₂)ₛ₃OR′, wherein s1 is an integer from 1 to 10 (e.g., from 1 to 6 or from 1 to 4), each of s2 and s3, independently, is an integer from 0 to 10 (e.g., from 0 to 4, from 0 to 6, from 1 to 4, from 1 to 6, or from 1 to 10), and R′ is H or C₁₋₂₀ alkyl, and (h2) amino-polyethylene glycol of —NR^{N1}(CH₂)ₛ₂(CH₂CH₂O)ₛ₁(CH₂)ₛ₃NR^{N1}, wherein s1 is an integer from 1 to 10 (e.g., from 1 to 6 or from 1 to 4), each of s2 and s3, independently, is an integer from 0 to 10 (e.g., from 0 to 4, from 0 to 6, from 1 to 4, from 1 to 6, or from 1 to 10), and each R^{N1} is, independently, hydrogen or optionally substituted C₁₋₆ alkyl; and (21) amidine. In some embodiments, each of these groups can be further substituted as described herein.

[0940] The term “aminoalkoxy,” as used herein, represents an alkoxy group, as defined herein, substituted by an amino group, as defined herein. The alkyl and amino each can be further substituted with 1, 2, 3, or 4 substituent groups as described herein for the respective group (e.g., CO₂R^{A′}, where R^{A′} is selected from the group consisting of (a) C₁₋₆ alkyl, (b) C₆₋₁₀ aryl, (c) hydrogen, and (d) C₁₋₆ alk-C₁₋₁₀ aryl, e.g., carboxy).

[0941] The term “aminoalkyl,” as used herein, represents an alkyl group, as defined herein, substituted by an amino group, as defined herein. The alkyl and amino each can be further substituted with 1, 2, 3, or 4 substituent groups as described herein for the respective group (e.g., CO₂R^{A′}, where R^{A′} is selected from the group consisting of (a) C₁₋₆ alkyl, (b) C₆₋₁₀ aryl, (c) hydrogen, and (d) C₁₋₆ alk-C₆₋₁₀ aryl, e.g., carboxy).

[0942] The term “aryl,” as used herein, represents a mono-, bicyclic, or multicyclic carbocyclic ring system having one or two aromatic rings and is exemplified by phenyl, naphthyl, 1,2-dihydronaphthyl, 1,2,3,4-tetrahydronaphthyl, anthracenyl, phenanthrenyl, fluorenyl, indanyl, indenyl, and the like, and may be optionally substituted with 1, 2, 3, 4, or 5 substituents independently selected from the group consisting of: (1) C₁₋₇ acyl (e.g., carboxyaldehyde); (2) C₁₋₂₀ alkyl (e.g., C₁₋₆ alkyl, C₁₋₆ alkoxy-C₁₋₆ alkyl, C₁₋₆ alkylsulfinyl-C₁₋₆ alkyl, amino-C₁₋₆ alkyl, azido-C₁₋₆ alkyl, (carboxyaldehyde)-C₁₋₆ alkyl, halo-C₁₋₆ alkyl (e.g., perfluoroalkyl), hydroxy-C₁₋₆ alkyl, nitro-C₁₋₆ alkyl, or C₁₋₆ thioalkoxy-C₁₋₆ alkyl); (3) C₁₋₂₀ alkoxy (e.g., C₁₋₆ alkoxy, such as perfluoroalkoxy); (4) C₁₋₆ alkylsulfinyl; (5) C₆₋₁₀ aryl; (6) amino; (7) C₁₋₆ alk-C₆₋₁₀ aryl; (8) azido; (9) C₃₋₈ cycloalkyl; (10) C₁₋₆ alk-C₃₋₈ cycloalkyl; (11) halo; (12) C₁₋₁₂ heterocyclyl (e.g., C₁₋₁₂ heteroaryl); (13) (C₁₋₁₂ heterocyclyl)oxy; (14) hydroxy; (15) nitro; (16) C₁₋₂₀ thioalkoxy (e.g., C₁₋₆ thioalkoxy); (17) —(CH₂)_{q}CO₂R^{A′}, where q is an integer from zero to four, and R^{A′} is selected from the group consisting of (a) C₁₋₆ alkyl, (b) C₆₋₁₀ aryl, (c) hydrogen, and (d) C₁₋₆ alk-C₆₋₁₀ aryl; (18) —(CH₂)_{q}CONR^{B′}R^{C′}, where q is an integer from zero to four and where R^{B′} and R^{C′} are independently selected from the group consisting of (a) hydrogen, (b) C₁₋₆ alkyl, (c) C₆₋₁₀ aryl, and (d) C₁₋₆ alk-C₆₋₁₀ aryl; (19) —(CH₂)_{q}SO₂R^{D′}, where q is an integer from zero to four and where R^{D′} is selected from the group consisting of (a) alkyl, (b) C₆₋₁₀ aryl, and (c) alk-C₆₋₁₀ aryl; (20) —(CH₂)_{q}SO₂NR^{E′}R^{F′}, where q is an integer from zero to four and where each of R^{E′} and R^{F′} is, independently, selected from the group consisting of (a) hydrogen, (b) C₁₋₆ alkyl, (c) C₆₋₁₀ aryl, and (d) C₁₋₆ alk-C₆₋₁₀ aryl; (21) thiol; (22) C₆₋₁₀ aryloxy; (23) C₃₋₈ cycloalkoxy; (24) C₆₋₁₀ aryl-C₁₋₆ alkoxy; (25) C₁₋₆ alk-C₁₋₁₂ heterocyclyl (e.g., C₁₋₆ alk-C₁₋₁₂ heteroaryl); (26) C₂₋₂₀ alkenyl; and (27) C₂₋₂₀ alkynyl. In some embodiments, each of these groups can be further substituted as described herein. For example, the alkylene group of a C₁-alkaryl or a C₁-alkheterocyclyl can be further substituted with an oxo group to afford the respective aryloyl and (heterocyclyl)oyl substituent group.

[0943] The term “arylalkoxy,” as used herein, represents an alkaryl group, as defined herein, attached to the parent molecular group through an oxygen atom. Exemplary unsubstituted alkoxyalkyl groups include from 7 to 30 carbons (e.g., from 7 to 16 or from 7 to 20 carbons, such as C₆₋₁₀ aryl-C₁₋₆ alkoxy, C₆₋₁₀ aryl-C₁₋₁₀ alkoxy, or C₆₋₁₀ aryl-C₁₋₂₀ alkoxy). In some embodiments, the arylalkoxy group can be substituted with 1, 2, 3, or 4 substituents as defined herein

[0944] The term “aryloxy” represents a chemical substituent of formula —OR′, where R′ is an aryl group of 6 to 18 carbons, unless otherwise specified. In some embodiments, the aryl group can be substituted with 1, 2, 3, or 4 substituents as defined herein.

[0945] The term “aryloyl,” as used herein, represents an aryl group, as defined herein, that is attached to the parent molecular group through a carbonyl group. Exemplary unsubstituted aryloyl groups are of 7 to 11 carbons. In some embodiments, the aryl group can be substituted with 1, 2, 3, or 4 substituents as defined herein.

[0946] The term “azido” represents an —N₃ group, which can also be represented as —N═N═N.

[0947] The term “bicyclic,” as used herein, refer to a structure having two rings, which may be aromatic or non-aromatic. Bicyclic structures include spirocyclyl groups, as defined herein, and two rings that share one or more bridges, where such bridges can include one atom or a chain including two, three, or more atoms. Exemplary bicyclic groups include a bicyclic carbocyclyl group, where the first and second rings are carbocyclyl groups, as defined herein; a bicyclic aryl groups, where the first and second rings are aryl groups, as defined herein; bicyclic heterocyclyl groups, where the first ring is a heterocyclyl group and the second ring is a carbocyclyl (e.g., aryl) or heterocyclyl (e.g., heteroaryl) group; and bicyclic heteroaryl groups, where the first ring is a heteroaryl group and the second ring is a carbocyclyl (e.g., aryl) or heterocyclyl (e.g., heteroaryl) group. In some embodiments, the bicyclic group can be substituted with 1, 2, 3, or 4 substituents as defined herein for cycloalkyl, heterocyclyl, and aryl groups.

[0948] The terms “carbocyclic” and “carbocyclyl,” as used herein, refer to an optionally substituted C₃₋₁₂ monocyclic, bicyclic, or tricyclic structure in which the rings, which may be aromatic or non-aromatic, are formed by carbon atoms. Carbocyclic structures include cycloalkyl, cycloalkenyl, and aryl groups.

[0949] The term “carbamoyl,” as used herein, represents —C(O)—N(R^{N1})₂, where the meaning of each R^{N1} is found in the definition of “amino” provided herein.

[0950] The term “carbamoylalkyl,” as used herein, represents an alkyl group, as defined herein, substituted by a carbamoyl group, as defined herein. The alkyl group can be further substituted with 1, 2, 3, or 4 substituent groups as described herein.

[0951] The term “carbamyl,” as used herein, refers to a carbamate group having the structure —NR^{N1}C(═O)OR or —OC(═O)N(R^{N1})₂, where the meaning of each R^{N1} is found in the definition of “amino” provided herein, and R is alkyl, cycloalkyl, alkcycloalkyl, aryl, alkaryl, heterocyclyl (e.g., heteroaryl), or alkheterocyclyl (e.g., alkheteroaryl), as defined herein.

[0952] The term “carbonyl,” as used herein, represents a C(O) group, which can also be represented as C═O.

[0953] The term “carboxyaldehyde” represents an acyl group having the structure —CHO.

[0954] The term “carboxy,” as used herein, means —CO₂H.

[0955] The term “carboxyalkoxy,” as used herein, represents an alkoxy group, as defined herein, substituted by a carboxy group, as defined herein. The alkoxy group can be further substituted with 1, 2, 3, or 4 substituent groups as described herein for the alkyl group.

[0956] The term “carboxyalkyl,” as used herein, represents an alkyl group, as defined herein, substituted by a carboxy group, as defined herein. The alkyl group can be further substituted with 1, 2, 3, or 4 substituent groups as described herein.

[0957] The term “cyano,” as used herein, represents an —CN group.

[0958] The term “cycloalkoxy” represents a chemical substituent of formula —OR, where R is a C₃₋₈ cycloalkyl group, as defined herein, unless otherwise specified. The cycloalkyl group can be further substituted with 1, 2, 3, or 4 substituent groups as described herein. Exemplary unsubstituted cycloalkoxy groups are from 3 to 8 carbons. In some embodiment, the cycloalkyl group can be further substituted with 1, 2, 3, or 4 substituent groups as described herein.

[0959] The term “cycloalkyl,” as used herein represents a monovalent saturated or unsaturated non-aromatic cyclic hydrocarbon group from three to eight carbons, unless otherwise specified, and is exemplified by cyclopropyl, cyclobutyl, cyclopentyl, cyclohexyl, cycloheptyl, bicyclo[2.2.1.]heptyl, and the like. When the cycloalkyl group includes one carbon-carbon double bond, the cycloalkyl group can be referred to as a “cycloalkenyl” group. Exemplary cycloalkenyl groups include cyclopentenyl, cyclohexenyl, and the like. The cycloalkyl groups of this invention can be optionally substituted with: (1) C₁₋₇ acyl (e.g., carboxyaldehyde); (2) C₁₋₂₀ alkyl (e.g., C₁₋₆ alkyl, C₁₋₆ alkoxy-C₁₋₆ alkyl, C₁₋₆ alkylsulfinyl-C₁₋₆ alkyl, amino-C₁₋₆ alkyl, azido-C₁₋₆ alkyl, (carboxyaldehyde)-C₁₋₆ alkyl, halo-C₁₋₆ alkyl (e.g., perfluoroalkyl), hydroxy-C₁₋₆ alkyl, nitro-C₁₋₆ alkyl, or C₁₋₆ thioalkoxy-C₁₋₆ alkyl); (3) C₁₋₂₀ alkoxy (e.g., C₁₋₆ alkoxy, such as perfluoroalkoxy); (4) C₁₋₆ alkylsulfinyl; (5) C₆₋₁₀ aryl; (6) amino; (7) C₁₋₆ alk-C₆₋₁₀ aryl; (8) azido; (9) C₃₋₈ cycloalkyl; (10) C₁₋₆ alk-C₃₋₈ cycloalkyl; (11) halo; (12) C₁₋₁₂ heterocyclyl (e.g., C₁₋₁₂ heteroaryl); (13) (C₁₋₁₂ heterocyclyl)oxy; (14) hydroxy; (15) nitro; (16) C₁₋₂₀ thioalkoxy (e.g., C₁₋₆ thioalkoxy); (17) —(CH₂)_{q}CO₂R^{A′}, where q is an integer from zero to four, and R^{A′} is selected from the group consisting of (a) C₁₋₆ alkyl, (b) C₆₋₁₀ aryl, (c) hydrogen, and (d) C₁₋₆ alk-C₁₋₁₀ aryl; (18) —(CH₂)_{q}CONR^{B′}R^{C′}, where q is an integer from zero to four and where R^{B′} and R^{C′} are independently selected from the group consisting of (a) hydrogen, (b) C₆₋₁₀ alkyl, (c) C₆₋₁₀ aryl, and (d) C₁₋₆ alk-C₁₋₁₀ aryl; (19) —(CH₂)_{q}SO₂R^{D′}, where q is an integer from zero to four and where R^{D′} is selected from the group consisting of (a) C₆₋₁₀ alkyl, (b) C₆₋₁₀ aryl, and (c) C₁₋₆ alk-C₁₋₁₀ aryl; (20) —(CH₂)_{q}SO₂NR^{E′}R^{F′}, where q is an integer from zero to four and where each of R^{E′} and R^{F′} is, independently, selected from the group consisting of (a) hydrogen, (b) C₆₋₁₀ alkyl, (c) C₆₋₁₀ aryl, and (d) C₁₋₆ alk-C₁₋₁₀ aryl; (21) thiol; (22) C₆₋₁₀ aryloxy; (23) C₃₋₈ cycloalkoxy; (24) C₆₋₁₀ aryl-C₁₋₆ alkoxy; (25) C₁₋₆ alk-C₁₋₁₂ heterocyclyl (e.g., C₁₋₆ alk-C₁₋₁₂ heteroaryl); (26) oxo; (27) C₂₋₂₀ alkenyl; and (28) C₂₋₂₀ alkynyl. In some embodiments, each of these groups can be further substituted as described herein. For example, the alkylene group of a C₁-alkaryl or a C₁-alkheterocyclyl can be further substituted with an oxo group to afford the respective aryloyl and (heterocyclyl)oyl substituent group.

[0960] The term “diastereomer,” as used herein means stereoisomers that are not mirror images of one another and are non-superimposable on one another.

[0961] The term “effective amount” of an agent, as used herein, is that amount sufficient to effect beneficial or desired results, for example, clinical results, and, as such, an “effective amount” depends upon the context in which it is being applied. For example, in the context of administering an agent that treats cancer, an effective amount of an agent is, for example, an amount sufficient to achieve treatment, as defined herein, of cancer, as compared to the response obtained without administration of the agent.

[0962] The term “enantiomer,” as used herein, means each individual optically active form of a compound of the invention, having an optical purity or enantiomeric excess (as determined by methods standard in the art) of at least 80% (i.e., at least 90% of one enantiomer and at most 10% of the other enantiomer), preferably at least 90% and more preferably at least 98%.

[0963] The term “halo,” as used herein, represents a halogen selected from bromine, chlorine, iodine, or fluorine.

[0964] The term “haloalkoxy,” as used herein, represents an alkoxy group, as defined herein, substituted by a halogen group (i.e., F, Cl, Br, or I). A haloalkoxy may be substituted with one, two, three, or, in the case of alkyl groups of two carbons or more, four halogens. Haloalkoxy groups include perfluoroalkoxys (e.g., —OCF₃), —OCHF₂, —OCH₂F, —OCCl₃, —OCH₂CH₂Br, —OCH₂CH(CH₂CH₂Br)CH₃, and —OCHICH₃. In some embodiments, the haloalkoxy group can be further substituted with 1, 2, 3, or 4 substituent groups as described herein for alkyl groups.

[0965] The term “haloalkyl,” as used herein, represents an alkyl group, as defined herein, substituted by a halogen group (i.e., F, Cl, Br, or I). A haloalkyl may be substituted with one, two, three, or, in the case of alkyl groups of two carbons or more, four halogens. Haloalkyl groups include perfluoroalkyls (e.g., —CF₃), —CHF₂, —CH₂F, —CCl₃, —CH₂CH₂Br, —CH₂CH(CH₂CH₂Br)CH₃, and —CHICH₃. In some embodiments, the haloalkyl group can be further substituted with 1, 2, 3, or 4 substituent groups as described herein for alkyl groups.

[0966] The term “heteroalkylene,” as used herein, refers to an alkylene group, as defined herein, in which one or two of the constituent carbon atoms have each been replaced by nitrogen, oxygen, or sulfur. In some embodiments, the heteroalkylene group can be further substituted with 1, 2, 3, or 4 substituent groups as described herein for alkylene groups.

[0967] The term “heteroaryl,” as used herein, represents that subset of heterocyclyls, as defined herein, which are aromatic: i.e., they contain 4n+2 pi electrons within the mono- or multicyclic ring system. Exemplary unsubstituted heteroaryl groups are of 1 to 12 (e.g., 1 to 11, 1 to 10, 1 to 9, 2 to 12, 2 to 11, 2 to 10, or 2 to 9) carbons. In some embodiment, the heteroaryl is substituted with 1, 2, 3, or 4 substituents groups as defined for a heterocyclyl group.

[0968] The term “heterocyclyl,” as used herein represents a 5-, 6- or 7-membered ring, unless otherwise specified, containing one, two, three, or four heteroatoms independently selected from the group consisting of nitrogen, oxygen, and sulfur. The 5-membered ring has zero to two double bonds, and the 6- and 7-membered rings have zero to three double bonds. Exemplary unsubstituted heterocyclyl groups are of 1 to 12 (e.g., 1 to 11, 1 to 10, 1 to 9, 2 to 12, 2 to, 2 to 10, or 2 to 9) carbons. The term “heterocyclyl” also represents a heterocyclic compound having a bridged multicyclic structure in which one or more carbons and/or heteroatoms bridges two non-adjacent members of a monocyclic ring, e.g., a quinuclidinyl group. The term “heterocyclyl” includes bicyclic, tricyclic, and tetracyclic groups in which any of the above heterocyclic rings is fused to one, two, or three carbocyclic rings, e.g., an aryl ring, a cyclohexane ring, a cyclohexene ring, a cyclopentane ring, a cyclopentene ring, or another monocyclic heterocyclic ring, such as indolyl, quinolyl, isoquinolyl, tetrahydroquinolyl, benzofuryl, benzothienyl and the like. Examples of fused heterocyclyls include tropanes and 1,2,3,5,8,8a-hexahydroindolizine. Heterocyclics include pyrrolyl, pyrrolinyl, pyrrolidinyl, pyrazolyl, pyrazolinyl, pyrazolidinyl, imidazolyl, imidazolinyl, imidazolidinyl, pyridyl, piperidinyl, homopiperidinyl, pyrazinyl, piperazinyl, pyrimidinyl, pyridazinyl, oxazolyl, oxazolidinyl, isoxazolyl, isoxazolidiniyl, morpholinyl, thiomorpholinyl, thiazolyl, thiazolidinyl, isothiazolyl, isothiazolidinyl, indolyl, indazolyl, quinolyl, isoquinolyl, quinoxalinyl, dihydroquinoxalinyl, quinazolinyl, cinnolinyl, phthalazinyl, benzimidazolyl, benzothiazolyl, benzoxazolyl, benzothiadiazolyl, furyl, thienyl, thiazolidinyl, isothiazolyl, triazolyl, tetrazolyl, oxadiazolyl (e.g., 1,2,3-oxadiazolyl), purinyl, thiadiazolyl (e.g., 1,2,3-thiadiazolyl), tetrahydrofuranyl, dihydrofuranyl, tetrahydrothienyl, dihydrothienyl, dihydroindolyl, dihydroquinolyl, tetrahydroquinolyl, tetrahydroisoquinolyl, dihydroisoquinolyl, pyranyl, dihydropyranyl, dithiazolyl, benzofuranyl, isobenzofuranyl, benzothienyl, and the like, including dihydro and tetrahydro forms thereof, where one or more double bonds are reduced and replaced with hydrogens. Still other exemplary heterocyclyls include: 2,3,4,5-tetrahydro-2-oxo-oxazolyl; 2,3-dihydro-2-oxo-1H-imidazolyl; 2,3,4,5-tetrahydro-5-oxo-1H-pyrazolyl (e.g., 2,3,4,5-tetrahydro-2-phenyl-5-oxo-1H-pyrazolyl); 2,3,4,5-tetrahydro-2,4-dioxo-1H-imidazolyl (e.g., 2,3,4,5-tetrahydro-2,4-dioxo-5-methyl-5-phenyl-1H-imidazolyl); 2,3-dihydro-2-thioxo-1,3,4-oxadiazolyl (e.g., 2,3-dihydro-2-thioxo-5-phenyl-1,3,4-oxadiazolyl); 4,5-dihydro-5-oxo-1H-triazolyl (e.g., 4,5-dihydro-3-methyl-4-amino 5-oxo-1H-triazolyl); 1,2,3,4-tetrahydro-2,4-dioxopyridinyl (e.g., 1,2,3,4-tetrahydro-2,4-dioxo-3,3-diethylpyridinyl); 2,6-dioxo-piperidinyl (e.g., 2,6-dioxo-3-ethyl-3-phenylpiperidinyl); 1,6-dihydro-6-oxopyridiminyl; 1,6-dihydro-4-oxopyrimidinyl (e.g., 2-(methylthio)-1,6-dihydro-4-oxo-5-methylpyrimidin-1-yl); 1,2,3,4-tetrahydro-2,4-dioxopyrimidinyl (e.g., 1,2,3,4-tetrahydro-2,4-dioxo-3-ethylpyrimidinyl); 1,6-dihydro-6-oxo-pyridazinyl (e.g., 1,6-dihydro-6-oxo-3-ethylpyridazinyl); 1,6-dihydro-6-oxo-1,2,4-triazinyl (e.g., 1,6-dihydro-5-isopropyl-6-oxo-1,2,4-triazinyl); 2,3-dihydro-2-oxo-1H-indolyl (e.g., 3,3-dimethyl-2,3-dihydro-2-oxo-1H-indolyl and 2,3-dihydro-2-oxo-3,3′-spiropropane-1H-indol-1-yl); 1,3-dihydro-1-oxo-2H-iso-indolyl; 1,3-dihydro-1,3-dioxo-2H-iso-indolyl; 1H-benzopyrazolyl (e.g., 1-(ethoxycarbonyl)-1H-benzopyrazolyl); 2,3-dihydro-2-oxo-1H-benzimidazolyl (e.g., 3-ethyl-2,3-dihydro-2-oxo-1H-benzimidazolyl); 2,3-dihydro-2-oxo-benzoxazolyl (e.g., 5-chloro-2,3-dihydro-2-oxo-benzoxazolyl); 2,3-dihydro-2-oxo-benzoxazolyl; 2-oxo-2H-benzopyranyl; 1,4-benzodioxanyl; 1,3-benzodioxanyl; 2,3-dihydro-3-oxo,4H-1,3-benzothiazinyl; 3,4-dihydro-4-oxo-3H-quinazolinyl (e.g., 2-methyl-3,4-dihydro-4-oxo-3H-quinazolinyl); 1,2,3,4-tetrahydro-2,4-dioxo-3H-quinazolyl (e.g., 1-ethyl-1,2,3,4-tetrahydro-2,4-dioxo-3H-quinazolyl); 1,2,3,6-tetrahydro-2,6-dioxo-7H-purinyl (e.g., 1,2,3,6-tetrahydro-1,3-dimethyl-2,6-dioxo-7H-purinyl); 1,2,3,6-tetrahydro-2,6-dioxo-1H-purinyl (e.g., 1,2,3,6-tetrahydro-3,7-dimethyl-2,6-dioxo-1H-purinyl); 2-oxobenz[c,d]indolyl; 1,1-dioxo-2H-naphth[1,8-c,d]isothiazolyl; and 1,8-naphthylenedicarboxamido. Additional heterocyclics include 3,3a,4,5,6,6a-hexahydro-pyrrolo[3,4-b]pyrrol-(2H)-yl, and 2,5-diazabicyclo[2.2.1]heptan-2-yl, homopiperazinyl (or diazepanyl), tetrahydropyranyl, dithiazolyl, benzofuranyl, benzothienyl, oxepanyl, thiepanyl, azocanyl, oxecanyl, and thiocanyl. Heterocyclic groups also include groups of the formula

[chemical structure]

where
[0969] E′ is selected from the group consisting of —N— and —CH—; F′ is selected from the group consisting of —N═CH—, —NH—CH₂—, —NH—C(O)—, —NH—, —CH═N—, —CH₂—NH—, —C(O)—NH—, —CH═CH—, —CH₂—, —CH₂CH₂—, —CH₂O—, —OCH₂—, —O—, and —S—; and G′ is selected from the group consisting of —CH— and —N—. Any of the heterocyclyl groups mentioned herein may be optionally substituted with one, two, three, four or five substituents independently selected from the group consisting of: (1) C₁₋₇ acyl (e.g., carboxyaldehyde); (2) C₁₋₂₀ alkyl (e.g., C₁₋₆ alkyl, C₁₋₆ alkoxy-C₁₋₆ alkyl, C₁₋₆ alkylsulfinyl-C₁₋₆ alkyl, amino-C₁₋₆ alkyl, azido-C₁₋₆ alkyl, (carboxyaldehyde)-C₁₋₆ alkyl, halo-C₁₋₆ alkyl (e.g., perfluoroalkyl), hydroxy-C₁₋₆ alkyl, nitro-C₁₋₆ alkyl, or C₁₋₆ thioalkoxy-C₁₋₆ alkyl); (3) C₁₋₂₀ alkoxy (e.g., C₁₋₆ alkoxy, such as perfluoroalkoxy); (4) C₁₋₆ alkylsulfinyl; (5) C₆₋₁₀ aryl; (6) amino; (7) C₁₋₆ alk-C₆₋₁₀ aryl; (8) azido; (9) C₃₋₈ cycloalkyl; (10) C₁₋₆ alk-C₃₋₈ cycloalkyl; (11) halo; (12) C₁₋₁₂ heterocyclyl (e.g., C₂₋₁₂ heteroaryl); (13) (C₁₋₁₂ heterocyclyl)oxy; (14) hydroxy; (15) nitro; (16) C₁₋₂₀ thioalkoxy (e.g., C₁₋₆ thioalkoxy); (17) —(CH₂)_{q}CO₂R^{A′}, where q is an integer from zero to four, and R^{A′} is selected from the group consisting of (a) C₁₋₆ alkyl, (b) C₆₋₁₀ aryl, (c) hydrogen, and (d) C₁₋₆ alk-C₆₋₁₀ aryl; (18) —(CH₂)_{q}CONR^{B′}R^{C′}, where q is an integer from zero to four and where R^{B′} and R^{C′} are independently selected from the group consisting of (a) hydrogen, (b) C₁₋₆ alkyl, (c) C₆₋₁₀ aryl, and (d) C₁₋₆ alk-C₆₋₁₀ aryl; (19) —(CH₂)_{q}SO₂R^{D′}, where q is an integer from zero to four and where R^{D′} is selected from the group consisting of (a) C₁₋₆ alkyl, (b) C₆₋₁₀ aryl, and (c) C₁₋₆ alk-C₆₋₁₀ aryl; (20) —(CH₂)_{q}SO₂NR^{E′}R^{F′}, where q is an integer from zero to four and where each of R^{E′} and R^{F′} is, independently, selected from the group consisting of (a) hydrogen, (b) C₁₋₆ alkyl, (c) C₆₋₁₀ aryl, and (d) C₁₋₆ alk-C₆₋₁₀ aryl; (21) thiol; (22) C₆₋₁₀ aryloxy; (23) C₃₋₈ cycloalkoxy; (24) arylalkoxy; (25) C₁₋₆ alk-C₁₋₁₂ heterocyclyl (e.g., C₁₋₆ alk-C₁₋₁₂ heteroaryl); (26) oxo; (27) (C₁₋₁₂ heterocyclyl)imino; (28) C₂₋₂₀ alkenyl; and (29) C₂₋₂₀ alkynyl. In some embodiments, each of these groups can be further substituted as described herein. For example, the alkylene group of a C₁-alkaryl or a C₁-alkheterocyclyl can be further substituted with an oxo group to afford the respective aryloyl and (heterocyclyl)oyl substituent group.

[0970] The term “(heterocyclyl)imino,” as used herein, represents a heterocyclyl group, as defined herein, attached to the parent molecular group through an imino group. In some embodiments, the heterocyclyl group can be substituted with 1, 2, 3, or 4 substituent groups as defined herein.

[0971] The term “(heterocyclyl)oxy,” as used herein, represents a heterocyclyl group, as defined herein, attached to the parent molecular group through an oxygen atom. In some embodiments, the heterocyclyl group can be substituted with 1, 2, 3, or 4 substituent groups as defined herein.

[0972] The term “(heterocyclyl)oyl,” as used herein, represents a heterocyclyl group, as defined herein, attached to the parent molecular group through a carbonyl group. In some embodiments, the heterocyclyl group can be substituted with 1, 2, 3, or 4 substituent groups as defined herein.

[0973] The term “hydrocarbon,” as used herein, represents a group consisting only of carbon and hydrogen atoms.

[0974] The term “hydroxy,” as used herein, represents an —OH group.

[0975] The term “hydroxyalkenyl,” as used herein, represents an alkenyl group, as defined herein, substituted by one to three hydroxy groups, with the proviso that no more than one hydroxy group may be attached to a single carbon atom of the alkyl group, and is exemplified by dihydroxypropenyl, hydroxyisopentenyl, and the like.

[0976] The term “hydroxyalkyl,” as used herein, represents an alkyl group, as defined herein, substituted by one to three hydroxy groups, with the proviso that no more than one hydroxy group may be attached to a single carbon atom of the alkyl group, and is exemplified by hydroxymethyl, dihydroxypropyl, and the like.

[0977] The term “isomer,” as used herein, means any tautomer, stereoisomer, enantiomer, or diastereomer of any compound of the invention. It is recognized that the compounds of the invention can have one or more chiral centers and/or double bonds and, therefore, exist as stereoisomers, such as double-bond isomers (i.e., geometric E/Z isomers) or diastereomers (e.g., enantiomers (i.e., (+) or (−)) or cis/trans isomers). According to the invention, the chemical structures depicted herein, and therefore the compounds of the invention, encompass all of the corresponding stereoisomers, that is, both the stereomerically pure form (e.g., geometrically pure, enantiomerically pure, or diastereomerically pure) and enantiomeric and stereoisomeric mixtures, e.g., racemates. Enantiomeric and stereoisomeric mixtures of compounds of the invention can typically be resolved into their component enantiomers or stereoisomers by well-known methods, such as chiral-phase gas chromatography, chiral-phase high performance liquid chromatography, crystallizing the compound as a chiral salt complex, or crystallizing the compound in a chiral solvent. Enantiomers and stereoisomers can also be obtained from stereomerically or enantiomerically pure intermediates, reagents, and catalysts by well-known asymmetric synthetic methods.

[0978] The term “N-protected amino,” as used herein, refers to an amino group, as defined herein, to which is attached one or two N-protecting groups, as defined herein.

[0979] The term “N-protecting group,” as used herein, represents those groups intended to protect an amino group against undesirable reactions during synthetic procedures. Commonly used N-protecting groups are disclosed in Greene, “Protective Groups in Organic Synthesis,” 3^{rd} Edition (John Wiley & Sons, New York, 1999), which is incorporated herein by reference. N-protecting groups include acyl, aryloyl, or carbamyl groups such as formyl, acetyl, propionyl, pivaloyl, t-butylacetyl, 2-chloroacetyl, 2-bromoacetyl, trifluoroacetyl, trichloroacetyl, phthalyl, o-nitrophenoxyacetyl, α-chlorobutyryl, benzoyl, 4-chlorobenzoyl, 4-bromobenzoyl, 4-nitrobenzoyl, and chiral auxiliaries such as protected or unprotected D, L or D, L-amino acids such as alanine, leucine, phenylalanine, and the like; sulfonyl-containing groups such as benzenesulfonyl, p-toluenesulfonyl, and the like; carbamate forming groups such as benzyloxycarbonyl, p-chlorobenzyloxycarbonyl, p-methoxybenzyloxycarbonyl, p-nitrobenzyloxycarbonyl, 2-nitrobenzyloxycarbonyl, p-bromobenzyloxycarbonyl, 3,4-dimethoxybenzyloxycarbonyl, 3,5-dimethoxybenzyloxycarbonyl, 2,4-dimethoxybenzyloxycarbonyl, 4-methoxybenzyloxycarbonyl, 2-nitro-4,5-dimethoxybenzyloxycarbonyl, 3,4,5-trimethoxybenzyloxycarbonyl, 1-(p-biphenylyl)-1-methylethoxycarbonyl, α,α-dimethyl-3,5-dimethoxybenzyloxycarbonyl, benzhydryloxy carbonyl, t-butyloxycarbonyl, diisopropylmethoxycarbonyl, isopropyloxycarbonyl, ethoxycarbonyl, methoxycarbonyl, allyloxycarbonyl, 2,2,2-trichloroethoxycarbonyl, phenoxycarbonyl, 4-nitrophenoxy carbonyl, fluorenyl-9-methoxycarbonyl, cyclopentyloxycarbonyl, adamantyloxycarbonyl, cyclohexyloxycarbonyl, phenylthiocarbonyl, and the like, alkaryl groups such as benzyl, triphenylmethyl, benzyloxymethyl, and the like and silyl groups, such as trimethylsilyl, and the like. Preferred N-protecting groups are formyl, acetyl, benzoyl, pivaloyl, t-butylacetyl, alanyl, phenylsulfonyl, benzyl, t-butyloxycarbonyl (Boc), and benzyloxycarbonyl (Cbz).

[0980] The term “nitro,” as used herein, represents an —NO₂ group.

[0981] The term “oxo” as used herein, represents ═O.

[0982] The term “perfluoroalkyl,” as used herein, represents an alkyl group, as defined herein, where each hydrogen radical bound to the alkyl group has been replaced by a fluoride radical. Perfluoroalkyl groups are exemplified by trifluoromethyl, pentafluoroethyl, and the like.

[0983] The term “perfluoroalkoxy,” as used herein, represents an alkoxy group, as defined herein, where each hydrogen radical bound to the alkoxy group has been replaced by a fluoride radical. Perfluoroalkoxy groups are exemplified by trifluoromethoxy, pentafluoroethoxy, and the like.

[0984] The term “spirocyclyl,” as used herein, represents a C₂₋₇ alkylene diradical, both ends of which are bonded to the same carbon atom of the parent group to form a spirocyclic group, and also a C₁₋₆ heteroalkylene diradical, both ends of which are bonded to the same atom. The heteroalkylene radical forming the spirocyclyl group can containing one, two, three, or four heteroatoms independently selected from the group consisting of nitrogen, oxygen, and sulfur. In some embodiments, the spirocyclyl group includes one to seven carbons, excluding the carbon atom to which the diradical is attached. The spirocyclyl groups of the invention may be optionally substituted with 1, 2, 3, or 4 substituents provided herein as optional substituents for cycloalkyl and/or heterocyclyl groups.

[0985] The term “stereoisomer,” as used herein, refers to all possible different isomeric as well as conformational forms which a compound may possess (e.g., a compound of any formula described herein), in particular all possible stereochemically and conformationally isomeric forms, all diastereomers, enantiomers and/or conformers of the basic molecular structure. Some compounds of the present invention may exist in different tautomeric forms, all of the latter being included within the scope of the present invention.

[0986] The term “sulfoalkyl,” as used herein, represents an alkyl group, as defined herein, substituted by a sulfo group of —SO₃H. In some embodiments, the alkyl group can be further substituted with 1, 2, 3, or 4 substituent groups as described herein.

[0987] The term “sulfonyl,” as used herein, represents an —S(O)₂— group.

[0988] The term “thioalkaryl,” as used herein, represents a chemical substituent of formula —SR, where R is an alkaryl group. In some embodiments, the alkaryl group can be further substituted with 1, 2, 3, or 4 substituent groups as described herein.

[0989] The term “thioalkheterocyclyl,” as used herein, represents a chemical substituent of formula —SR, where R is an alkheterocyclyl group. In some embodiments, the alkheterocyclyl group can be further substituted with 1, 2, 3, or 4 substituent groups as described herein.

[0990] The term “thioalkoxy,” as used herein, represents a chemical substituent of formula —SR, where R is an alkyl group, as defined herein. In some embodiments, the alkyl group can be further substituted with 1, 2, 3, or 4 substituent groups as described herein.

[0991] The term “thiol” represents an —SH group.

[0992] Compound: As used herein, the term “compound,” is meant to include all stereoisomers, geometric isomers, tautomers, and isotopes of the structures depicted.

[0993] The compounds described herein can be asymmetric (e.g., having one or more stereocenters). All stereoisomers, such as enantiomers and diastereomers, are intended unless otherwise indicated. Compounds of the present disclosure that contain asymmetrically substituted carbon atoms can be isolated in optically active or racemic forms. Methods on how to prepare optically active forms from optically active starting materials are known in the art, such as by resolution of racemic mixtures or by stereoselective synthesis. Many geometric isomers of olefins, C═N double bonds, and the like can also be present in the compounds described herein, and all such stable isomers are contemplated in the present disclosure. Cis and trans geometric isomers of the compounds of the present disclosure are described and may be isolated as a mixture of isomers or as separated isomeric forms.

[0994] Compounds of the present disclosure also include tautomeric forms. Tautomeric forms result from the swapping of a single bond with an adjacent double bond and the concomitant migration of a proton. Tautomeric forms include prototropic tautomers which are isomeric protonation states having the same empirical formula and total charge. Examples prototropic tautomers include ketone-enol pairs, amide-imidic acid pairs, lactam-lactim pairs, amide-imidic acid pairs, enamine-imine pairs, and annular forms where a proton can occupy two or more positions of a heterocyclic system, such as, 1H- and 3H-imidazole, 1H-, 2H- and 4H-1,2,4-triazole, 1H- and 2H-isoindole, and 1H- and 2H-pyrazole. Tautomeric forms can be in equilibrium or sterically locked into one form by appropriate substitution.

[0995] Compounds of the present disclosure also include all of the isotopes of the atoms occurring in the intermediate or final compounds. “Isotopes” refers to atoms having the same atomic number but different mass numbers resulting from a different number of neutrons in the nuclei. For example, isotopes of hydrogen include tritium and deuterium.

[0996] The compounds and salts of the present disclosure can be prepared in combination with solvent or water molecules to form solvates and hydrates by routine methods.

[0997] Condition: As used herein, the term “condition” refers to a disorder that presents with observable symptoms.

[0998] Conserved: As used herein, the term “conserved” refers to nucleotides or amino acid residues of a polynucleotide sequence or polypeptide sequence, respectively, that are those that occur unaltered in the same position of two or more sequences being compared. Nucleotides or amino acids that are relatively conserved are those that are conserved amongst more related sequences than nucleotides or amino acids appearing elsewhere in the sequences.

[0999] In some embodiments, two or more sequences are said to be “completely conserved” if they are 100% identical to one another. In some embodiments, two or more sequences are said to be “highly conserved” if they are at least 70% identical, at least 80% identical, at least 90% identical, or at least 95% identical to one another. In some embodiments, two or more sequences are said to be “highly conserved” if they are about 70% identical, about 80% identical, about 90% identical, about 95%, about 98%, or about 99% identical to one another. In some embodiments, two or more sequences are said to be “conserved” if they are at least 30% identical, at least 40% identical, at least 50% identical, at least 60% identical, at least 70% identical, at least 80% identical, at least 90% identical, or at least 95% identical to one another. In some embodiments, two or more sequences are said to be “conserved” if they are about 30% identical, about 40% identical, about 50% identical, about 60% identical, about 70% identical, about 80% identical, about 90% identical, about 95% identical, about 98% identical, or about 99% identical to one another. Conservation of sequence may apply to the entire length of an oligonucleotide or polypeptide or may apply to a portion, region or feature thereof.

[1000] Cyclic or Cyclized: As used herein, the term “cyclic” refers to the presence of a continuous loop. Cyclic molecules need not be circular, only joined to form an unbroken chain of subunits. Cyclic molecules such as the engineered RNA or mRNA of the present invention may be single units or multimers or comprise one or more components of a complex or higher order structure.

[1001] Cytostatic: As used herein, “cytostatic” refers to inhibiting, reducing, suppressing the growth, division, or multiplication of a cell (e.g., a mammalian cell (e.g., a human cell)), bacterium, virus, fungus, protozoan, parasite, prion, or a combination thereof.

[1002] Cytotoxic: As used herein, “cytotoxic” refers to killing or causing injurious, toxic, or deadly effect on a cell (e.g., a mammalian cell (e.g., a human cell)), bacterium, virus, fungus, protozoan, parasite, prion, or a combination thereof.

[1003] Delivery: As used herein, “delivery” refers to the act or manner of delivering a compound, substance, entity, moiety, cargo or payload.

[1004] Delivery Agent: As used herein, “delivery agent” refers to any substance which facilitates, at least in part, the in vivo delivery of an oncology-related polynucleotide, oncology-related primary construct or oncology-related mmRNA to targeted cells.

[1005] Destabilized: As used herein, the term “destable,” “destabilize,” or “destabilizing region” means a region or molecule that is less stable than a starting, wild-type or native form of the same region or molecule.

[1006] Detectable label: As used herein, “detectable label” refers to one or more markers, signals, or moieties which are attached, incorporated or associated with another entity that is readily detected by methods known in the art including radiography, fluorescence, chemiluminescence, enzymatic activity, absorbance and the like. Detectable labels include radioisotopes, fluorophores, chromophores, enzymes, dyes, metal ions, ligands such as biotin, avidin, streptavidin and haptens, quantum dots, and the like. Detectable labels may be located at any position in the peptides or proteins disclosed herein. They may be within the amino acids, the peptides, or proteins, or located at the N- or C-termini.

[1007] Disease: As used herein, the term “disease” refers to an abnormal condition affecting the body of an organism often showing specific bodily symptoms.

[1008] Disorder: As used herein, the term “disorder,” refers to a disruption of or an interference with normal functions or established systems of the body.

[1009] Digest: As used herein, the term “digest” means to break apart into smaller pieces or components. When referring to polypeptides or proteins, digestion results in the production of peptides.

[1010] Distal: As used herein, the term “distal” means situated away from the center or away from a point or region of interest.

[1011] Dosing regimen: As used herein, a “dosing regimen” is a schedule of administration or physician determined regimen of treatment, prophylaxis, or palliative care.

[1012] Dose splitting factor (DSF)-ratio of PUD of dose split treatment divided by PUD of total daily dose or single unit dose. The value is derived from comparison of dosing regimens groups.

[1013] Encoded protein cleavage signal: As used herein, “encoded protein cleavage signal” refers to the nucleotide sequence which encodes a protein cleavage signal.

[1014] Engineered: As used herein, embodiments of the invention are “engineered” when they are designed to have a feature or property, whether structural or chemical, that varies from a starting point, wild type or native molecule.

[1015] Exosome: As used herein, “exosome” is a vesicle secreted by mammalian cells or a complex involved in RNA degradation.

[1016] Expression: As used herein, “expression” of a nucleic acid sequence refers to one or more of the following events: (1) production of an RNA template from a DNA sequence (e.g., by transcription); (2) processing of an RNA transcript (e.g., by splicing, editing, 5′ cap formation, and/or 3′ end processing); (3) translation of an RNA into a polypeptide or protein; and (4) post-translational modification of a polypeptide or protein.

[1017] Feature: As used herein, a “feature” refers to a characteristic, a property, or a distinctive element.

[1018] Formulation: As used herein, a “formulation” includes at least an oncology-related polynucleotide, oncology-related primary construct or oncology-related mmRNA and a delivery agent.

[1019] Fragment: A “fragment,” as used herein, refers to a portion. For example, fragments of proteins may comprise polypeptides obtained by digesting full-length protein isolated from cultured cells.

[1020] Functional: As used herein, a “functional” biological molecule is a biological molecule in a form in which it exhibits a property and/or activity by which it is characterized.

[1021] Genotype: As used herein, “genotype” refers to the change in the genotype, or genetic makeup, of a subject, cell, tissue, organ and/or organism.

[1022] Homology: As used herein, the term “homology” refers to the overall relatedness between polymeric molecules, e.g. between nucleic acid molecules (e.g. DNA molecules and/or RNA molecules) and/or between polypeptide molecules. In some embodiments, polymeric molecules are considered to be “homologous” to one another if their sequences are at least 25%, 30%, 35%, 40%, 45%, 50%, 55%, 60%, 65%, 70%, 75%, 80%, 85%, 90%, 95%, or 99% identical or similar. The term “homologous” necessarily refers to a comparison between at least two sequences (polynucleotide or polypeptide sequences). In accordance with the invention, two polynucleotide sequences are considered to be homologous if the polypeptides they encode are at least about 50%, 60%, 70%, 80%, 90%, 95%, or even 99% for at least one stretch of at least about 20 amino acids. In some embodiments, homologous polynucleotide sequences are characterized by the ability to encode a stretch of at least 4-5 uniquely specified amino acids. For polynucleotide sequences less than 60 nucleotides in length, homology is determined by the ability to encode a stretch of at least 4-5 uniquely specified amino acids. In accordance with the invention, two protein sequences are considered to be homologous if the proteins are at least about 50%, 60%, 70%, 80%, or 90% identical for at least one stretch of at least about 20 amino acids.

[1023] Identity: As used herein, the term “identity” refers to the overall relatedness between polymeric molecules, e.g., between oligonucleotide molecules (e.g. DNA molecules and/or RNA molecules) and/or between polypeptide molecules. Calculation of the percent identity of two polynucleotide sequences, for example, can be performed by aligning the two sequences for optimal comparison purposes (e.g., gaps can be introduced in one or both of a first and a second nucleic acid sequences for optimal alignment and non-identical sequences can be disregarded for comparison purposes). In certain embodiments, the length of a sequence aligned for comparison purposes is at least 30%, at least 40%, at least 50%, at least 60%, at least 70%, at least 80%, at least 90%, at least 95%, or 100% of the length of the reference sequence. The nucleotides at corresponding nucleotide positions are then compared. When a position in the first sequence is occupied by the same nucleotide as the corresponding position in the second sequence, then the molecules are identical at that position. The percent identity between the two sequences is a function of the number of identical positions shared by the sequences, taking into account the number of gaps, and the length of each gap, which needs to be introduced for optimal alignment of the two sequences. The comparison of sequences and determination of percent identity between two sequences can be accomplished using a mathematical algorithm. For example, the percent identity between two nucleotide sequences can be determined using methods such as those described in Computational Molecular Biology, Lesk, A. M., ed., Oxford University Press, New York, 1988; Biocomputing: Informatics and Genome Projects, Smith, D. W., ed., Academic Press, New York, 1993; Sequence Analysis in Molecular Biology, von Heinje, G., Academic Press, 1987; Computer Analysis of Sequence Data, Part I, Griffin, A. M., and Griffin, H. G., eds., Humana Press, New Jersey, 1994; and Sequence Analysis Primer, Gribskov, M. and Devereux, J., eds., M Stockton Press, New York, 1991; each of which is incorporated herein by reference. For example, the percent identity between two nucleotide sequences can be determined using the algorithm of Meyers and Miller (CABIOS, 1989, 4:11-17), which has been incorporated into the ALIGN program (version 2.0) using a PAM120 weight residue table, a gap length penalty of 12 and a gap penalty of 4. The percent identity between two nucleotide sequences can, alternatively, be determined using the GAP program in the GCG software package using an NWSgapdna.CMP matrix. Methods commonly employed to determine percent identity between sequences include, but are not limited to those disclosed in Carillo, H., and Lipman, D., SIAM J Applied Math., 48:1073 (1988); incorporated herein by reference. Techniques for determining identity are codified in publicly available computer programs. Exemplary computer software to determine homology between two sequences include, but are not limited to, GCG program package, Devereux, J., et al., Nucleic Acids Research, 12(1), 387 (1984)), BLASTP, BLASTN, and FASTA Altschul, S. F. et al., J. Molec. Biol., 215, 403 (1990)).

[1024] Inhibit expression of a gene: As used herein, the phrase “inhibit expression of a gene” means to cause a reduction in the amount of an expression product of the gene. The expression product can be an RNA transcribed from the gene (e.g., an mRNA) or a polypeptide translated from an mRNA transcribed from the gene. Typically a reduction in the level of an mRNA results in a reduction in the level of a polypeptide translated therefrom. The level of expression may be determined using standard techniques for measuring mRNA or protein.

[1025] In vitro: As used herein, the term “in vitro” refers to events that occur in an artificial environment, e.g., in a test tube or reaction vessel, in cell culture, in a Petri dish, etc., rather than within an organism (e.g., animal, plant, or microbe).

[1026] In vivo: As used herein, the term “in vivo” refers to events that occur within an organism (e.g., animal, plant, or microbe or cell or tissue thereof).

[1027] Isolated: As used herein, the term “isolated” refers to a substance or entity that has been separated from at least some of the components with which it was associated (whether in nature or in an experimental setting). Isolated substances may have varying levels of purity in reference to the substances from which they have been associated. Isolated substances and/or entities may be separated from at least about 10%, about 20%, about 30%, about 40%, about 50%, about 60%, about 70%, about 80%, about 90%, or more of the other components with which they were initially associated. In some embodiments, isolated agents are more than about 80%, about 85%, about 90%, about 91%, about 92%, about 93%, about 94%, about 95%, about 96%, about 97%, about 98%, about 99%, or more than about 99% pure. As used herein, a substance is “pure” if it is substantially free of other components. Substantially isolated: By “substantially isolated” is meant that the compound is substantially separated from the environment in which it was formed or detected. Partial separation can include, for example, a composition enriched in the compound of the present disclosure. Substantial separation can include compositions containing at least about 50%, at least about 60%, at least about 70%, at least about 80%, at least about 90%, at least about 95%, at least about 97%, or at least about 99% by weight of the compound of the present disclosure, or salt thereof. Methods for isolating compounds and their salts are routine in the art.

[1028] Linker: As used herein, a linker refers to a group of atoms, e.g., 10-1,000 atoms, and can be comprised of the atoms or groups such as, but not limited to, carbon, amino, alkylamino, oxygen, sulfur, sulfoxide, sulfonyl, carbonyl, and imine. The linker can be attached to a modified nucleoside or nucleotide on the nucleobase or sugar moiety at a first end, and to a payload, e.g., a detectable or therapeutic agent, at a second end. The linker may be of sufficient length as to not interfere with incorporation into a nucleic acid sequence. The linker can be used for any useful purpose, such as to form mmRNA multimers (e.g., through linkage of two or more oncology-related polynucleotides, oncology-related primary constructs, or oncology-related mmRNA molecules) or mmRNA conjugates, as well as to administer a payload, as described herein. Examples of chemical groups that can be incorporated into the linker include, but are not limited to, alkyl, alkenyl, alkynyl, amido, amino, ether, thioether, ester, alkylene, heteroalkylene, aryl, or heterocyclyl, each of which can be optionally substituted, as described herein. Examples of linkers include, but are not limited to, unsaturated alkanes, polyethylene glycols (e.g., ethylene or propylene glycol monomeric units, e.g., diethylene glycol, dipropylene glycol, triethylene glycol, tripropylene glycol, tetraethylene glycol, or tetraethylene glycol), and dextran polymers, Other examples include, but are not limited to, cleavable moieties within the linker, such as, for example, a disulfide bond (—S—S—) or an azo bond (—N═N—), which can be cleaved using a reducing agent or photolysis. Non-limiting examples of a selectively cleavable bond include an amido bond can be cleaved for example by the use of tris(2-carboxyethyl)phosphine (TCEP), or other reducing agents, and/or photolysis, as well as an ester bond can be cleaved for example by acidic or basic hydrolysis.

[1029] Metastasis: As used herein, the term “metastasis” means the process by which cancer spreads from the place at which it first arose as a primary tumor to distant locations in the body.

[1030] Method of Treating: The phrase “a method of treating” or its equivalent, when applied to, for example, cancer refers to a procedure or course of action that is designed to reduce or eliminate the number of cancer cells, prevent the increase in the number of cancer cells, or to alleviate the symptoms of a cancer in a subject. A method of treating cancer or another oncology-related disorder does not necessarily mean that the cancer cells or other disorder will, in fact, be completely eliminated, that the number of cells or disorder will, in fact, be reduced, or that the symptoms of a cancer or other disorder will, in fact, be alleviated. Often, a method of treating cancer will be performed even with a low likelihood of success, but which, given the medical history and estimated survival expectancy of a subject, is nevertheless deemed an overall beneficial course of action.

[1031] MicroRNA (miRNA) binding site: As used herein, a microRNA (miRNA) binding site represents a nucleotide location or region of a nucleic acid transcript to which at least the “seed” region of a miRNA binds.

[1032] Modified: As used herein “modified” refers to a changed state or structure of a molecule of the invention. Molecules may be modified in many ways including chemically, structurally, and functionally. In one embodiment, the mRNA molecules of the present invention are modified by the introduction of non-natural nucleosides and/or nucleotides, e.g., as it relates to the natural ribonucleotides A, U, G, and C. Noncanonical nucleotides such as the cap structures are not considered “modified” although they differ from the chemical structure of the A, C, G, U ribonucleotides.

[1033] Mucus: As used herein, “mucus” refers to the natural substance that is viscous and comprises mucin glycoproteins.

[1034] Naturally occurring: As used herein, “naturally occurring” means existing in nature without artificial aid.

[1035] Non-human vertebrate: As used herein, a “non human vertebrate” includes all vertebrates except Homo sapiens, including wild and domesticated species. Examples of non-human vertebrates include, but are not limited to, mammals, such as alpaca, banteng, bison, camel, cat, cattle, deer, dog, donkey, gayal, goat, guinea pig, horse, llama, mule, pig, rabbit, reindeer, sheep water buffalo, and yak.

[1036] Off-target: As used herein, “off target” refers to any unintended effect on any one or more target, gene, or cellular transcript.

[1037] Oncology-related: As used herein, the term “oncology-related” refers to any disease, disorder, condition, treatment, process, substance or compound related to any aspect of one or more hyperproliferative diseases, disorders and/or conditions including, but not limited to, cancer.

[1038] Open reading frame: As used herein, “open reading frame” or “ORF” refers to a sequence which does not contain a stop codon in a given reading frame.

[1039] Operably linked: As used herein, the phrase “operably linked” refers to a functional connection between two or more molecules, constructs, transcripts, entities, moieties or the like.

[1040] Paratope: As used herein, a “paratope” refers to the antigen-binding site of an antibody.

[1041] Patient: As used herein, “patient” refers to a subject who may seek or be in need of treatment, requires treatment, is receiving treatment, will receive treatment, or a subject who is under care by a trained professional for a particular disease or condition.

[1042] Optionally substituted: Herein a phrase of the form “optionally substituted X” (e.g., optionally substituted alkyl) is intended to be equivalent to “X, wherein X is optionally substituted” (e.g., “alkyl, wherein said alkyl is optionally substituted”). It is not intended to mean that the feature “X” (e.g. alkyl)per se is optional.

[1043] Peptide: As used herein, “peptide” is less than or equal to 50 amino acids long, e.g., about 5, 10, 15, 20, 25, 30, 35, 40, 45, or 50 amino acids long.

[1044] Pharmaceutical composition: The phrase “pharmaceutical composition” refers to a composition that alters the etiology of a disease, disorder and/or condition.

[1045] Pharmaceutically acceptable: The phrase “pharmaceutically acceptable” is employed herein to refer to those compounds, materials, compositions, and/or dosage forms which are, within the scope of sound medical judgment, suitable for use in contact with the tissues of human beings and animals without excessive toxicity, irritation, allergic response, or other problem or complication, commensurate with a reasonable benefit/risk ratio.

[1046] Pharmaceutically acceptable excipients: The phrase “pharmaceutically acceptable excipient,” as used herein, refers any ingredient other than the compounds described herein (for example, a vehicle capable of suspending or dissolving the active compound) and having the properties of being substantially nontoxic and non-inflammatory in a patient. Excipients may include, for example: antiadherents, antioxidants, binders, coatings, compression aids, disintegrants, dyes (colors), emollients, emulsifiers, fillers (diluents), film formers or coatings, flavors, fragrances, glidants (flow enhancers), lubricants, preservatives, printing inks, sorbents, suspensing or dispersing agents, sweeteners, and waters of hydration. Exemplary excipients include, but are not limited to: butylated hydroxytoluene (BHT), calcium carbonate, calcium phosphate (dibasic), calcium stearate, croscarmellose, crosslinked polyvinyl pyrrolidone, citric acid, crospovidone, cysteine, ethylcellulose, gelatin, hydroxypropyl cellulose, hydroxypropyl methylcellulose, lactose, magnesium stearate, maltitol, mannitol, methionine, methylcellulose, methyl paraben, microcrystalline cellulose, polyethylene glycol, polyvinyl pyrrolidone, povidone, pregelatinized starch, propyl paraben, retinyl palmitate, shellac, silicon dioxide, sodium carboxymethyl cellulose, sodium citrate, sodium starch glycolate, sorbitol, starch (corn), stearic acid, sucrose, talc, titanium dioxide, vitamin A, vitamin E, vitamin C, and xylitol.

[1047] Pharmaceutically acceptable salts: The present disclosure also includes pharmaceutically acceptable salts of the compounds described herein. As used herein, “pharmaceutically acceptable salts” refers to derivatives of the disclosed compounds wherein the parent compound is modified by converting an existing acid or base moiety to its salt form (e.g., by reacting the free base group with a suitable organic acid). Examples of pharmaceutically acceptable salts include, but are not limited to, mineral or organic acid salts of basic residues such as amines; alkali or organic salts of acidic residues such as carboxylic acids; and the like. Representative acid addition salts include acetate, adipate, alginate, ascorbate, aspartate, benzenesulfonate, benzoate, bisulfate, borate, butyrate, camphorate, camphorsulfonate, citrate, cyclopentanepropionate, digluconate, dodecylsulfate, ethanesulfonate, fumarate, glucoheptonate, glycerophosphate, hemisulfate, heptonate, hexanoate, hydrobromide, hydrochloride, hydroiodide, 2-hydroxy-ethanesulfonate, lactobionate, lactate, laurate, lauryl sulfate, malate, maleate, malonate, methanesulfonate, 2-naphthalenesulfonate, nicotinate, nitrate, oleate, oxalate, palmitate, pamoate, pectinate, persulfate, 3-phenylpropionate, phosphate, picrate, pivalate, propionate, stearate, succinate, sulfate, tartrate, thiocyanate, toluenesulfonate, undecanoate, valerate salts, and the like. Representative alkali or alkaline earth metal salts include sodium, lithium, potassium, calcium, magnesium, and the like, as well as nontoxic ammonium, quaternary ammonium, and amine cations, including, but not limited to ammonium, tetramethylammonium, tetraethylammonium, methylamine, dimethylamine, trimethylamine, triethylamine, ethylamine, and the like. The pharmaceutically acceptable salts of the present disclosure include the conventional non-toxic salts of the parent compound formed, for example, from non-toxic inorganic or organic acids. The pharmaceutically acceptable salts of the present disclosure can be synthesized from the parent compound which contains a basic or acidic moiety by conventional chemical methods. Generally, such salts can be prepared by reacting the free acid or base forms of these compounds with a stoichiometric amount of the appropriate base or acid in water or in an organic solvent, or in a mixture of the two; generally, nonaqueous media like ether, ethyl acetate, ethanol, isopropanol, or acetonitrile are preferred. Lists of suitable salts are found in Remington's Pharmaceutical Sciences, 17^{th} ed., Mack Publishing Company, Easton, Pa., 1985, p. 1418, Pharmaceutical Salts: Properties, Selection, and Use, P. H. Stahl and C. G. Wermuth (eds.), Wiley-VCH, 2008, and Berge et al., Journal of Pharmaceutical Science, 66, 1-19 (1977), each of which is incorporated herein by reference in its entirety.

[1048] Pharmaceutically acceptable solvate: The term “pharmaceutically acceptable solvate,” as used herein, means a compound of the invention wherein molecules of a suitable solvent are incorporated in the crystal lattice. A suitable solvent is physiologically tolerable at the dosage administered. For example, solvates may be prepared by crystallization, recrystallization, or precipitation from a solution that includes organic solvents, water, or a mixture thereof. Examples of suitable solvents are ethanol, water (for example, mono-, di-, and tri-hydrates), N-methylpyrrolidinone (NMP), dimethyl sulfoxide (DMSO), N,N′-dimethylformamide (DMF), N,N′-dimethylacetamide (DMAC), 1,3-dimethyl-2-imidazolidinone (DMEU), 1,3-dimethyl-3,4,5,6-tetrahydro-2-(1H)-pyrimidinone (DMPU), acetonitrile (ACN), propylene glycol, ethyl acetate, benzyl alcohol, 2-pyrrolidone, benzyl benzoate, and the like. When water is the solvent, the solvate is referred to as a “hydrate.”

[1049] Pharmacokinetic: As used herein, “pharmacokinetic” refers to any one or more properties of a molecule or compound as it relates to the determination of the fate of substances administered to a living organism. Pharmacokinetics is divided into several areas including the extent and rate of absorption, distribution, metabolism and excretion. This is commonly referred to as ADME where: (A) Absorption is the process of a substance entering the blood circulation; (D) Distribution is the dispersion or dissemination of substances throughout the fluids and tissues of the body; (M) Metabolism (or Biotransformation) is the irreversible transformation of parent compounds into daughter metabolites; and (E) Excretion (or Elimination) refers to the elimination of the substances from the body. In rare cases, some drugs irreversibly accumulate in body tissue.

[1050] Phenotype: As used herein, “phenotype” refers to the set of observable characteristics of a subject, cell, tissue, organ and/or organism.

[1051] Polypeptide per unit drug (PUD): As used herein, a PUD or product per unit drug, is defined as a subdivided portion of total daily dose, usually 1 mg, pg, kg, etc., of a product (such as a polypeptide) as measured in body fluid or tissue, usually defined in concentration such as pmol/mL, mmol/mL, etc divided by the measure in the body fluid.

[1052] Physicochemical: As used herein, “physicochemical” means of or relating to a physical and/or chemical property.

[1053] Preventing: As used herein, the term “preventing” refers to partially or completely delaying onset of an infection, disease, disorder and/or condition; partially or completely delaying onset of one or more symptoms, features, or clinical manifestations of a particular infection, disease, disorder, and/or condition; partially or completely delaying onset of one or more symptoms, features, or manifestations of a particular infection, disease, disorder, and/or condition; partially or completely delaying progression from an infection, a particular disease, disorder and/or condition; and/or decreasing the risk of developing pathology associated with the infection, the disease, disorder, and/or condition.

[1054] Prodrug: The present disclosure also includes prodrugs of the compounds described herein. As used herein, “prodrugs” refer to any substance, molecule or entity which is in a form predicate for that substance, molecule or entity to act as a therapeutic upon chemical or physical alteration. Prodrugs may by covalently bonded or sequestered in some way and which release or are converted into the active drug moiety prior to, upon or after administered to a mammalian subject. Prodrugs can be prepared by modifying functional groups present in the compounds in such a way that the modifications are cleaved, either in routine manipulation or in vivo, to the parent compounds. Prodrugs include compounds wherein hydroxyl, amino, sulfhydryl, or carboxyl groups are bonded to any group that, when administered to a mammalian subject, cleaves to form a free hydroxyl, amino, sulfhydryl, or carboxyl group respectively. Preparation and use of prodrugs is discussed in T. Higuchi and V. Stella, “Pro-drugs as Novel Delivery Systems,” Vol. 14 of the A.C.S. Symposium Series, and in Bioreversible Carriers in Drug Design, ed. Edward B. Roche, American Pharmaceutical Association and Pergamon Press, 1987, both of which are hereby incorporated by reference in their entirety.

[1055] Proliferate: As used herein, the term “proliferate” means to grow, expand or increase or cause to grow, expand or increase rapidly. “Proliferative” means having the ability to proliferate. “Anti-proliferative” means having properties counter to or inapposite to proliferative properties.

[1056] Protein cleavage site: As used herein, “protein cleavage site” refers to a site where controlled cleavage of the amino acid chain can be accomplished by chemical, enzymatic or photochemical means.

[1057] Protein cleavage signal: As used herein “protein cleavage signal” refers to at least one amino acid that flags or marks a polypeptide for cleavage.

[1058] Progression: As used herein, the term “progression” (e.g., cancer progression) means the advancement or worsening of or toward a disease or condition.

[1059] Protein of interest: As used herein, the terms “proteins of interest” or “desired proteins” include those provided herein and fragments, mutants, variants, and alterations thereof.

[1060] Proximal: As used herein, the term “proximal” means situated nearer to the center or to a point or region of interest.

[1061] Pseudouridine: As used herein, pseudouridine refers to the C-glycoside isomer of the nucleoside uridine. A “pseudouridine analog” is any modification, variant, isoform or derivative of pseudouridine. For example, pseudouridine analogs include but are not limited to 1-carboxymethyl-pseudouridine, 1-propynyl-pseudouridine, 1-taurinomethyl-pseudouridine, 1-taurinomethyl-4-thio-pseudouridine, 1-methylpseudouridine (m¹ψ), 1-methyl-4-thio-pseudouridine (m¹s⁴ψ), 4-thio-1-methyl-pseudouridine, 3-methyl-pseudouridine (m³ψ), 2-thio-1-methyl-pseudouridine, 1-methyl-1-deaza-pseudouridine, 2-thio-1-methyl-1-deaza-pseudouridine, dihydropseudouridine, 2-thio-dihydropseudouridine, 2-methoxyuridine, 2-methoxy-4-thio-uridine, 4-methoxy-pseudouridine, 4-methoxy-2-thio-pseudouridine, N1-methyl-pseudouridine, 1-methyl-3-(3-amino-3-carboxypropyl)pseudouridine (acp³ ψ), and 2′—O-methyl-pseudouridine (Wm).

[1062] Purified: As used herein, “purify,” “purified,” “purification” means to make substantially pure or clear from unwanted components, material defilement, admixture or imperfection.

[1063] Regression: As used herein, the term “regression” or “degree of regression” refers to the reversal, either phenotypically or genotypically, of a cancer progression. Slowing or stopping cancer progression may be considered regression.

[1064] Reducing the effect: As used herein, the phrase “reducing the effect” when referring to symptoms, means reducing, eliminating or alleviating the symptom in the subject. It does not necessarily mean that the symptom will, in fact, be completely eliminated, reduced or alleviated.

[1065] Sample: As used herein, the term “sample” or “biological sample” refers to a subset of its tissues, cells or component parts (e.g. body fluids, including but not limited to blood, mucus, lymphatic fluid, synovial fluid, cerebrospinal fluid, saliva, amniotic fluid, amniotic cord blood, urine, vaginal fluid and semen). A sample further may include a homogenate, lysate or extract prepared from a whole organism or a subset of its tissues, cells or component parts, or a fraction or portion thereof, including but not limited to, for example, plasma, serum, spinal fluid, lymph fluid, the external sections of the skin, respiratory, intestinal, and genitourinary tracts, tears, saliva, milk, blood cells, tumors, organs. A sample further refers to a medium, such as a nutrient broth or gel, which may contain cellular components, such as proteins or nucleic acid molecule.

[1066] Side effect: As used herein, the phrase “side effect” refers to a secondary effect of treatment.

[1067] Signal Sequences: As used herein, the phrase “signal sequences” refers to a sequence which can direct the transport or localization of a protein.

[1068] Single unit dose: As used herein, a “single unit dose” is a dose of any therapeutic administered in one dose/at one time/single route/single point of contact, i.e., single administration event.

[1069] Similarity: As used herein, the term “similarity” refers to the overall relatedness between polymeric molecules, e.g. between polynucleotide molecules (e.g. DNA molecules and/or RNA molecules) and/or between polypeptide molecules. Calculation of percent similarity of polymeric molecules to one another can be performed in the same manner as a calculation of percent identity, except that calculation of percent similarity takes into account conservative substitutions as is understood in the art.

[1070] Skin: The term “skin” is the thin layer of tissue forming the natural outer covering of the body of a subject and includes the epidermis and the dermis. The dermis is the thick layer of living tissue below the epidermis which is the surface epithelium of the skin.

[1071] Split dose: As used herein, a “split dose” is the division of single unit dose or total daily dose into two or more doses.

[1072] Stable: As used herein “stable” refers to a compound that is sufficiently robust to survive isolation to a useful degree of purity from a reaction mixture, and preferably capable of formulation into an efficacious therapeutic agent.

[1073] Stabilized: As used herein, the term “stabilize”, “stabilized,” “stabilized region” means to make or become stable.

[1074] Subject: As used herein, the term “subject” or “patient” refers to any organism to which a composition in accordance with the invention may be administered, e.g., for experimental, diagnostic, prophylactic, and/or therapeutic purposes. Typical subjects include animals (e.g., mammals such as mice, rats, rabbits, non-human primates, and humans) and/or plants.

[1075] Substantially: As used herein, the term “substantially” refers to the qualitative condition of exhibiting total or near-total extent or degree of a characteristic or property of interest. One of ordinary skill in the biological arts will understand that biological and chemical phenomena rarely, if ever, go to completion and/or proceed to completeness or achieve or avoid an absolute result. The term “substantially” is therefore used herein to capture the potential lack of completeness inherent in many biological and chemical phenomena.

[1076] Substantially equal: As used herein as it relates to time differences between doses, the term means plus/minus 2%.

[1077] Substantially simultaneously: As used herein and as it relates to plurality of doses, the term means within 2 seconds.

[1078] Suffering from: An individual who is “suffering from” a disease, disorder, and/or condition has been diagnosed with or displays one or more symptoms of a disease, disorder, and/or condition.

[1079] Susceptible to: An individual who is “susceptible to” a disease, disorder, and/or condition has not been diagnosed with and/or may not exhibit symptoms of the disease, disorder, and/or condition but harbors a propensity to develop a disease or its symptoms. In some embodiments, an individual who is susceptible to a disease, disorder, and/or condition (for example, cancer) may be characterized by one or more of the following: (1) a genetic mutation associated with development of the disease, disorder, and/or condition; (2) a genetic polymorphism associated with development of the disease, disorder, and/or condition; (3) increased and/or decreased expression and/or activity of a protein and/or nucleic acid associated with the disease, disorder, and/or condition; (4) habits and/or lifestyles associated with development of the disease, disorder, and/or condition; (5) a family history of the disease, disorder, and/or condition; and (6) exposure to and/or infection with a microbe associated with development of the disease, disorder, and/or condition. In some embodiments, an individual who is susceptible to a disease, disorder, and/or condition will develop the disease, disorder, and/or condition. In some embodiments, an individual who is susceptible to a disease, disorder, and/or condition will not develop the disease, disorder, and/or condition.

[1080] Symptom: As used herein, the term “symptom” is a signal of a disease, disorder and/or condition. For example, symptoms may be felt or noticed by the subject who has them but may not be easily accessed by looking at a subject's outward appearance or behaviors. Examples of symptoms include, but are not limited to, weakness, aches and pains, fever, fatigue, weight loss, blood clots, increased blood calcium levels, low white blood cell count, short of breath, dizziness, headaches, hyperpigmentation, jaundice, erthema, pruritis, excessive hair growth, change in bowel habits, change in bladder function, long-lasting sores, white patches inside the mouth, white spots on the tongue, unusual bleeding or discharge, thickening or lump on parts of the body, indigestion, trouble swallowing, changes in warts or moles, change in new skin and nagging cough or hoarseness.

[1081] Synthetic: The term “synthetic” means produced, prepared, and/or manufactured by the hand of man. Synthesis of polynucleotides or polypeptides or other molecules of the present invention may be chemical or enzymatic.

[1082] Targeted Cells: As used herein, “targeted cells” refers to any one or more cells of interest. The cells may be found in vitro, in vivo, in situ or in the tissue or organ of an organism. The organism may be an animal, preferably a mammal, more preferably a human and most preferably a patient.

[1083] Therapeutic Agent: The term “therapeutic agent” refers to any agent that, when administered to a subject, has a therapeutic, diagnostic, and/or prophylactic effect and/or elicits a desired biological and/or pharmacological effect.

[1084] Therapeutically effective amount: As used herein, the term “therapeutically effective amount” means an amount of an agent to be delivered (e.g., nucleic acid, drug, therapeutic agent, diagnostic agent, prophylactic agent, etc.) that is sufficient, when administered to a subject suffering from or susceptible to an infection, disease, disorder, and/or condition, to treat, improve symptoms of, diagnose, prevent, and/or delay the onset of the infection, disease, disorder, and/or condition.

[1085] Therapeutically effective outcome: As used herein, the term “therapeutically effective outcome” means an outcome that is sufficient in a subject suffering from or susceptible to an infection, disease, disorder, and/or condition, to treat, improve symptoms of, diagnose, prevent, and/or delay the onset of the infection, disease, disorder, and/or condition.

[1086] Total daily dose: As used herein, a “total daily dose” is an amount given or prescribed in 24 hr period. It may be administered as a single unit dose.

[1087] Transcription factor: As used herein, the term “transcription factor” refers to a DNA-binding protein that regulates transcription of DNA into RNA, for example, by activation or repression of transcription. Some transcription factors effect regulation of transcription alone, while others act in concert with other proteins. Some transcription factor can both activate and repress transcription under certain conditions. In general, transcription factors bind a specific target sequence or sequences highly similar to a specific consensus sequence in a regulatory region of a target gene. Transcription factors may regulate transcription of a target gene alone or in a complex with other molecules.

[1088] Treating: As used herein, the term “treating” refers to partially or completely alleviating, ameliorating, improving, relieving, delaying onset of, inhibiting progression of, reducing severity of, and/or reducing incidence of one or more symptoms or features of a particular infection, disease, disorder, and/or condition. For example, “treating” cancer may refer to inhibiting survival, growth, and/or spread of a tumor. Treatment may be administered to a subject who does not exhibit signs of a disease, disorder, and/or condition and/or to a subject who exhibits only early signs of a disease, disorder, and/or condition for the purpose of decreasing the risk of developing pathology associated with the disease, disorder, and/or condition.

[1089] Tumor: As used herein, a “tumor” is an abnormal growth of tissue, whether benign or malignant.

[1090] Tumor growth: As used herein, the term “tumor growth” or “tumor metastases” means an increased mass or volume of the tumor or expansion of the tumor distribution.

[1091] Unmodified: As used herein, “unmodified” refers to any substance, compound or molecule prior to being changed in any way. Unmodified may, but does not always, refer to the wild type or native form of a biomolecule. Molecules may undergo a series of modifications whereby each modified molecule may serve as the “unmodified” starting molecule for a subsequent modification.

### Equivalents and Scope

[1092] Those skilled in the art will recognize, or be able to ascertain using no more than routine experimentation, many equivalents to the specific embodiments in accordance with the invention described herein. The scope of the present invention is not intended to be limited to the above Description, but rather is as set forth in the appended claims.

[1093] In the claims, articles such as “a,” “an,” and “the” may mean one or more than one unless indicated to the contrary or otherwise evident from the context. Claims or descriptions that include “or” between one or more members of a group are considered satisfied if one, more than one, or all of the group members are present in, employed in, or otherwise relevant to a given product or process unless indicated to the contrary or otherwise evident from the context. The invention includes embodiments in which exactly one member of the group is present in, employed in, or otherwise relevant to a given product or process. The invention includes embodiments in which more than one, or all of the group members are present in, employed in, or otherwise relevant to a given product or process.

[1094] It is also noted that the term “comprising” is intended to be open and permits but does not require the inclusion of additional elements or steps. When the term “comprising” is used herein, the term “consisting of” is thus also encompassed and disclosed.

[1095] Where ranges are given, endpoints are included. Furthermore, it is to be understood that unless otherwise indicated or otherwise evident from the context and understanding of one of ordinary skill in the art, values that are expressed as ranges can assume any specific value or subrange within the stated ranges in different embodiments of the invention, to the tenth of the unit of the lower limit of the range, unless the context clearly dictates otherwise.

[1096] In addition, it is to be understood that any particular embodiment of the present invention that falls within the prior art may be explicitly excluded from any one or more of the claims. Since such embodiments are deemed to be known to one of ordinary skill in the art, they may be excluded even if the exclusion is not set forth explicitly herein. Any particular embodiment of the compositions of the invention (e.g., any nucleic acid or protein encoded thereby; any method of production; any method of use; etc.) can be excluded from any one or more claims, for any reason, whether or not related to the existence of prior art.

[1097] All cited sources, for example, references, publications, databases, database entries, and art cited herein, are incorporated into this application by reference, even if not expressly stated in the citation. In case of conflicting statements of a cited source and the instant application, the statement in the instant application shall control.

[1098] Section and table headings are not intended to be limiting.

### EXAMPLES

### Example 1. Modified mRNA Production

[1099] Modified mRNAs (mmRNA) according to the invention may be made using standard laboratory methods and materials. The open reading frame (ORF) of the gene of interest may be flanked by a 5′ untranslated region (UTR) which may contain a strong Kozak translational initiation signal and/or an alpha-globin 3′ UTR which may include an oligo(dT) sequence for templated addition of a poly-A tail. The modified mRNAs may be modified to reduce the cellular innate immune response. The modifications to reduce the cellular response may include pseudouridine (p) and 5-methyl-cytidine (5meC, 5mc or m⁵C). (See, Kariko K et al. Immunity 23:165-75 (2005), Kariko K et al. Mol Ther 16:1833-40 (2008), Anderson B R et al. NAR (2010); each of which are herein incorporated by reference in their entireties).

[1100] The ORF may also include various upstream or downstream additions (such as, but not limited to, β-globin, tags, etc.) may be ordered from an optimization service such as, but limited to, DNA2.0 (Menlo Park, CA) and may contain multiple cloning sites which may have XbaI recognition. Upon receipt of the construct, it may be reconstituted and transformed into chemically competent E. coli.

[1101] The methods described herein to make modified mRNA may be used to produce molecules of all sizes including long molecules. Modified mRNA using the described methods has been made for different sized molecules including glucosidase, alpha; acid (GAA) (3.2 kb), cystic fibrosis transmembrane conductance regulator (CFTR) (4.7 kb), Factor VII (7.3 kb), lysosomal acid lipase (45.4 kDa), glucocerebrosidase (59.7 kDa) and iduronate 2-sulfatase (76 kDa).

[1102] For the present invention, NEB DH5-alpha Competent E. coli are used. Transformations are performed according to NEB instructions using 100 ng of plasmid. The protocol is as follows:
[1103] 1. Thaw a tube of NEB 5-alpha Competent E. coli cells on ice for 10 minutes.
[1104] 2. Add 1-5 μl containing 1 pg-100 ng of plasmid DNA to the cell mixture. Carefully flick the tube 4-5 times to mix cells and DNA. Do not vortex.
[1105] 3. Place the mixture on ice for 30 minutes. Do not mix.
[1106] 4. Heat shock at 42° C. for exactly 30 seconds. Do not mix.
[1107] 5. Place on ice for 5 minutes. Do not mix.
[1108] 6. Pipette 950 μl of room temperature SOC into the mixture.
[1109] 7. Place at 37° C. for 60 minutes. Shake vigorously (250 rpm) or rotate.
[1110] 8. Warm selection plates to 37° C.
[1111] 9. Mix the cells thoroughly by flicking the tube and inverting.

[1112] Spread 50-100 μl of each dilution onto a selection plate and incubate overnight at 37° C. Alternatively, incubate at 30° C. for 24-36 hours or 25° C. for 48 hours.

[1113] A single colony is then used to inoculate 5 ml of LB growth media using the appropriate antibiotic and then allowed to grow (250 RPM, 37° C.) for 5 hours. This is then used to inoculate a 200 ml culture medium and allowed to grow overnight under the same conditions.

[1114] To isolate the plasmid (up to 850 pg), a maxi prep is performed using the Invitrogen PURELINK™ HiPure Maxiprep Kit (Carlsbad, CA), following the manufacturer's instructions.

[1115] In order to generate cDNA for In Vitro Transcription (IVT), the plasmid (an Example of which is shown in FIG. 3) is first linearized using a restriction enzyme such as XbaI. A typical restriction digest with XbaI will comprise the following: Plasmid 1.0 μg; 10× Buffer 1.0 μl; XbaI 1.5 μl; dH₂0 up to 10 μl; incubated at 37° C. for 1 hr. If performing at lab scale (<5 μg), the reaction is cleaned up using Invitrogen's PURELINK™ PCR Micro Kit (Carlsbad, CA) per manufacturer's instructions. Larger scale purifications may need to be done with a product that has a larger load capacity such as Invitrogen's standard PURELINK™ PCR Kit (Carlsbad, CA). Following the cleanup, the linearized vector is quantified using the NanoDrop and analyzed to confirm linearization using agarose gel electrophoresis.

[1116] As a non-limiting example, G-CSF may represent the polypeptide of interest. Sequences used in the steps outlined in Examples 1-5 are shown in Table 12. It should be noted that the start codon (ATG) has been underlined in each sequence of Table 12.

TABLE 12
G-CSF Sequences

| SEQ | |
|---|---|
| ID NO | Description |
| 33894 | cDNAsequence: |
| | ATGGCTGGACCTGCCACCCAGAGCCCCATGAAGCTGATGGCC |
| | CTGCAGCTGCTGCTGTGGCACAGTGCACTCTGGACAGTGCAG |
| | GAAGCCACCCCCCTGGGCCCTGCCAGCTCCCTGCCCCAGAGC |
| | TTCCTGCTCAAGTGCTTAGAGCAAGTGAGGAAGATCCAGGGC |
| | GATGGCGCAGCGCTCCAGGAGAAGCTGTGTGCCACCTACAAG |
| | CTGTGCCACCCCGAGGAGCTGGTGCTGCTCGGACACTCTCTG |
| | GGCATCCCCTGGGCTCCCCTGAGCAGCTGCCCCAGCCAGGCC |
| | CTGCAGCTGGCAGGCTGCTTGAGCCAACTCCATAGCGGCCTT |
| | TTCCTCTACCAGGGGCTCCTGCAGGCCCTGGAAGGGATCTCC |
| | CCCGAGTTGGGTCCCACCTTGGACACACTGCAGCTGGACGTC |
| | GCCGACTTTGCCACCACCATCTGGCAGCAGATGGAAGAACTG |
| | GGAATGGCCCCTGCCCTGCAGCCCACCCAGGGTGCCATGCCG |
| | GCCTTCGCCTCTGCTTTCCAGCGCCGGGCAGGAGGGGTCCTG |
| | GTTGCCTCCCATCTGCAGAGCTTCCTGGAGGTGTCGTACCGC |
| | GTTCTACGCCACCTTGCCCAGCCCTGA |
| 33895 | cDNA having T7 polymerase site, AfeI and |
| | Xba restriction site: |
| | TAATACGACTCACTATAGGGAAATAAGAGAGAAAAGAAGAGT |
| | AAGAAGAAATATAAGAGCCACCATGGCTGGACCTGCCACCCA |
| | GAGCCCCATGAAGCTGATGGCCCTGCAGCTGCTGCTGTGGCA |
| | CAGTGCACTCTGGACAGTGCAGGAAGCCACCCCCCTGGGCCC |
| | TGCCAGCTCCCTGCCCCAGAGCTTCCTGCTCAAGTGCTTAGA |
| | GCAAGTGAGGAAGATCCAGGGCGATGGCGCAGCGCTCCAGGA |
| | GAAGCTGTGTGCCACCTACAAGCTGTGCCACCCCGAGGAGCT |
| | GGTGCTGCTCGGACACTCTCTGGGCATCCCCTGGGCTCCCCT |
| | GAGCAGCTGCCCCAGCCAGGCCCTGCAGCTGGCAGGCTGCTT |
| | GAGCCAACTCCATAGCGGCCTTTTCCTCTACCAGGGGCTCCT |
| | GCAGGCCCTGGAAGGGATCTCCCCCGAGTTGGGTCCCACCTT |
| | GGACACACTGCAGCTGGACGTCGCCGACTTTGCCACCACCAT |
| | CTGGCAGCAGATGGAAGAACTGGGAATGGCCCCTGCCCTGCA |
| | GCCCACCCAGGGTGCCATGCCGGCCTTCGCCTCTGCTTTCCA |
| | GCGCCGGGCAGGAGGGGTCCTGGTTGCCTCCCATCTGCAGAG |
| | CTTCCTGGAGGTGTCGTACCGCGTTCTACGCCACCTTGCCCA |
| | GCCCTGAAGCGCTGCCTTCTGCGGGGCTTGCCTTCTGGCCAT |
| | GCCCTTCTTCTCTCCCTTGCACCTGTACCTCTTGGTCTTTGA |
| | ATAAAGCCTGAGTAGGAAGGCGGCCGCTCGAGCATGCATCTA |
| | GA |
| 33896 | Optimized sequence; containing T7 poly- |
| | merase site, AfeI and Xba restriction site |
| | TAATACGACTCACTATAGGGAAATAAGAGAGAAAAGAAGAGT |
| | AAGAAGAAATATAAGAGCCACCATGGCCGGTCCCGCGACCCA |
| | AAGCCCCATGAAACTTATGGCCCTGCAGTTGCTGCTTTGGCA |
| | CTCGGCCCTCTGGACAGTCCAAGAAGCGACTCCTCTCGGACC |
| | TGCCTCATCGTTGCCGCAGTCATTCCTTTTGAAGTGTCTGGA |
| | GCAGGTGCGAAAGATTCAGGGCGATGGAGCCGCACTCCAAGA |
| | GAAGCTCTGCGCGACATACAAACTTTGCCATCCCGAGGAGCT |
| | CGTACTGCTCGGGCACAGCTTGGGGATTCCCTGGGCTCCTCT |
| | CTCGTCCTGTCCGTCGCAGGCTTTGCAGTTGGCAGGGTGCCT |
| | TTCCCAGCTCCACTCCGGTTTGTTCTTGTATCAGGGACTGCT |
| | GCAAGCCCTTGAGGGAATCTCGCCAGAATTGGGCCCGACGCT |
| | GGACACGTTGCAGCTCGACGTGGCGGATTTCGCAACAACCAT |
| | CTGGCAGCAGATGGAGGAACTGGGGATGGCACCCGCGCTGCA |
| | GCCCACGCAGGGGGCAATGCCGGCCTTTGCGTCCGCGTTTCA |
| | GCGCAGGGCGGGTGGAGTCCTCGTAGCGAGCCACCTTCAATC |
| | ATTTTTGGAAGTCTCGTACCGGGTGCTGAGACATCTTGCGCA |
| | GCCGTGAAGCGCTGCCTTCTGCGGGGCTTGCCTTCTGGCCAT |
| | GCCCTTCTTCTCTCCCTTGCACCTGTACCTCTTGGTCTTTGA |
| | ATAAAGCCTGAGTAGGAAGGCGGCCGCTCGAGCATGCATCTA |
| | GA |
| 33897 | mRNA sequence (transcribed) |
| | GGGAAAUAAGAGAGAAAAGAAGAGUAAGAAGAAAUAUAAGAG |
| | CCACCAUGGCCGGUCCCGCGACCCAAAGCCCCAUGAAACUUA |
| | UGGCCCUGCAGUUGCUGCUUUGGCACUCGGCCCUCUGGACAG |
| | UCCAAGAAGCGACUCCUCUCGGACCUGCCUCAUCGUUGCCGC |
| | AGUCAUUCCUUUUGAAGUGUCUGGAGCAGGUGCGAAAGAUUC |
| | AGGGCGAUGGAGCCGCACUCCAAGAGAAGCUCUGCGCGACAU |
| | ACAAACUUUGCCAUCCCGAGGAGCUCGUACUGCUCGGGCACA |
| | GCUUGGGGAUUCCCUGGGCUCCUCUCUCGUCCUGUCCGUCGC |
| | AGGCUUUGCAGUUGGCAGGGUGCCUUUCCCAGCUCCACUCCG |
| | GUUUGUUCUUGUAUCAGGGACUGCUGCAAGCCCUUGAGGGAA |
| | UCUCGCCAGAAUUGGGCCCGACGCUGGACACGUUGCAGCUCG |
| | ACGUGGCGGAUUUCGCAACAACCAUCUGGCAGCAGAUGGAGG |
| | AACUGGGGAUGGCACCCGCGCUGCAGCCCACGCAGGGGGCAA |
| | UGCCGGCCUUUGCGUCCGCGUUUCAGCGCAGGGCGGGUGGAG |
| | UCCUCGUAGCGAGCCACCUUCAAUCAUUUUUGGAAGUCUCGU |
| | ACCGGGUGCUGAGACAUCUUGCGCAGCCGUGAAGCGCUGCCU |
| | UCUGCGGGGCUUGCCUUCUGGCCAUGCCCUUCUUCUCUCCCU |
| | UGCACCUGUACCUCUUGGUCUUUGAAUAAAGCCUGAGUAGGA |
| | AG |

### Example 2: PCR for cDNA Production

[1117] PCR procedures for the preparation of cDNA are performed using 2×KAPA HIFI™ HotStart ReadyMix by Kapa Biosystems (Woburn, MA). This system includes 2×KAPA ReadyMix 12.5 μl; Forward Primer (10 uM) 0.75 μl; Reverse Primer (10 uM) 0.75 μl; Template cDNA 100 ng; and dH₂0 diluted to 25.0 μl. The reaction conditions are at 95° C. for 5 min. and 25 cycles of 98° C. for 20 sec, then 580 C for 15 sec, then 720 C for 45 sec, then 720 C for 5 min. then 4° C. to termination.

[1118] The reverse primer of the instant invention incorporates a poly-T₁₂₀ for a poly-A₁₂₀ in the mRNA. Other reverse primers with longer or shorter poly(T) tracts can be used to adjust the length of the poly(A) tail in the mRNA.

[1119] The reaction is cleaned up using Invitrogen's PURELINK™ PCR Micro Kit (Carlsbad, CA) per manufacturer's instructions (up to 5 pg). Larger reactions will require a cleanup using a product with a larger capacity. Following the cleanup, the cDNA is quantified using the NANODROP™ and analyzed by agarose gel electrophoresis to confirm the cDNA is the expected size. The cDNA is then submitted for sequencing analysis before proceeding to the in vitro transcription reaction.

### Example 3. In Vitro Transcription (IVT)

[1120] The in vitro transcription reaction generates mRNA containing modified nucleotides or modified RNA. The input nucleotide triphosphate (NTP) mix is made in-house using natural and un-natural NTPs.

[1121] A typical in vitro transcription reaction includes the following:

| | | | |
|---|---|---|---|
| 1. | Template cDNA | 1.0 | μg |
| 2. | 10x transcription buffer (400 mM Tris- | 2.0 | μl |
| | HCl pH 8.0, 190 mM MgCl₂, 50 mM DTT, | | |
| | 10 mM Spermidine) | | |
| 3. | Custom NTPs (25 mM each) | 7.2 | μl |
| 4. | RNase Inhibitor | 20 | U |
| 5. | T7 RNA polymerase | 3000 | U |

| | | |
|---|---|---|
| 6. | dH₂0 | Up to 20.0 μl. and |
| 7. | Incubation at 37° C. for 3 hr-5 hrs. | |

[1122] The crude IVT mix may be stored at 4° C. overnight for cleanup the next day. 1 U of RNase-free DNase is then used to digest the original template. After 15 minutes of incubation at 37° C., the mRNA is purified using Ambion's MEGACLEAR™ Kit (Austin, TX) following the manufacturer's instructions. This kit can purify up to 500 μg of RNA. Following the cleanup, the RNA is quantified using the NanoDrop and analyzed by agarose gel electrophoresis to confirm the RNA is the proper size and that no degradation of the RNA has occurred.

### Example 4. Enzymatic Capping of mRNA

[1123] Capping of the mRNA is performed as follows where the mixture includes: IVT RNA 60 μg-180 μg and dH₂0 up to 72 μl. The mixture is incubated at 65° C. for 5 minutes to denature RNA, and then is transferred immediately to ice.

[1124] The protocol then involves the mixing of 10× Capping Buffer (0.5 M Tris-HCl (pH 8.0), 60 mM KCl, 12.5 mM MgCl₂) (10.0 μl); 20 mM GTP (5.0 μl); 20 mM S-Adenosyl Methionine (2.5 μl); RNase Inhibitor (100 U); 2′-O-Methyltransferase (400U); Vaccinia capping enzyme (Guanylyl transferase) (40 U); dH₂0 (Up to 28 μl); and incubation at 37° C. for 30 minutes for 60 pg RNA or up to 2 hours for 180 μg of RNA.

[1125] The mRNA is then purified using Ambion's MEGACLEAR™ Kit (Austin, TX) following the manufacturer's instructions. Following the cleanup, the RNA is quantified using the NANODROP™ (ThermoFisher, Waltham, MA) and analyzed by agarose gel electrophoresis to confirm the RNA is the proper size and that no degradation of the RNA has occurred. The RNA product may also be sequenced by running a reverse-transcription-PCR to generate the cDNA for sequencing.

### Example 5. PolyA Tailing Reaction

[1126] Without a poly-T in the cDNA, a poly-A tailing reaction must be performed before cleaning the final product. This is done by mixing Capped IVT RNA (100 μl); RNase Inhibitor (20 U); 10× Tailing Buffer (0.5 M Tris-HCl (pH 8.0), 2.5 M NaCl, 100 mM MgCl₂)(12.0 μl); 20 mM ATP (6.0 μl); Poly-A Polymerase (20 U); dH₂0 up to 123.5 μl and incubation at 37° C. for 30 min. If the poly-A tail is already in the transcript, then the tailing reaction may be skipped and proceed directly to cleanup with Ambion's MEGACLEAR™ kit (Austin, TX) (up to 500 pg). Poly-A Polymerase is preferably a recombinant enzyme expressed in yeast.

[1127] For studies performed and described herein, the poly-A tail is encoded in the IVT template to comprise 160 nucleotides in length. However, it should be understood that the processivity or integrity of the polyA tailing reaction may not always result in exactly 160 nucleotides. Hence polyA tails of approximately 160 nucleotides, e.g, about 150-165, 155, 156, 157, 158, 159, 160, 161, 162, 163, 164 or 165 are within the scope of the invention.

### Example 6. Natural 5′ Caps and 5′ Cap Analogues

[1128] 5′-capping of modified RNA may be completed concomitantly during the in vitro-transcription reaction using the following chemical RNA cap analogs to generate the 5′-guanosine cap structure according to manufacturer protocols: 3′-O-Me-m7G(5′)ppp(5′) G [the ARCA cap]; G(5′)ppp(5′)A; G(5′)ppp(5′)G; m7G(5′)ppp(5′)A; m7G(5′)ppp(5′)G (New England BioLabs, Ipswich, MA). 5′-capping of modified RNA may be completed post-transcriptionally using a Vaccinia Virus Capping Enzyme to generate the “Cap 0” structure: m7G(5′)ppp(5′)G (New England BioLabs, Ipswich, MA). Cap 1 structure may be generated using both Vaccinia Virus Capping Enzyme and a 2′-O methyl-transferase to generate: m7G(5′)ppp(5′)G-2′-O-methyl. Cap 2 structure may be generated from the Cap 1 structure followed by the 2′-O-methylation of the 5′-antepenultimate nucleotide using a 2′-O methyl-transferase. Cap 3 structure may be generated from the Cap 2 structure followed by the 2′-O-methylation of the 5′-preantepenultimate nucleotide using a 2′-O methyl-transferase. Enzymes are preferably derived from a recombinant source.

[1129] When transfected into mammalian cells, the modified mRNAs have a stability of between 12-18 hours or more than 18 hours, e.g., 24, 36, 48, 60, 72 or greater than 72 hours.

### Example 7. Capping

### A. Protein Expression Assay

[1130] Synthetic mRNAs encoding human G-CSF (cDNA shown in SEQ ID NO: 33894; mRNA sequence fully modified with 5-methylcytosine at each cytosine and pseudouridine replacement at each uridine site shown in SEQ ID NO: 33897 with a polyA tail approximately 160 nucleotides in length not shown in sequence) containing the ARCA (3′ O-Me-m7G(5′)ppp(5′)G) cap analog or the Cap1 structure can be transfected into human primary keratinocytes at equal concentrations. 6, 12, 24 and 36 hours post-transfection the amount of G-CSF secreted into the culture medium can be assayed by ELISA. Synthetic mRNAs that secrete higher levels of G-CSF into the medium would correspond to a synthetic mRNA with a higher translationally-competent Cap structure.

### B. Purity Analysis Synthesis

[1131] Synthetic mRNAs encoding human G-CSF (cDNA shown in SEQ ID NO: 33894; mRNA sequence fully modified with 5-methylcytosine at each cytosine and pseudouridine replacement at each uridine site shown in SEQ ID NO: 33897 with a polyA tail approximately 160 nucleotides in length not shown in sequence) containing the ARCA cap analog or the Cap1 structure crude synthesis products can be compared for purity using denaturing Agarose-Urea gel electrophoresis or HPLC analysis. Synthetic mRNAs with a single, consolidated band by electrophoresis correspond to the higher purity product compared to a synthetic mRNA with multiple bands or streaking bands. Synthetic mRNAs with a single HPLC peak would also correspond to a higher purity product. The capping reaction with a higher efficiency would provide a more pure mRNA population.

### C. Cytokine Analysis

[1132] Synthetic mRNAs encoding human G-CSF (cDNA shown in SEQ ID NO: 33894; mRNA sequence fully modified with 5-methylcytosine at each cytosine and pseudouridine replacement at each uridine site shown in SEQ ID NO: 33897 with a polyA tail approximately 160 nucleotides in length not shown in sequence) containing the ARCA cap analog or the Cap1 structure can be transfected into human primary keratinocytes at multiple concentrations. 6, 12, 24 and 36 hours post-transfection the amount of pro-inflammatory cytokines such as TNF-alpha and IFN-beta secreted into the culture medium can be assayed by ELISA. Synthetic mRNAs that secrete higher levels of pro-inflammatory cytokines into the medium would correspond to a synthetic mRNA containing an immune-activating cap structure.

### D. Capping Reaction Efficiency

[1133] Synthetic mRNAs encoding human G-CSF (cDNA shown in SEQ ID NO: 33894; mRNA sequence fully modified with 5-methylcytosine at each cytosine and pseudouridine replacement at each uridine site shown in SEQ ID NO: 33897 with a polyA tail approximately 160 nucleotides in length not shown in sequence) containing the ARCA cap analog or the Cap1 structure can be analyzed for capping reaction efficiency by LC-MS after capped mRNA nuclease treatment. Nuclease treatment of capped mRNAs would yield a mixture of free nucleotides and the capped 5′-5-triphosphate cap structure detectable by LC-MS. The amount of capped product on the LC-MS spectra can be expressed as a percent of total mRNA from the reaction and would correspond to capping reaction efficiency. The cap structure with higher capping reaction efficiency would have a higher amount of capped product by LC-MS.

### Example 8. Agarose Gel Electrophoresis of Modified RNA or RT PCR Products

[1134] Individual modified RNAs (200-400 ng in a 20 μl volume) or reverse transcribed PCR products (200-400 ng) are loaded into a well on a non-denaturing 1.2% Agarose E-Gel (Invitrogen, Carlsbad, CA) and run for 12-15 minutes according to the manufacturer protocol.

### Example 9. Nanodrop Modified RNA Quantification and UV Spectral Data

[1135] Modified RNAs in TE buffer (1 μl) are used for Nanodrop UV absorbance readings to quantitate the yield of each modified RNA from an in vitro transcription reaction.

### Example 10. Formulation of Modified mRNA Using Lipidoids

[1136] Modified mRNAs (mmRNA) are formulated for in vitro experiments by mixing the mmRNA with the lipidoid at a set ratio prior to addition to cells. In vivo formulation may require the addition of extra ingredients to facilitate circulation throughout the body. To test the ability of these lipidoids to form particles suitable for in vivo work, a standard formulation process used for siRNA-lipidoid formulations was used as a starting point. Initial mmRNA-lipidoid formulations may consist of particles composed of 42% lipidoid, 48% cholesterol and 10% PEG, with further optimization of ratios possible. After formation of the particle, mmRNA is added and allowed to integrate with the complex. The encapsulation efficiency is determined using a standard dye exclusion assays.

### Materials and Methods for Examples 11-15

### A. Lipid Synthesis

[1137] Six lipids, DLin-DMA, DLin-K-DMA, DLin-KC2-DMA, 98N12-5, C12-200 and DLin-MC3-DMA, were synthesized by methods outlined in the art in order to be formulated with modified RNA. DLin-DMA and precursors were synthesized as described in Heyes et. al, J. Control Release, 2005, 107, 276-287. DLin-K-DMA and DLin-KC2-DMA and precursors were synthesized as described in Semple et. al, Nature Biotechnology, 2010, 28, 172-176. 98N12-5 and precursor were synthesized as described in Akinc et. al, Nature Biotechnology, 2008, 26, 561-569.

[1138] C12-200 and precursors were synthesized according to the method outlined in Love et. al, PNAS, 2010, 107, 1864-1869. 2-epoxydodecane (5.10 g, 27.7 mmol, 8.2 eq) was added to a vial containing Amine 200 (0.723 g, 3.36 mmol, 1 eq) and a stirring bar. The vial was sealed and warmed to 80° C. The reaction was stirred for 4 days at 80° C. Then the mixture was purified by silica gel chromatography using a gradient from pure dichloromethane (DCM) to DCM:MeOH 98:2. The target compound was further purified by RP-HPLC to afford the desired compound.

[1139] DLin-MC3-DMA and precursors were synthesized according to procedures described in WO 2010054401 herein incorporated by reference in its entirety. A mixture of dilinoleyl methanol (1.5 g, 2.8 mmol, 1 eq), N,N-dimethylaminobutyric acid (1.5 g, 2.8 mmol, 1 eq), DIPEA (0.73 mL, 4.2 mmol, 1.5 eq) and TBTU (1.35 g, 4.2 mmol, 1.5 eq) in 10 mL of DMF was stirred for 10 h at room temperature. Then the reaction mixture was diluted in ether and washed with water. The organic layer was dried over anhydrous sodium sulfate, filtrated and concentrated under reduced pressure. The crude product was purified by silica gel chromatography using a gradient DCM to DCM:MeOH 98:2. Subsequently the target compound was subjected to an additional RP-HPLC purification which was done using a YMC-Pack C4 column to afford the target compound.

### B. Formulation of Modified RNA Nanoparticles

[1140] Solutions of synthesized lipid, 1,2-distearoyl-3-phosphatidylcholine (DSPC) (Avanti Polar Lipids, Alabaster, AL), cholesterol (Sigma-Aldrich, Taufkirchen, Germany), and α-[3′-(1,2-dimyristoyl-3-propanoxy)-carboxamide-propyl]-o-methoxy-polyoxyethylene (PEG-c-DOMG) (NOF, Bouwelven, Belgium) were prepared at concentrations of 50 mM in ethanol and stored at −20° C. The lipids were combined to yield molar ratio of 50:10:38.5:1.5 (Lipid: DSPC: Cholesterol: PEG-c-DOMG) and diluted with ethanol to a final lipid concentration of 25 mM. Solutions of modified mRNA at a concentration of 1-2 mg/mL in water were diluted in 50 mM sodium citrate buffer at a pH of 3 to form a stock modified mRNA solution. Formulations of the lipid and modified mRNA were prepared by combining the synthesized lipid solution with the modified mRNA solution at total lipid to modified mRNA weight ratio of 10:1, 15:1, 20:1 and 30:1. The lipid ethanolic solution was rapidly injected into aqueous modified mRNA solution to afford a suspension containing 33% ethanol. The solutions were injected either manually (MI) or by the aid of a syringe pump (SP) (Harvard Pump 33 Dual Syringe Pump Harvard Apparatus Holliston, MA).

[1141] To remove the ethanol and to achieve the buffer exchange, the formulations were dialyzed twice against phosphate buffered saline (PBS), pH 7.4 at volumes 200-times of the primary product using a Slide-A-Lyzer cassettes (Thermo Fisher Scientific Inc. Rockford, IL) with a molecular weight cutoff (MWCO) of 10 kD. The first dialysis was carried at room temperature for 3 hours and then the formulations were dialyzed overnight at 4° C. The resulting nanoparticle suspension was filtered through 0.2 μm sterile filter (Sarstedt, Numbrecht, Germany) into glass vials and sealed with a crimp closure.

### C. Characterization of Formulations

[1142] A Zetasizer Nano ZS (Malvern Instruments Ltd, Malvern, Worcestershire, UK) was used to determine the particle size, the polydispersity index (PDI) and the zeta potential of the modified mRNA nanoparticles in 1×PBS in determining particle size and 15 mM PBS in determining zeta potential.

[1143] Ultraviolet-visible spectroscopy was used to determine the concentration of modified mRNA nanoparticle formulation. 100 μL of the diluted formulation in 1×PBS was added to 900 μL of a 4:1 (v/v) mixture of methanol and chloroform. After mixing, the absorbance spectrum of the solution was recorded between 230 nm and 330 nm on a DU 800 spectrophotometer (Beckman Coulter, Beckman Coulter, Inc., Brea, CA). The modified RNA concentration in the nanoparticle formulation was calculated based on the extinction coefficient of the modified RNA used in the formulation and on the difference between the absorbance at a wavelength of 260 nm and the baseline value at a wavelength of 330 nm.

[1144] QUANT-IT™ RIBOGREEN® RNA assay (Invitrogen Corporation Carlsbad, CA) was used to evaluate the encapsulation of modified RNA by the nanoparticle. The samples were diluted to a concentration of approximately 5 μg/mL in TE buffer (10 mM Tris-HCl, 1 mM EDTA, pH 7.5). 50 μL of the diluted samples were transferred to a polystyrene 96 well plate, then either 50 μL of TE buffer or 50 μL of a 2% Triton X-100 solution was added. The plate was incubated at a temperature of 37° C. for 15 minutes. The RIBOGREEN® reagent was diluted 1:100 in TE buffer, 100 μL of this solution was added to each well. The fluorescence intensity was measured using a fluorescence plate reader (Wallac Victor 1420 Multilablel Counter; Perkin Elmer, Waltham, MA) at an excitation wavelength of ˜480 nm and an emission wavelength of ˜520 nm. The fluorescence values of the reagent blank were subtracted from that of each of the samples and the percentage of free modified RNA was determined by dividing the fluorescence intensity of the intact sample (without addition of Triton X-100) by the fluorescence value of the disrupted sample (caused by the addition of Triton X-100).

### D. In Vitro Incubation

[1145] Human embryonic kidney epithelial (HEK293) and hepatocellular carcinoma epithelial (HepG2) cells (LGC standards GmbH, Wesel, Germany) were seeded on 96-well plates (Greiner Bio-one GmbH, Frickenhausen, Germany) and plates for HEK293 cells were precoated with collagen type1. HEK293 were seeded at a density of 30,000 and HepG2 were seeded at a density of 35,000 cells per well in 100 μl cell culture medium. For HEK293 the cell culture medium was DMEM, 10% FCS, adding 2 mM L-Glutamine, 1 mM Sodiumpyruvate and 1× non-essential amino acids (Biochrom AG, Berlin, Germany) and 1.2 mg/ml Sodiumbicarbonate (Sigma-Aldrich, Munich, Germany) and for HepG2 the culture medium was MEM (Gibco Life Technologies, Darmstadt, Germany), 10% FCS adding 2 mM L-Glutamine, 1 mM Sodiumpyruvate and 1× non-essential amino acids (Biochrom AG, Berlin, Germany. Formulations containing mCherry mRNA (mRNA sequence shown in SEQ ID NO: 33898; polyA tail of approximately 160 nucleotides not shown in sequence; 5′cap, Cap1) were added in quadruplicates directly after seeding the cells and incubated. The mCherry cDNA with the T7 promoter, 5′untranslated region (UTR) and 3′ UTR used in in vitro transcription (IVT) is given in SEQ ID NO: 33899. The mCherry mRNA was modified with a 5meC at each cytosine and pseudouridine replacement at each uridine site.

[1146] Cells were harvested by transferring the culture media supernatants to a 96-well Pro-Bind U-bottom plate (Beckton Dickinson GmbH, Heidelberg, Germany). Cells were trypsinized with ½ volume Trypsin/EDTA (Biochrom AG, Berlin, Germany), pooled with respective supernatants and fixed by adding one volume PBS/2% FCS (both Biochrom AG, Berlin, Germany)/0.5% formaldehyde (Merck, Darmstadt, Germany). Samples then were submitted to a flow cytometer measurement with a 532 nm excitation laser and the 610/20 filter for PE-Texas Red in a LSRII cytometer (Beckton Dickinson GmbH, Heidelberg, Germany). The mean fluorescence intensity (MFI) of all events and the standard deviation of four independent wells are presented in for samples analyzed.

### Example 11. Purification of Nanoparticle Formulations

[1147] Nanoparticle formulations of DLin-KC2-DMA and 98N12-5 in HEK293 and HepG2 were tested to determine if the mean fluorescent intensity (MFI) was dependent on the lipid to modified RNA ratio and/or purification. Three formulations of DLin-KC2-DMA and two formulations of 98N12-5 were produced using a syringe pump to the specifications described in Table 13. Purified samples were purified by SEPHADEX™ G-25 DNA grade (GE Healthcare, Sweden). Each formulation before and after purification (aP) was tested at concentration of 250 ng modified RNA per well in a 24 well plate. The percentage of cells that are positive for the marker for FL4 channel (% FL4-positive) when analyzed by the flow cytometer for each formulation and the background sample, and the MFI of the marker for the FL4 channel for each formulation and the background sample are shown in Table 14. The formulations which had been purified had a slightly higher MFI than those formulations tested before purification.

TABLE 13
Formulations

| Formulation # | Lipid | Lipid/RNA wt/wt | Mean size (nm) |
|---|---|---|---|
| NPA-001-1 | DLin-KC2-DMA | 10 | 155 nm |
| | | | PDI: 0.08 |
| NPA-001-1 aP | DLin-KC2-DMA | 10 | 141 nm |
| | | | PDI: 0.14 |
| NPA-002-1 | DLin-KC2-DMA | 15 | 140 nm |
| | | | PDI: 0.11 |
| NPA-002-1 aP | DLin-KC2-DMA | 15 | 125 nm |
| | | | PDI: 0.12 |
| NPA-003-1 | DLin-KC2-DMA | 20 | 114 nm |
| | | | PDI: 0.08 |
| NPA-003-1 aP | DLin-KC2-DMA | 20 | 104 nm |
| | | | PDI: 0.06 |
| NPA-005-1 | 98N12-5 | 15 | 127 nm |
| | | | PDI: 0.12 |
| NPA-005-1 aP | 98N12-5 | 15 | 134 nm |
| | | | PDI: 0.17 |
| NPA-006-1 | 98N12 | 20 | 126 nm |
| | | | PDI: 0.08 |
| NPA-006-1 aP | 98N12 | 20 | 118 nm |
| | | | PDI: 0.13 |

TABLE 14
HEK293 and HepG2, 24-well, 250 ng Modified RNA/well

| | |
|---|---|
| % FL4-positive | FL4 MFI |

| Formulation | HEK293 | HepG2 | HEK293 | HepG2 |
|---|---|---|---|---|
| Untreated | 0.33 | 0.40 | 0.25 | 0.30 |
| NPA-001-1 | 62.42 | 5.68 | 1.49 | 0.41 |
| NPA-001-ap | 87.32 | 9.02 | 3.23 | 0.53 |
| NPA-002-1 | 91.28 | 9.90 | 4.43 | 0.59 |
| NPA-002-ap | 92.68 | 14.02 | 5.07 | 0.90 |
| NPA-003-1 | 87.70 | 11.76 | 6.83 | 0.88 |
| NPA-003-ap | 88.88 | 15.46 | 8.73 | 1.06 |
| NPA-005-1 | 50.60 | 4.75 | 1.83 | 0.46 |
| NPA-005-ap | 38.64 | 5.16 | 1.32 | 0.46 |
| NPA-006-1 | 54.19 | 13.16 | 1.30 | 0.60 |
| NPA-006-ap | 49.97 | 13.74 | 1.27 | 0.61 |

### Example 12. Concentration Response Curve

[1148] Nanoparticle formulations of 98N12-5 (NPA-005) and DLin-KC2-DMA (NPA-003) were tested at varying concentrations to determine the MFI of FL4 or mCherry (mRNA sequence shown in SEQ TD NO: 33898; polyA tail of approximately 160 nucleotides not shown in sequence; 5′cap, Cap1; fully modified with 5-methylcytosine and pseudouridine) over a range of doses. The formulations tested are outlined in Table 15. To determine the optimal concentration of nanoparticle formulations of 98N12-5, varying concentrations of formulated modified RNA (100 ng, 10 ng, 1.0 ng, 0.1 ng and 0.01 ng per well) were tested in a 24-well plate of HEK293, and the results of the FL4 MFI of each dose are shown in Table 16. Likewise, to determine the optimal concentration of nanoparticle formulations of DLin-KC2-DMA, varying concentrations of formulated modified RNA (250 ng 100 ng, 10 ng, 1.0 ng, 0.1 ng and 0.01 ng per well) were tested in a 24-well plate of HEK293, and the results of the FL4 MFI of each dose are shown in Table 17. Nanoparticle formulations of DLin-KC2-DMA were also tested at varying concentrations of formulated modified RNA (250 ng, 100 ng and 30 ng per well) in a 24 well plate of HEK293, and the results of the FL4 MFI of each dose are shown in Table 18. A dose of 1 ng/well for 98N12-5 and a dose of 10 ng/well for DLin-KC2-DMA were found to resemble the FL4 MFI of the background.

[1149] To determine how close the concentrations resembled the background, we utilized a flow cytometer with optimized filter sets for detection of mCherry expression, and were able to obtain results with increased sensitivity relative to background levels. Doses of 25 ng/well, 0.25 ng/well, 0.025 ng/well and 0.0025 ng/well were analyzed for 98N12-5 (NPA-005) and DLin-KC2-DMA (NPA-003) to determine the MFI of mCherry. As shown in Table 19, the concentration of 0.025 ng/well and lesser concentrations are similar to the background MFI level of mCherry which is about 386.125.

TABLE 15
Formulations

| | Formulation # | |
|---|---|---|
| | NPA-003 | NPA-005 |
| Lipid | DLin-KC2-DMA | 98N12-5 |
| Lipid/RNA | 20 | 15 |
| wt/wt | | |
| Mean size | 114 nm | 106 nm |
| | PDI: 0.08 | PDI: 0.12 |

TABLE 16
HEK293, NPA-005, 24-well, n = 4

| Formulation | FL4 MFI |
|---|---|
| Untreated control | 0.246 |
| NPA-005 100 ng | 2.2175 |
| NPA-005 10 ng | 0.651 |
| NPA-005 1.0 ng | 0.28425 |
| NPA-005 0.1 ng | 0.27675 |
| NPA-005 0.01 ng | 0.2865 |

TABLE 17
HEK293, NPA-003, 24-well, n = 4

| Formulation | FL4 MFI |
|---|---|
| Untreated control | 0.3225 |
| NPA-003 250 ng | 2.9575 |
| NPA-003 100 ng | 1.255 |
| NPA-003 10 ng | 0.40025 |
| NPA-003 1 ng | 0.33025 |
| NPA-003 0.1 ng | 0.34625 |
| NPA-003 0.01 ng | 0.3475 |

TABLE 18
HEK293, NPA-003, 24-well, n = 4

| Formulation | FL4 MFI |
|---|---|
| Untreated control | 0.27425 |
| NPA-003 250 ng | 5.6075 |
| NPA-003 100 ng | 3.7825 |
| NPA-003 30 ng | 1.5525 |

TABLE 19
Concentration and MFI

| | | MFI mCherry | |
|---|---|---|---|
| Formulation | | NPA-003 | NPA-005 |
| 25 | ng/well | 11963.25 | 12256.75 |
| 0.25 | ng/well | 1349.75 | 2572.75 |
| 0.025 | ng/well | 459.50 | 534.75 |
| 0.0025 | ng/well | 310.75 | 471.75 |

### Example 13. Manual Injection and Syringe Pump Formulations

[1150] Two formulations of DLin-KC2-DMA and 98N12-5 were prepared by manual injection (MI) and syringe pump injection (SP) and analyzed along with a background sample to compare the MFI of mCherry (mRNA sequence shown in SEQ ID NO: 33898; polyA tail of approximately 160 nucleotides not shown in sequence; 5′cap, Cap1; fully modified with 5-methylcytosine and pseudouridine) of the different formulations. Table 20 shows that the syringe pump formulations had a higher MFI as compared to the manual injection formulations of the same lipid and lipid/RNA ratio.

TABLE 20
Formulations and MFI

| | | Lipid/ | Mean | | |
|---|---|---|---|---|---|
| Formulation | | RNA | size | Method of | |
| # | Lipid | wt/wt | (nm) | formulation | MFI |
| Untreated | N/A | N/A | N/A | N/A | 674.67 |
| Control | | | | | |
| NPA-002 | DLin-KC2- | 15 | 140 nm | MI | 10318.25 |
| | DMA | | PDI: 0.11 | | |
| NPA-002-2 | DLin-KC2- | 15 | 105 nm | SP | 37054.75 |
| | DMA | | PDI: 0.04 | | |
| NPA-003 | DLin-KC2- | 20 | 114 nm | MI | 22037.5 |
| | DMA | | PDI: 0.08 | | |
| NPA-003-2 | DLin-KC2- | 20 | 95 nm | SP | 37868.75 |
| | DMA | | PDI: 0.02 | | |
| NPA-005 | 98N12-5 | 15 | 127 nm | MI | 11504.75 |
| | | | PDI: 0.12 | | |
| NPA-005-2 | 98N12-5 | 15 | 106 nm | SP | 9343.75 |
| | | | PDI: 0.07 | | |
| NPA-006 | 98N12-5 | 20 | 126 nm | MI | 11182.25 |
| | | | PDI: 0.08 | | |
| NPA-006-2 | 98N12-5 | 20 | 93 nm | SP | 5167 |
| | | | PDI: 0.08 | | |

### Example 14. Lipid Nanoparticle Formulations

[1151] Formulations of DLin-DMA, DLin-K-DMA, DLin-KC2-DMA, 98N12-5, C12-200 and DLin-MC3-DMA were incubated at a concentration of 60 ng/well or 62.5 ng/well in a plate of HEK293 and 62.5 ng/well in a plate of HepG2 cells for 24 hours to determine the MFI of mCherry (SEQ ID NO: 33898; polyA tail of approximately 160 nucleotides not shown in sequence; 5′ cap, Cap1; fully modified with 5-methylcytosine and pseudouridine) for each formulation. The formulations tested are outlined in Table 21 below. As shown in Table 22 for the 60 ng/well and Tables 23, 24 and 25 for the 62.5 ng/well, the formulation of NPA-003 and NPA-018 have the highest mCherry MFI and the formulations of NPA-008, NPA-010 and NPA-013 are most the similar to the background sample mCherry MFI value.

TABLE 21
Formulations

| Formulation | | Lipid/RNA | Mean |
|---|---|---|---|
| # | Lipid | wt/wt | size (nm) |
| NPA-001 | DLin-KC2-DMA | 10 | 155 nm |
| | | | PDI: 0.08 |
| NPA-002 | DLin-KC2-DMA | 15 | 140 nm |
| | | | PDI: 0.11 |
| NPA-002-2 | DLin-KC2-DMA | 15 | 105 nm |
| | | | PDI: 0.04 |
| NPA-003 | DLin-KC2-DMA | 20 | 114 nm |
| | | | PDI: 0.08 |
| NPA-003-2 | DLin-KC2-DMA | 20 | 95 nm |
| | | | PDI: 0.02 |
| NPA-005 | 98N12-5 | 15 | 127 nm |
| | | | PDI: 0.12 |
| NPA-006 | 98N12-5 | 20 | 126 nm |
| | | | PDI: 0.08 |
| NPA-007 | DLin-DMA | 15 | 148 nm |
| | | | PDI: 0.09 |
| NPA-008 | DLin-K-DMA | 15 | 121 nm |
| | | | PDI: 0.08 |
| NPA-009 | C12-200 | 15 | 138 nm |
| | | | PDI: 0.15 |
| NPA-010 | DLin-MC3-DMA | 15 | 126 nm |
| | | | PDI: 0.09 |
| NPA-012 | DLin-DMA | 20 | 86 nm |
| | | | PDI: 0.08 |
| NPA-013 | DLin-K-DMA | 20 | 104 nm |
| | | | PDI: 0.03 |
| NPA-014 | C12-200 | 20 | 101 nm |
| | | | PDI: 0.06 |
| NPA-015 | DLin-MC3-DMA | 20 | 109 nm |
| | | | PDI: 0.07 |

TABLE 22
HEK293, 96-well, 60 ng Modified RNA/well

| Formulation | MFI mCherry |
|---|---|
| Untreated | 871.81 |
| NPA-001 | 6407.25 |
| NPA-002 | 14995 |
| NPA-003 | 29499.5 |
| NPA-005 | 3762 |
| NPA-006 | 2676 |
| NPA-007 | 9905.5 |
| NPA-008 | 1648.75 |
| NPA-009 | 2348.25 |
| NPA-010 | 4426.75 |
| NPA-012 | 11466 |
| NPA-013 | 2098.25 |
| NPA-014 | 3194.25 |
| NPA-015 | 14524 |

TABLE 23
HEK293, 62.5 ng/well

| Formulation | MFI mCherry |
|---|---|
| Untreated | 871.81 |
| NPA-001 | 6407.25 |
| NPA-002 | 14995 |
| NPA-003 | 29499.5 |
| NPA-005 | 3762 |
| NPA-006 | 2676 |
| NPA-007 | 9905.5 |
| NPA-008 | 1648.75 |
| NPA-009 | 2348.25 |
| NPA-010 | 4426.75 |
| NPA-012 | 11466 |
| NPA-013 | 2098.25 |
| NPA-014 | 3194.25 |
| NPA-015 | 14524 |

TABLE 24
HEK293, 62.5 ng/well

| Formulation | MFI mCherry |
|---|---|
| Untreated | 295 |
| NPA-007 | 3504 |
| NPA-012 | 8286 |
| NPA-017 | 6128 |
| NPA-003-2 | 17528 |
| NPA-018 | 34142 |
| NPA-010 | 1095 |
| NPA-015 | 5859 |
| NPA-019 | 3229 |

TABLE 25
HepG2, 62.5 ng/well

| | |
|---|---|
| Formulation | MFI mCherry |

Study 1

| | |
|---|---|
| Untreated | 649.94 |
| NPA-001 | 6006.25 |
| NPA-002 | 8705 |
| NPA-002-2 | 15860.25 |
| NPA-003 | 15059.25 |
| NPA-003-2 | 28881 |
| NPA-005 | 1676 |
| NPA-006 | 1473 |
| NPA-007 | 15678 |
| NPA-008 | 2976.25 |
| NPA-009 | 961.75 |
| NPA-010 | 3301.75 |
| NPA-012 | 18333.25 |
| NPA-013 | 5853 |
| NPA-014 | 2257 |
| NPA-015 | 16225.75 |

Study 2

| | |
|---|---|
| Untreated control | 656 |
| NPA-007 | 16798 |
| NPA-012 | 21993 |
| NPA-017 | 20377 |
| NPA-003-2 | 35651 |
| NPA-018 | 40154 |
| NPA-010 | 2496 |
| NPA-015 | 19741 |
| NPA-019 | 16373 |

### Example 15. In Vivo Formulation Studies

[1152] Rodents (n=5) are administered intravenously, subcutaneously or intramuscularly a single dose of a formulation containing a modified mRNA and a lipid. The modified mRNA administered to the rodents is selected from G-CSF (mRNA sequence shown in SEQ ID NO: 33897; polyA tail of approximately 160 nucleotides not shown in sequence; 5′cap, Cap1), erythropoietin (EPO) (mRNA sequence shown in SEQ ID NO: 33900; polyA tail of approximately 160 nucleotides not shown in sequence; 5′cap, Cap1), Factor IX (mRNA sequence shown in SEQ ID NO: 33901; polyA tail of approximately 160 nucleotides not shown in sequence; 5′cap, Cap1) or mCherry (mRNA sequence shown in SEQ ID NO: 33898; polyA tail of approximately 160 nucleotides not shown in sequence; 5′cap, Cap1). The erythropoietin cDNA with the T7 promoter, 5′untranslated region (UTR) and 3′ UTR used in in vitro transcription (IVT) is given in SEQ ID NO: 33902 and SEQ ID NO: 33903.

[1153] Each formulation also contains a lipid which is selected from one of DLin-DMA, DLin-K-DMA, DLin-KC2-DMA, 98N12-5, C12-200, DLin-MC3-DMA, reLNP, ATUPLEX®, DACC and DBTC. The rodents are injected with 100 ug, 10 ug or 1 ug of the formulated modified mRNA and samples are collected at specified time intervals.

[1154] Serum from the rodents administered formulations containing human G-CSF modified mRNA are measured by specific G-CSF ELISA and serum from mice administered human factor IX modified RNA is analyzed by specific factor IX ELISA or chromogenic assay. The liver and spleen from the mice administered with mCherry modified mRNA are analyzed by immunohistochemistry (IHC) or fluorescence-activated cell sorting (FACS). As a control, a group of mice are not injected with any formulation and their serum and tissue are collected analyzed by ELISA, FACS and/or IHC.

### A. Time Course

[1155] The rodents are administered formulations containing at least one modified mRNA to study the time course of protein expression for the administered formulation. The rodents are bled at specified time intervals prior to and after administration of the modified mRNA formulations to determine protein expression and complete blood count. Samples are also collected from the site of administration of rodents administered modified mRNA formulations subcutaneously and intramuscularly to determine the protein expression in the tissue.

### B. Dose Response

[1156] The rodents are administered formulations containing at least one modified mRNA to determine dose response of each formulation. The rodents are bled at specified time intervals prior to and after administration of the modified mRNA formulations to determine protein expression and complete blood count. The rodents are also sacrified to analyze the effect of the modified mRNA formulation on the internal tissue. Samples are also collected from the site of administration of rodents administered modified mRNA formulations subcutaneously and intramuscularly to determine the protein expression in the tissue.

### C. Toxicity

[1157] The rodents are administered formulations containing at least one modified mRNA to study toxicity of each formulation. The rodents are bled at specified time intervals prior to and after administration of the modified mRNA formulations to determine protein expression and complete blood count. The rodents are also sacrificed to analyze the effect of the modified mRNA formulation on the internal tissue. Samples are also collected from the site of administration of rodents administered modified mRNA formulations subcutaneously and intramuscularly to determine the protein expression in the tissue.

### Example 16. PLGA Microsphere Formulations

[1158] Optimization of parameters used in the formulation of PLGA microspheres may allow for tunable release rates and high encapsulation efficiencies while maintaining the integrity of the modified RNA encapsulated in the microspheres. Parameters such as, but not limited to, particle size, recovery rates and encapsulation efficiency may be optimized to achieve the optimal formulation.

A. Synthesis of PLGA microspheres

[1159] Polylacticglycolic acid (PLGA) microspheres were synthesized using the water/oil/water double emulsification methods known in the art using PLGA (Lactel, Cat #B6010-2, inherent viscosity 0.55-0.75, 50:50 LA:GA), polyvinylalcohol (PVA) (Sigma, Cat #348406-25G, MW 13-23k) dichloromethane and water. Briefly, 0.1 ml of water (W1) was added to 2 ml of PLGA dissolved in dichloromethane (DCM) (O1) at concentrations ranging from 50-200 mg/ml of PLGA. The W1/O1 emulsion was homogenized (IKA Ultra-Turrax Homogenizer, T18) for 30 seconds at speed 4 (˜15,000 rpm). The W1/O1 emulsion was then added to 100 to 200 ml of 0.3 to 1% PVA (W2) and homogenized for 1 minute at varied speeds. Formulations were left to stir for 3 hours and then washed by centrifugation (20-25 min, 4,000 rpm, 4° C.). The supernatant was discarded and the PLGA pellets were resuspended in 5-10 ml of water, which was repeated 2×. Average particle size (represents 20-30 particles) for each formulation was determined by microscopy after washing. Table 26 shows that an increase in the PLGA concentration led to larger sized microspheres. A PLGA concentration of 200 mg/mL gave an average particle size of 14.8 μm, 100 mg/mL was 8.7 μm, and 50 mg/mL of PLGA gave an average particle size of 4.0 μm.

TABLE 26
Varied PLGA Concentration

| | | PLGA | | PVA | | |
|---|---|---|---|---|---|---|
| | O1 | Concen- | W2 | Concen- | | Average |
| Sample | Volume | tration | Volume | tration | | Size |
| ID | (mL) | (mg/mL) | (mL) | (%) | Speed | (μm) |
| 1 | 2 | 200 | 100 | 0.3 | 5 | 14.8 |
| 2 | 2 | 100 | 100 | 0.3 | 5 | 8.7 |
| 3 | 2 | 50 | 100 | 0.3 | 5 | 4.0 |

[1160] Table 27 shows that decreasing the homogenization speed from 5 (˜20,000 rpm) to speed 4 (˜15,000 rpm) led to an increase in particle size from 14.8 μm to 29.7 μm.

TABLE 27
Varied Homogenization Speed

| | | PLGA | | PVA | | |
|---|---|---|---|---|---|---|
| | O1 | Concen- | W2 | Concen- | | Average |
| Sample | Volume | tration | Volume | tration | | Size |
| ID | (mL) | (mg/mL) | (mL) | (%) | Speed | (μm) |
| 1 | 2 | 200 | 100 | 0.3 | 5 | 14.8 |
| 4 | 2 | 200 | 100 | 0.3 | 4 | 29.7 |

[1161] Table 28 shows that increasing the W2 volume (i.e. increasing the ratio of W2:O1 from 50:1 to 100:1), decreased average particle size slightly. Altering the PVA concentration from 0.3 to 1 wt % had little impact on PLGA microsphere size.

TABLE 28
Varied W2 Volume and Concentration

| | | PLGA | | PVA | | |
|---|---|---|---|---|---|---|
| | O1 | Concen- | W2 | Concen- | | Average |
| Sample | Volume | tration | Volume | tration | | Size |
| ID | (mL) | (mg/mL) | (mL) | (%) | Speed | (μm) |
| 1 | 2 | 200 | 100 | 0.3 | 5 | 14.8 |
| 5 | 2 | 200 | 200 | 0.3 | 5 | 11.7 |
| 6 | 2 | 200 | 190 | 0.3 | 5 | 11.4 |
| 7 | 2 | 200 | 190 | 1.0 | 5 | 12.3 |

B. Encapsulation of Modified mRNA

[1162] Modified G-CSF mRNA (mRNA sequence shown in SEQ ID NO: 33897; polyA tail of approximately 160 nucleotides not shown in sequence; 5′cap, Cap1; fully modified with 5-methylcytosine and pseudouridine) was dissolved in water at a concentration of 2 mg/ml (W3). Three batches of PLGA microsphere formulations were made as described above with the following parameters: 0.1 ml of W3 at 2 mg/ml, 1.6 ml of O1 at 200 mg/ml, 160 ml of W2 at 1%, and homogenized at a speed of 4 for the first emulsion (W3/O1) and homogenized at a speed of 5 for the second emulstion (W3/O1/W2). After washing by centrifugation, the formulations were frozen in liquid nitrogen and then lyophilized for 3 days. To test the encapsulation efficiency of the formulations, the lyophilized material was deformulated in DCM for 6 hours followed by an overnight extraction in water. The modified RNA concentration in the samples was then determined by OD260. Encapsulation efficiency was calculated by taking the actual amount of modified RNA and dividing by the starting amount of modified RNA. In the three batches tested, there was an encapsulation efficiency of 59.2, 49.8 and 61.3.

C. Integrity of Modified mRNA Encapsulated in PLGA Microspheres

[1163] Modified Factor IX mRNA (mRNA sequence shown in SEQ ID NO: 33901; polyA tail of approximately 160 nucleotides not shown in sequence; 5′cap, Cap1; fully modified with 5-methylcytosine and pseudouridine) was dissolved in water at varied concentrations (W4) to vary the weight percent loading in the formulation (mg modified RNA/mg PLGA*100) and to determine encapsulation efficiency. The parameters in Table 28 were used to make four different batches of PLGA microsphere formulations with a homogenization speed of 4 for the first emulstion (W4/O1) and a homogenization speed of 5 for the second emulsion (W4/O1/W2).

TABLE 28
Factor IX PLGA Microsphere Formulation Parameters

| | | Factor | Factor | | PLGA | | PVA | Weight |
|---|---|---|---|---|---|---|---|---|
| | W4 | IX Con- | IX | O1 | Con- | W2 | Con- | % |
| | Volume | centration | Amount | Volume | centration | Volume | centration | (wt %) |
| ID | (uL) | (mg/ml) | (ug) | (ml) | (mg/ml) | (ml) | (%) | Loading |
| A | 100 | 2.0 | 200.0 | 2.0 | 200 | 200 | 1.0 | 0.05 |
| B | 100 | 4.0 | 400.0 | 2.0 | 200 | 200 | 1.0 | 0.10 |
| C | 400 | 2.0 | 800.0 | 2.0 | 200 | 200 | 1.0 | 0.20 |
| D | 400 | 4.0 | 1600.0 | 2.0 | 200 | 200 | 1.0 | 0.40 |

[1164] After lyophilization, PLGA microspheres were weighed out in 2 ml eppendorf tubes to correspond to ˜10 μg of modified RNA. Lyophilization was found to not destroy the overall structure of the PLGA microspheres. To increase weight percent loading (wt %) for the PLGA microspheres, increasing amounts of modified RNA were added to the samples. PLGA microspheres were deformulated by adding 1.0 ml of DCM to each tube and then shaking the samples for 6 hours. For modified RNA extraction, 0.5 ml of water was added to each sample and the samples were shaken overnight before the concentration of modified RNA in the samples was determined by OD260. To determine the recovery of the extraction process, unformulated Factor IX modified mRNA (mRNA sequence shown in SEQ ID NO: 33901; polyA tail of approximately 160 nucleotides not shown in sequence; 5′cap, Cap1; fully modified with 5-methylcytosine and pseudouridine) (deformulation control) was spiked into DCM and was subjected to the deformulation process. Table 29 shows the loading and encapsulation efficiency for the samples. All encapsulation efficiency samples were normalized to the deformulation control.

TABLE 29
Weight Percent Loading and Encapsulation Efficiency

| | Theoretical | Actual | |
|---|---|---|---|
| | modified RNA | modified RNA | Encapsulation |
| ID | loading (wt %) | loading (wt %) | Efficiency (%) |
| A | 0.05 | 0.06 | 97.1 |
| B | 0.10 | 0.10 | 85.7 |
| C | 0.20 | 0.18 | 77.6 |
| D | 0.40 | 0.31 | 68.1 |
| Control | — | — | 100.0 |

D. Release Study of Modified mRNA Encapsulated in PLGA Microspheres

[1165] PLGA microspheres formulated with Factor IX modified mRNA (mRNA sequence shown in SEQ ID NO: 33901; polyA tail of approximately 160 nucleotides not shown in sequence; 5′cap, Cap1; fully modified with 5-methylcytosine and pseudouridine) were deformulated as described above and the integrity of the extracted modified RNA was determined by automated electrophoresis (Bio-Rad Experion). The extracted modified mRNA was compared against unformulated modified mRNA and the deformulation control in order to test the integrity of the encapsulated modified mRNA. As shown in FIG. 4, the majority of modRNA was intact for batch ID A, B, C and D, for the deformulated control (Deform control) and the unformulated control (Unform control).

E. Protein Expression of Modified mRNA Encapsulated in PLGA Microspheres

[1166] PLGA microspheres formulated with Factor IX modified mRNA (mRNA sequence shown in SEQ ID NO: 33901; polyA tail of approximately 160 nucleotides not shown in sequence; 5′cap, Cap1; fully modified with 5-methylcytosine and pseudouridine) were deformulated as described above and the protein expression of the extracted modified RNA was determined by an in vitro transfection assay. HEK293 cells were reverse transfected with 250 ng of Factor IX modified RNA complexed with RNAiMAX (Invitrogen) in triplicate.

[1167] Factor IX modified RNA was diluted in nuclease-free water to a concentration of 25 ng/μl and RNAiMAX was diluted 13.3× in serum-free EMEM. Equal volumes of diluted modified RNA and diluted RNAiMAX were mixed together and were allowed to stand for 20 to 30 minutes at room temperature. Subsequently, 20 μl of the transfection mix containing 250 ng of Factor IX modified RNA was added to 80 μl of a cell suspension containing 30,000 cells. Cells were then incubated for 16 h in a humidified 37° C./5% CO2 cell culture incubator before harvesting the cell culture supernatant. Factor IX protein expression in the cell supernatant was analyzed by an ELISA kit specific for Factor IX (Molecular Innovations, Cat #HFIXKT-TOT) and the protein expression is shown in Table 30. In all PLGA microsphere batches tested, Factor IX modified RNA remained active and expressed Factor IX protein after formulation in PLGA microspheres and subsequent deformulation.

TABLE 30
Protein Expression

| | Factor IX Protein |
|---|---|
| Sample | Expression (ng/ml) |
| Batch A | 0.83 |
| Batch B | 1.83 |
| Batch C | 1.54 |
| Batch D | 2.52 |
| Deformulated Control | 4.34 |
| Unformulated Control | 3.35 |

F. Release Study of Modified mRNA Encapsulated in PLGA Microspheres

[1168] PLGA micropsheres formulated with Factor IX modified RNA (mRNA sequence shown in SEQ ID NO: 33901; polyA tail of approximately 160 nucleotides not shown in sequence; 5′cap, Cap1; fully modified with 5-methylcytosine and pseudouridine) were resuspended in water to a PLGA microsphere concentration of 24 mg/ml. After resuspension, 150 ul of the PLGA microsphere suspension was aliquoted into eppendorf tubes. Samples were kept incubating and shaking at 37° C. during the course of the study. Triplicate samples were pulled at 0.2, 1, 2, 8, 14, and 21 days. To determine the amount of modified RNA released from the PLGA microspheres, samples were centrifuged, the supernatant was removed, and the modified RNA concentration in the supernatant was determined by OD 260. The percent release, shown in Table 31, was calculated based on the total amount of modified RNA in each sample. After 31 days, 96% of the Factor IX modified RNA was released from the PLGA microsphere formulations.

TABLE 31
Percent Release

| Time (days) | % Release |
|---|---|
| 0 | 0.0 |
| 0.2 | 27.0 |
| 1 | 37.7 |
| 2 | 45.3 |
| 4 | 50.9 |
| 8 | 57.0 |
| 14 | 61.8 |
| 21 | 75.5 |
| 31 | 96.4 |

### G. Particle Size Reproducibility of PLGA Microspheres

[1169] Three batches of Factor IX modified mRNA (mRNA sequence shown in SEQ ID NO: 33901; polyA tail of approximately 160 nucleotides not shown in sequence; 5′cap, Cap1; fully modified with 5-methylcytosine and pseudouridine) PLGA microspheres were made using the same conditions described for Batch D, shown in Table 28, (0.4 ml of W4 at 4 mg/ml, 2.0 ml of O1 at 200 mg/ml, 200 ml of W2 at 1%, and homogenized at a speed of 5 for the W4/O1/W2 emulsion). To improve the homogeneity of the PLGA microsphere suspension, filtration was incorporated prior to centrifugation. After stirring for 3 hours and before centrifuging, all formulated material was passed through a 100 μm nylon mesh strainer (Fisherbrand Cell Strainer, Cat #22-363-549) to remove larger aggregates. After washing and resuspension with water, 100-200 μl of a PLGA microspheres sample was used to measure particle size of the formulations by laser diffraction (Malvern Mastersizer2000). The particle size of the samples is shown in Table 32.

TABLE 32
Particle Size Summary

| | | | | Volume | |
|---|---|---|---|---|---|
| | | | | Weighted | |
| ID | D10 (μm) | D50 (μm) | D90 (μm) | Mean (um) | Filtration |
| Control | 19.2 | 62.5 | 722.4 | 223.1 | No |
| A | 9.8 | 31.6 | 65.5 | 35.2 | Yes |
| B | 10.5 | 32.3 | 66.9 | 36.1 | Yes |
| C | 10.8 | 35.7 | 79.8 | 41.4 | Yes |

[1170] Results of the 3 PLGA microsphere batches using filtration were compared to a PLGA microsphere batch made under the same conditions without filtration. The inclusion of a filtration step before washing reduced the mean particle size and demonstrated a consistent particle size distribution between 3 PLGA microsphere batches.

### H. Serum Stability of Factor IX PLGA Microspheres

[1171] Factor IX mRNA mRNA (mRNA sequence shown in SEQ ID NO: 33901; polyA tail of approximately 160 nucleotides not shown in sequence; 5′cap, Cap1; fully modified with 5-methylcytosine and pseudouridine) in buffer (TE) or 90% serum (Se), or Factor IX mRNA in PLGA in buffer, 90% serum or 1% serum was incubated in buffer, 90% serum or 1% serum at an mRNA concentration of 50 ng/ul in a total volume of 70 ul. The samples were removed at 0, 30, 60 or 120 minutes. RNases were inactivated with proteinase K digestion for 20 minutes at 55° C. by adding 25 ul of 4× proteinase K buffer (0.4 ml 1M TRIS-HCl pH 7.5, 0.1 ml 0.5M EDTA, 0.12 ml 5M NaCl, and 0.4 ml 10% SDS) and 8 ul of proteinase K at 20 mg/ml. The Factor IX mRNA was precipitated (add 250 ul 95% ethanol for 1 hour, centrifuge for 10 min at 13 k rpm and remove supernatant, add 200 ul 70% ethanol to the pellet, centrifuge again for 5 min at 13 k rpm and remove supernatant and resuspend the pellet in 70 ul water) or extracted from PLGA microspheres (centrifuge 5 min at 13k rpm and remove supernatant, wash pellet with 1 ml water, centrifuge 5 min at 13k rpm and remove supernatant, add 280 ul dichloromethane to the pellet and shake for 15 minutes, add 70 ul water and then shake for 2 hours and remove the aqueous phase) before being analyzed by bioanalyzer. PLGA microspheres protect Factor IX modified mRNA from degradation in 90% and 1% serum over 2 hours. Factor IX modified mRNA completely degrades in 90% serum at the initial time point.

### Example 17. Lipid Nanoparticle In Vivo Studies

[1172] G-CSF (cDNA with the T7 promoter, 5′ Untranslated region (UTR) and 3′UTR used in in vitro transcription is given in SEQ ID NO: 33896. mRNA sequence shown in SEQ ID NO: 33897; polyA tail of approximately 160 nucleotides not shown in sequence; 5′cap, Cap 1; fully modified with 5-methylcytosine and pseudouridine) and Factor IX (cDNA with the T7 promoter, 5′ UTR and 3′UTR used in in vitro transcription is given in SEQ ID NO: 33904. mRNA sequence shown in SEQ ID NO: 33901; polyA tail of approximately 160 nucleotides not shown in sequence; 5′cap, Cap 1; fully modified with 5-methylcytosine and pseudouridine) modified mRNA were formulated as lipid nanoparticles (LNPs) using the syringe pump method. The LNPs were formulated at a 20:1 weight ratio of total lipid to modified mRNA with a final lipid molar ratio of 50:10:38.5:1.5 (DLin-KC2-DMA: DSPC: Cholesterol: PEG-c-DOMG). Formulations, listed in Table 33, were characterized by particle size, zeta potential, and encapsulation.

TABLE 33
Formulations

| Formulation # | NPA-029-1 | NPA-030-1 |
|---|---|---|
| Modified mRNA | Factor IX | G-CSF |
| Mean size | 91 nm | 106 nm |
| | PDI: 0.04 | PDI: 0.06 |
| Zeta at pH 7.4 | 1.8 mV | 0.9 mV |
| Encaps. | 92% | 100% |
| (RiboGr) | | |

[1173] LNP formulations were administered to mice (n=5) intravenously at a modified mRNA dose of 100, 10, or 1 ug. Mice were sacrificed at 8 hrs after dosing. Serum was collected by cardiac puncture from mice that were administered with G-CSF or Factor IX modified mRNA formulations. Protein expression was determined by ELISA.

[1174] There was no significant body weight loss (<5%) in the G-CSF or Factor IX dose groups. Protein expression for G-CSF or Factor IX dose groups was determined by ELISA from a standard curve. Serum samples were diluted (about 20-2500× for G-CSF and about 10-250× for Factor IX) to ensure samples were within the linear range of the standard curve. As shown in Table 34, G-CSF protein expression determined by ELISA was approximately 17, 1200, and 4700 ng/ml for the 1, 10, and 100 ug dose groups, respectively. As shown in Table 35, Factor IX protein expression determined by ELISA was approximately 36, 380, and 3000-11000 ng/ml for the 1, 10, and 100 ug dose groups, respectively.

TABLE 34
G-CSF Protein Expression

| Dose (ug) | Conc (ng/ml) | Dilution Factor | Sample Volume |
|---|---|---|---|
| 1 | 17.73 | 20x | 5 ul |
| 10 | 1204.82 | 2500x | 0.04 ul |
| 100 | 4722.20 | 2500x | 0.04 ul |

TABLE 35
Factor IX Protein Expression

| Dose (ug) | Conc (ng/ml) | Dilution Factor | Sample Volume |
|---|---|---|---|
| 1 | 36.05 | 10x | 5 ul |
| 10 | 383.04 | 10x | 5 ul |
| 100* | 3247.75 | 50x | 1 ul |
| 100* | 11177.20 | 250x | 0.2 ul |

[1175] As shown in Table 36, the LNP formulations described above have about a 10,000-100,000-fold increase in protein production compared to an administration of an intravenous (IV)-lipoplex formulation for the same dosage of modified mRNA and intramuscular (IM) or subcutaneous (SC) administration of the same dose of modified mRNA in saline. As used in Table 36, the symbol “˜” means about.

TABLE 36
Protein Production

| | | Serum Concentration (pg/ml) |
|---|---|---|
| G-CSF | Dose (ug) | 8-12 hours after administration |
| IM | 100 | ~20-80 |
| SC | 100 | ~10-40 |
| IV (Lipoplex) | 100 | ~30 |
| IV (LNP) | 100 | ~5,000,000 |
| IV (LNP) | 10 | ~1,000,000 |
| IV (LNP) | 1 | ~20,000 |

| | | Serum Concentration (ng/ml) | |
|---|---|---|---|
| Factor IX | Dose (ug) | 8-12 hours after administration | |
| IM | 2 x 100 | ~1.6 | ng/ml |
| IV (LNP) | 100 | ~3,000-10,000 | ng/ml |
| IV (LNP) | 10 | ~400 | ng/ml |
| IV (LNP) | 1 | ~40 | ng/ml |

### Materials and Methods for Examples 18-23

[1176] G-CSF (mRNA sequence shown in SEQ ID NO: 33897; polyA tail of approximately 160 nucleotides not shown in sequence; 5′cap, Cap 1; fully modified with 5-methylcytosine and pseudouridine) and EPO (mRNA sequence shown in SEQ ID NO: 33900; polyA tail of approximately 160 nucleotides not shown in sequence; 5′cap, Cap 1; fully modified with 5-methylcytosine and pseudouridine) modified mRNA were formulated as lipid nanoparticles (LNPs) using the syringe pump method. The LNPs were formulated at a 20:1 weight ratio of total lipid to modified mRNA with a final lipid molar ratio of 50:10:38.5:1.5 (DLin-KC2-DMA: DSPC: Cholesterol: PEG-c-DOMG). Formulations, listed in Table 37, were characterized by particle size, zeta potential, and encapsulation.

TABLE 37
Formulations

| Formulation # | NPA-030-2 | NPA-060-1 |
|---|---|---|
| Modified mRNA | G-CSF | EPO |
| Mean size | 84 nm | 85 nm |
| | PDI: 0.04 | PDI: 0.03 |
| Zeta at pH 7.4 | 0.8 mV | 1.5 mV |
| Encapsulation | 95% | 98% |
| (RiboGreen) | | |

### Example 18. Lipid Nanoparticle In Vivo Studies with Modified mRNA

[1177] LNP formulations, shown in Table 37(above), were administered to rats (n=5) intravenously (IV), intramuscularly (IM) or subcutaneously (SC) at a single modified mRNA dose of 0.05 mg/kg. A control group of rats (n=4) was untreated. The rats were bled at 2 hours, 8 hours, 24 hours, 48 hours and 96 hours and after they were administered with G-CSF or EPO modified mRNA formulations to determine protein expression using ELISA. The rats administered EPO modified mRNA intravenously were also bled at 7 days.

[1178] As shown in Table 38, EPO protein expression in the rats intravenously administered modified EPO mRNA was detectable out to 5 days. G-CSF in the rats intravenously administered modified G-CSF mRNA was detectable to 7 days. Subcutaneous and intramuscular administration of EPO modified mRNA was detectable to at least 24 hours and G-CSF modified mRNA was detectable to at least 8 hours. In Table 38, “OSC” refers to values that were outside the standard curve and “NT” means not tested.

TABLE 38
G-CSF and EPO Protein Expression

| | | EPO Serum | G-CSF Serum |
|---|---|---|---|
| Route | Time | Concentration (pg/ml) | Concentration (pg/ml) |
| IV | 2 hours | 36,981.0 | 31,331.9 |
| IV | 8 hours | 62,053.3 | 70,532.4 |
| IV | 24 hours | 42,077.0 | 5,738.6 |
| IV | 48 hours | 5,561.5 | 233.8 |
| IV | 5 days | 0.0 | 60.4 |
| IV | 7 days | 0.0 | NT |
| IM | 2 hours | 1395.4 | 1620.4 |
| IM | 8 hours | 8974.6 | 7910.4 |
| IM | 24 hours | 4678.3 | 893.3 |
| IM | 48 hours | NT | OSC |
| IM | 5 days | NT | OSC |
| SC | 2 hours | 386.2 | 80.3 |
| SC | 8 hours | 985.6 | 164.2 |
| SC | 24 hours | 544.2 | OSC |
| SC | 48 hours | NT | OSC |
| SC | 5 days | NT | OSC |
| Untreated | All bleeds | 0 | 0 |

### Example 19. Time Course In Vivo Study

[1179] LNP formulations, shown in 37 (above), were administered to mice (n=5) intravenously (IV) at a single modified mRNA dose of 0.5, 0.05 or 0.005 mg/kg. The mice were bled at 8 hours, 24 hours, 72 hours and 6 days after they were administered with G-CSF or EPO modified mRNA formulations to determine protein expression using ELISA.

[1180] As shown in Table 39, EPO and G-CSF protein expression in the mice administered with the modified mRNA intravenously was detectable out to 72 hours for the mice dosed with 0.005 mg/kg and 0.05 mg/kg of modified mRNA and out to 6 days for the mice administered the EPO modified mRNA. In Table 39, “>” means greater than and “ND” means not detected.

TABLE 39
Protein Expression

| | | EPO Serum | G-CSF Serum |
|---|---|---|---|
| | | Concentration | Concentration |
| Dose (mg/kg) | Time | (pg/ml) | (pg/ml) |
| 0.005 | 8 hours | 12,508.3 | 11,550.6 |
| 0.005 | 24 hours | 6,803.0 | 5,068.9 |
| 0.005 | 72 hours | ND | ND |
| 0.005 | 6 days | ND | ND |
| 0.05 | 8 hours | 92,139.9 | 462,312.5 |
| 0.05 | 24 hours | 54,389.4 | 80,903.8 |
| 0.05 | 72 hours | ND | ND |
| 0.05 | 6 days | ND | ND |
| 0.5 | 8 hours | 498,515.3 | >1,250,000 |
| 0.5 | 24 hours | 160,566.3 | 495,812.5 |
| 0.5 | 72 hours | 3,492.5 | 1,325.6 |
| 0.5 | 6 days | 21.2 | ND |

### Example 20. LNP Formulations In Vivo Study in Rodents

### A. LNP Formulations in Mice

[1181] LNP formulations, shown in Table 37 (above), were administered to mice (n=4) intravenously (IV) at a single modified mRNA dose 0.05 mg/kg or 0.005 mg/kg. There was also 3 control groups of mice (n=4) that were untreated. The mice were bled at 2 hours, 8 hours, 24 hours, 48 hours and 72 hours after they were administered with G-CSF or EPO modified mRNA formulations to determine the protein expression. Protein expression of G-CSF and EPO were determined using ELISA.

[1182] As shown in Table 40, EPO and G-CSF protein expression in the mice was detectable at least out to 48 hours for the mice that received a dose of 0.005 mg/kg modified RNA and 72 hours for the mice that received a dose of 0.05 mg/kg modified RNA. In Table 40, “OSC” refers to values that were outside the standard curve and “NT” means not tested.

TABLE 40
Protein Expression in Mice

| | | EPO Serum | G-CSF Serum |
|---|---|---|---|
| | | Concentration | Concentration |
| Dose (mg/kg) | Time | (pg/ml) | (pg/ml) |
| 0.005 | 2 hours | OSC | 3,447.8 |
| 0.005 | 8 hours | 1,632.8 | 11,454.0 |
| 0.005 | 24 hours | 1,141.0 | 4,960.2 |
| 0.005 | 48 hours | 137.4 | 686.4 |
| 0.005 | 72 hours | 0 | NT |
| 0.05 | 2 hours | 10,027.3 | 20,951.4 |
| 0.05 | 8 hours | 56,547.2 | 70,012.8 |
| 0.05 | 24 hours | 25,027.3 | 19,356.2 |
| 0.05 | 48 hours | 1,432.3 | 1,963.0 |
| 0.05 | 72 hours | 82.2 | 47.3 |

### B. LNP Formulations in Rats

[1183] LNP formulations, shown in Table 37 (above), are administered to rats (n=4) intravenously (IV) at a single modified mRNA dose 0.05 mg/kg. There is also a control group of rats (n=4) that are untreated. The rats are bled at 2 hours, 8 hours, 24 hours, 48 hours, 72 hours, 7 days and 14 days after they were administered with G-CSF or EPO modified mRNA formulations to determine the protein expression. Protein expression of G-CSF and EPO are determined using ELISA.

### Example 21. Early Time Course Study of LNPs

[1184] LNP formulations, shown in Table 37 (above), are administered to mammals intravenously (IV), intramuscularly (IM) or subcutaneously (SC) at a single modified mRNA dose of 0.5 mg/kg, 0.05 mg/kg or 0.005 mg/kg. A control group of mammals are not treated. The mammals are bled at 5 minutes, 10 minutes, 20 minutes, 30 minutes, 45 minutes, 1 hour, 1.5 hours and/or 2 hours after they are administered with the modified mRNA LNP formulations to determine protein expression using ELISA. The mammals are also bled to determine the complete blood count such as the granulocyte levels and red blood cell count.

### Example 22. Non-Human Primate In Vivo Study

[1185] LNP formulations, shown in Table 37 (above), were administered to non-human primates (NHP) (cynomolgus monkey) (n=2) as a bolus intravenous injection (IV) over approximately 30 seconds using a hypodermic needle, which may be attached to a syringe/abbocath or butterfly if needed. The NHP were administered a single modified mRNA IV dose of 0.05 mg/kg of EPO or G-CSF or 0.005 mg/kg of EPO in a dose volume of 0.5 mL/kg. The NHPs were bled 5-6 days before dosing with the modified mRNA LNP formulations to determine protein expression in the serum and a baseline complete blood count. After administration with the modified mRNA formulation the NHP were bled at 8, 24, 48 and 72 hours to determined protein expression. At 24 and 72 hours after administration the complete blood count of the NHP was also determined. Protein expression of G-CSF and EPO was determined by ELISA. Urine from the NHPs was collected over the course of the entire experiment and analyzed to evaluate clinical safety. Samples were collected from the NHPs after they were administered with G-CSF or EPO modified mRNA formulations to determine protein expression using ELISA. Clinical chemistry, hematology, urinalysis and cytokines of the non-human primates were also analyzed.

[1186] As shown in Table 41, EPO protein expression in the NHPs administered 0.05 mg/kg is detectable out to 72 hours and the 0.005 mg/kg dosing of the EPO formulation is detectable out to 48 hours. In Table 41, the “<” means less than a given value. G-CSF protein expression was seen out to 24 hours after administration with the modified mRNA formulation. Preliminarily, there was an increase in granulocytes and reticulocytes levels seen in the NUP after administration with the modified mRNA formulations.

TABLE 41
Protein Expression in Non-Human Primates

| | | | Female NHP | Male NHP | Average |
|---|---|---|---|---|---|
| | | | Serum | Serum | Serum |
| | | | Concen- | Concen- | Conen- |
| Modified | Dose | | tration | tration | tration |
| mRNA | (mg/kg) | Time | (pg/ml) | (pg/ml) | (pg/ml) |
| G-CSF | 0.05 | Pre-bleed | 0 | 0 | 0 |
| | | 8 hours | 3289 | 1722 | 2,506 |
| | | 24 hours | 722 | 307 | 515 |
| | | 48 hours | 0 | 0 | 0 |
| | | 72 hours | 0 | 0 | 0 |
| EPO | 0.05 | Pre-bleed | 0 | 0 | 0 |
| | | 8 hours | 19,858 | 7,072 | 13,465 |
| | | 24 hours | 18,178 | 4,913 | 11,546 |
| | | 48 hours | 5,291 | 498 | 2,895 |
| | | 72 hours | 744 | 60 | 402 |
| EPO | 0.005 | Pre-bleed | 0 | 0 | 0 |
| | | 8 hours | 523 | 250 | 387 |
| | | 24 hours | 302 | 113 | 208 |
| | | 48 hours | <7.8 | <7.8 | <7.8 |
| | | 72 hours | 0 | 0 | 0 |

### Example 23. Non-Human Primate In Vivo Study for G-CSF and EPO

[1187] LNP formulations, shown in Table 37 (above), were administered to non-human primates (NHP) (cynomolgus monkey) (n=2) as intravenous injection (IV). The NHP were administered a single modified mRNA IV dose of 0.5 mg/kg, 0.05 mg/kg or 0.005 mg/kg of G-CSF or EPO in a dose volume of 0.5 mL/kg. The NHPs were bled before dosing with the modified mRNA LNP formulations to determine protein expression in the serum and a baseline complete blood count. After administration with the G-CSF modified mRNA formulation the NHP were bled at 8, 24, 48 and 72 hours to determined protein expression. After administration with the EPO modified mRNA formulation the NHP were bled at 8, 24, 48, 72 hours and 7 days to determined protein expression.

[1188] Samples collected from the NHPs after they were administered with G-CSF or EPO modified mRNA formulations were analyzed by ELISA to determine protein expression. Neutrophil and reticulocyte count was also determined pre-dose, 24 hours, 3 days, 7 days, 14 days and 18 days after administration of the modified G-CSF or EPO formulation.

[1189] As shown in Table 42, G-CSF protein expression was not detected beyond 72 hours. In Table 42, “<39” refers to a value below the lower limit of detection of 39 pg/ml.

TABLE 42
G-CSF Protein Expression

| | | | Female NHP | Male NHP |
|---|---|---|---|---|
| | | | Serum G-CSF | Serum G-CSF |
| Modified | Dose | | Concentration | Concentration |
| mRNA | (mg/kg) | Time | (pg/ml) | (pg/ml) |
| G-CSF | 0.5 | Pre-bleed | <39 | <39 |
| | | 8 hours | 43,525 | 43,594 |
| | | 24 hours | 11,374 | 3,628 |
| | | 48 hours | 1,100 | 833 |
| | | 72 hours | <39 | 306 |
| G-CSF | 0.05 | Pre-bleed | <39 | <39 |
| | | 8 hours | 3,289 | 1,722 |
| | | 24 hours | 722 | 307 |
| | | 48 hours | <39 | <39 |
| | | 72 hours | <39 | <39 |
| G-CSF | 0.005 | Pre-bleed | <39 | <39 |
| | | 8 hours | 559 | 700 |
| | | 24 hours | 155 | <39 |
| | | 48 hours | <39 | <39 |
| | | 72 hours | <39 | <39 |

[1190] As shown in Table 43, EPO protein expression was not detected beyond 7 days. In Table 43, “<7.8” refers to a value below the lower limit of detection of 7.8 pg/ml.

TABLE 43
EPO Protein Expression

| | | | Female NHP | Male NHP |
|---|---|---|---|---|
| | | | Serum EPO | Serum EPO |
| Modified | Dose | | Concentration | Concentration |
| mRNA | (mg/kg) | Time | (pg/ml) | (pg/ml) |
| EPO | 0.5 | Pre-bleed | <7.8 | <7.8 |
| | | 8 hours | 158,771 | 119,086 |
| | | 24 hours | 133,978 | 85,825 |
| | | 48 hours | 45,250 | 64,793 |
| | | 72 hours | 15,097 | 20,407 |
| | | 7 days | <7.8 | <7.8 |
| EPO | 0.05 | Pre-bleed | <7.8 | <7.8 |
| | | 8 hours | 19,858 | 7,072 |
| | | 24 hours | 18,187 | 4,913 |
| | | 48 hours | 5,291 | 498 |
| | | 72 hours | 744 | 60 |
| | | 7 days | <7.8 | <7.8 |
| EPO | 0.005 | Pre-bleed | <7.8 | <7.8 |
| | | 8 hours | 523 | 250 |
| | | 24 hours | 302 | 113 |
| | | 48 hours | 11 | 29 |
| | | 72 hours | <7.8 | <7.8 |
| | | 7 days | <7.8 | <7.8 |

[1191] As shown in Table 44, there was an increase in neutrophils in all G-CSF groups relative to pre-dose levels.

TABLE 44
Pharmacologic Effect of G-CSF mRNA in NHP

| | | Male NHP | Female NHP | Male NHP | Female NHP |
|---|---|---|---|---|---|
| | | (G-CSF) | (G-CSF) | (EPO) | (EPO) |
| Dose | | Neutrophils | Neutrophils | Neutrophils | Neutrophils |
| (mg/kg) | Time | (10⁹/L) | (10⁹/L) | (10⁹/L) | (10⁹/L) |
| 0.5 | Pre-dose | 1.53 | 1.27 | 9.72 | 1.82 |
| | 24 hours | 14.92 | 13.96 | 7.5 | 11.85 |
| | 3 days | 9.76 | 13.7 | 11.07 | 5.22 |
| | 7 days | 2.74 | 3.81 | 11.8 | 2.85 |
| | 14/18 days | 2.58 | 1.98 | 7.16 | 2.36 |
| 0.05 | Pre-dose | 13.74 | 3.05 | 0.97 | 2.15 |
| | 24 hours | 19.92 | 29.91 | 2.51 | 2.63 |
| | 3 days | 7.49 | 10.77 | 1.73 | 4.08 |
| | 7 days | 4.13 | 3.8 | 1.23 | 2.77 |
| | 14/18 days | 3.59 | 1.82 | 1.53 | 1.27 |
| 0.005 | Pre-dose | 1.52 | 2.54 | 5.46 | 5.96 |
| | 24 hours | 16.44 | 8.6 | 5.37 | 2.59 |
| | 3 days | 3.74 | 1.78 | 6.08 | 2.83 |
| | 7 days | 7.28 | 2.27 | 3.51 | 2.23 |
| | 14/18 days | 4.31 | 2.28 | 1.52 | 2.54 |

[1192] As shown in Table 45, there was an increase in reticulocytes in all EPO groups 3 days to 14/18 days after dosing relative to reticulocyte levels 24 hours after dosing.

TABLE 45
Pharmacologic Effect of EPO mRNA on Neutrophil Count

| | | Male NHP | Female NHP | Male NHP | Female NHP |
|---|---|---|---|---|---|
| | | (G-CSF) | (G-CSF) | (EPO) | (EPO) |
| Dose | | Neutrophils | Neutrophils | Neutrophils | Neutrophils |
| (mg/kg) | Time | (10¹²/L) | (10¹²/L) | (10¹²/L) | (10¹²/L) |
| 0.5 | Pre-dose | 0.067 | 0.055 | 0.107 | 0.06 |
| | 24 hours | 0.032 | 0.046 | 0.049 | 0.045 |
| | 3 days | 0.041 | 0.017 | 0.09 | 0.064 |
| | 7 days | 0.009 | 0.021 | 0.35 | 0.367 |
| | 14/18 days | 0.029 | 0.071 | 0.066 | 0.071 |
| 0.05 | Pre-dose | 0.055 | 0.049 | 0.054 | 0.032 |
| | 24 hours | 0.048 | 0.046 | 0.071 | 0.04 |
| | 3 days | 0.101 | 0.061 | 0.102 | 0.105 |
| | 7 days | 0.157 | 0.094 | 0.15 | 0.241 |
| | 14/18 days | 0.107 | 0.06 | 0.067 | 0.055 |
| 0.005 | Pre-dose | 0.037 | 0.06 | 0.036 | 0.052 |
| | 24 hours | 0.037 | 0.07 | 0.034 | 0.061 |
| | 3 days | 0.037 | 0.054 | 0.079 | 0.118 |
| | 7 days | 0.046 | 0.066 | 0.049 | 0.087 |
| | 14/18 days | 0.069 | 0.057 | 0.037 | 0.06 |

[1193] As shown in Tables 46-48, the administration of EPO modified RNA had an effect on other erythropoetic parameters including hemoglobin (HGB), hematocrit (HCT) and red blood cell (RBC) count.

TABLE 46
Pharmacologic Effect of EPO mRNA on Hemoglobin

| Dose | | Male NHP (G- | Female NHP (G- | Male NHP (EPO) | Female NHP (EPO) |
|---|---|---|---|---|---|
| (mg/kg) | Time | CSF) HGB (g/L) | CSF) HGB (g/L) | HGB (g/L) | HGB (g/L) |
| 0.5 | Pre-dose | 133 | 129 | 134 | 123 |
| | 24 hours | 113 | 112 | 127 | 108 |
| | 3 days | 118 | 114 | 126 | 120 |
| | 7 days | 115 | 116 | 140 | 134 |
| | 14/18 days | 98 | 113 | 146 | 133 |
| 0.05 | Pre-dose | 137 | 129 | 133 | 133 |
| | 24 hours | 122 | 117 | 123 | 116 |
| | 3 days | 126 | 115 | 116 | 120 |
| | 7 days | 126 | 116 | 126 | 121 |
| | 14/18 days | 134 | 123 | 133 | 129 |
| 0.005 | Pre-dose | 128 | 129 | 132 | 136 |
| | 24 hours | 117 | 127 | 122 | 128 |
| | 3 days | 116 | 127 | 125 | 130 |
| | 7 days | 116 | 129 | 119 | 127 |
| | 14/18 days | 118 | 129 | 128 | 129 |

TABLE 47
Pharmacologic Effect of EPO mRNA on Hematocrit

| Dose | | Male NHP (G- | Female NHP (G- | Male NHP (EPO) | Female NHP (EPO) |
|---|---|---|---|---|---|
| (mg/kg) | Time | CSF) HCT (L/L) | CSF) HCT (L/L) | HCT (L/L) | HCT (L/L) |
| 0.5 | Pre-dose | 0.46 | 0.43 | 0.44 | 0.4 |
| | 24 hours | 0.37 | 0.38 | 0.4 | 0.36 |
| | 3 days | 0.39 | 0.38 | 0.41 | 0.39 |
| | 7 days | 0.39 | 0.38 | 0.45 | 0.45 |
| | 14/18 days | 0.34 | 0.37 | 0.48 | 0.46 |
| 0.05 | Pre-dose | 0.44 | 0.44 | 0.45 | 0.43 |
| | 24 hours | 0.39 | 0.4 | 0.43 | 0.39 |
| | 3 days | 0.41 | 0.39 | 0.38 | 0.4 |
| | 7 days | 0.42 | 0.4 | 0.45 | 0.41 |
| | 14/18 days | 0.44 | 0.4 | 0.46 | 0.43 |
| 0.005 | Pre-dose | 0.42 | 0.42 | 0.48 | 0.45 |
| | 24 hours | 0.4 | 0.42 | 0.42 | 0.43 |
| | 3 days | 0.4 | 0.41 | 0.44 | 0.42 |
| | 7 days | 0.39 | 0.42 | 0.41 | 0.42 |
| | 14/18 days | 0.41 | 0.42 | 0.42 | 0.42 |

TABLE 48
Pharmacologic Effect of EPO mRNA on Red Blood Cells

| | | Male | Female | Male | Female |
|---|---|---|---|---|---|
| | | NHP | NHP | NHP | NHP |
| | | (G-CSF) | (G-CSF) | (EPO) | (EPO) |
| Dose | | RBC | RBC | RBC | RBC |
| (mg/kg) | Time | (10¹²/L) | (10¹²/L) | (10¹²/L) | (10¹²/L) |
| 0.5 | Pre-dose | 5.57 | 5.57 | 5.43 | 5.26 |
| | 24 hours | 4.66 | 4.96 | 5.12 | 4.69 |
| | 3 days | 4.91 | 4.97 | 5.13 | 5.15 |
| | 7 days | 4.8 | 5.04 | 5.55 | 5.68 |
| | 14/18 days | 4.21 | 4.92 | 5.83 | 5.72 |
| 0.05 | Pre-dose | 5.68 | 5.64 | 5.57 | 5.84 |
| | 24 hours | 4.96 | 5.08 | 5.25 | 5.18 |
| | 3 days | 5.13 | 5.04 | 4.81 | 5.16 |
| | 7 days | 5.17 | 5.05 | 5.37 | 5.31 |
| | 14/18 days | 5.43 | 5.26 | 5.57 | 5.57 |
| 0.005 | Pre-dose | 5.67 | 5.36 | 6.15 | 5.72 |
| | 24 hours | 5.34 | 5.35 | 5.63 | 5.35 |
| | 3 days | 5.32 | 5.24 | 5.77 | 5.42 |
| | 7 days | 5.25 | 5.34 | 5.49 | 5.35 |
| | 14/18 day | 5.37 | 5.34 | 5.67 | 5.36 |

[1194] As shown in Tables 49 and 50, the administration of modified RNA had an effect on serum chemistry parameters including alanine transaminase (ALT) and aspartate transaminase (AST).

TABLE 49
Pharmacologic Effect of EPO mRNA on Alanine Transaminase

| | | Male | Female | Male | Female |
|---|---|---|---|---|---|
| | | NHP | NHP | NHP | NHP |
| | | (G-CSF) | (G-CSF) | (EPO) | (EPO) |
| Dose | | ALT | ALT | ALT | ALT |
| (mg/kg) | Time | (U/L) | (U/L) | (U/L) | (U/L) |
| 0.5 | Pre-dose | 29 | 216 | 50 | 31 |
| | 2 days | 63 | 209 | 98 | 77 |
| | 4 days | 70 | 98 | 94 | 87 |
| | 7 days | 41 | 149 | 60 | 59 |
| | 14 days | 43 | 145 | 88 | 44 |
| 0.05 | Pre-dose | 58 | 53 | 56 | 160 |
| | 2 days | 82 | 39 | 95 | 254 |
| | 4 days | 88 | 56 | 70 | 200 |
| | 7 days | 73 | 73 | 64 | 187 |
| | 14 days | 50 | 31 | 29 | 216 |
| 0.005 | Pre-dose | 43 | 51 | 45 | 45 |
| | 2 days | 39 | 32 | 62 | 48 |
| | 4 days | 48 | 58 | 48 | 50 |
| | 7 days | 29 | 55 | 21 | 48 |
| | 14 days | 44 | 46 | 43 | 51 |

TABLE 50
Pharmacologic Effect of EPO mRNA on Aspartate Transaminase

| | | Male | Female | Male | Female |
|---|---|---|---|---|---|
| | | NHP | NHP | NHP | NHP |
| | | (G-CSF) | (G-CSF) | (EPO) | (EPO) |
| Dose | | AST | AST | AST | AST |
| (mg/kg) | Time | (U/L) | (U/L) | (U/L) | (U/L) |
| 0.5 | Pre-dose | 32 | 47 | 59 | 20 |
| | 2 days | 196 | 294 | 125 | 141 |
| | 4 days | 67 | 63 | 71 | 60 |
| | 7 days | 53 | 68 | 56 | 47 |
| | 14 days | 47 | 67 | 82 | 44 |
| 0.05 | Pre-dose | 99 | 33 | 74 | 58 |
| | 2 days | 95 | 34 | 61 | 80 |
| | 4 days | 69 | 42 | 48 | 94 |
| | 7 days | 62 | 52 | 53 | 78 |
| | 14 days | 59 | 20 | 32 | 47 |
| 0.005 | Pre-dose | 35 | 54 | 39 | 40 |
| | 2 days | 70 | 34 | 29 | 25 |
| | 4 days | 39 | 36 | 43 | 55 |
| | 7 days | 28 | 31 | 55 | 31 |
| | 14 days | 39 | 20 | 35 | 54 |

[1195] As shown in Table 51, the administration of lipid nanoparticle-formulated modified RNA at high doses (0.5 mg/kg) caused an increase in cytokines, interferon-alpha (IFN-alpha) after administration of modified mRNA.

TABLE 51
Pharmacologic Effect of EPO mRNA on Alanine Transaminase

| | | Male | Female | Male | Female |
|---|---|---|---|---|---|
| | | NHP | NHP | NHP | NHP |
| | | (G-CSF) | (G-CSF) | (EPO) | (EPO) |
| Dose | | IFN-alpha | IFN-alpha | IFN-alpha | IFN-alpha |
| (mg/kg) | Time | (pg/mL) | (pg/mL) | (pg/mL) | (pg/mL) |
| 0.5 | Pre-dose | 0 | 0 | 0 | 0 |
| | Day 1 + 8 hr | 503.8 | 529.2 | 16.79 | 217.5 |
| | 4 days | 0 | 0 | 0 | 0 |
| 0.05 | Pre-dose | 0 | 0 | 0 | 0 |
| | Day 1 + 8 hr | 0 | 0 | 0 | 0 |
| | 4 days | 0 | 0 | 0 | 0 |
| 0.005 | Pre-dose | 0 | 0 | 0 | 0 |
| | Day 1 + 8 hr | 0 | 0 | 0 | 0 |
| | 4 days | 0 | 0 | 0 | 0 |

### Example 24. Study of Intramuscular and/or Subcutaneous Administration in Non-Human Primates

[1196] Formulations containing modified EPO mRNA (mRNA sequence shown in SEQ TD NO: 33900; polyA tail of approximately 160 nucleotides not shown in sequence; 5′cap, Cap1; fully modified with 5-methylcytosine and pseudouridine) or G-CSF mRNA (mRNA sequence shown in SEQ ID NO: 33897; polyA tail of approximately 160 nucleotides not shown in sequence; 5′cap, Cap1; fully modified with 5-methylcytosine and pseudouridine) in saline were administered to non-human primates (Cynomolgus monkey) (NHP) intramuscularly (IM) or subcutaneously (SC). The single modified mRNA dose of 0.05 mg/kg or 0.005 mg/kg was in a dose volume of 0.5 mL/kg. The non-human primates are bled 5-6 days prior to dosing to determine serum protein concentration and a baseline complete blood count. After administration with the modified mRNA formulation the NHP are bled at 8 hours, 24 hours, 48 hours, 72 hours, 7 days and 14 days to determined protein expression. Protein expression of G-CSF and EPO is determined by ELISA. At 24 hours, 72 hours, 7 days and 14 days after administration the complete blood count of the NHP is also determined. Urine from the NHPs is collected over the course of the entire experiment and analyzed to evaluate clinical safety. Tissue near the injection site is also collected and analyzed to determine protein expression.

### Example 25. Modified mRNA Trafficking

[1197] In order to determine localization and/or trafficking of the modified mRNA, studies may be performed as follows.

[1198] LNP formulations of siRNA and modified mRNA are formulated according to methods known in the art and/or described herein. The LNP formulations may include at least one modified mRNA which may encode a protein such as G-CSF, EPO, Factor VII, and/or any protein described herein. The formulations may be administered locally into muscle of mammals using intramuscular or subcutaneous injection. The dose of modified mRNA and the size of the LNP may be varied to determine the effect on trafficking in the body of the mammal and/or to assess the impact on a biologic reaction such as, but not limited to, inflammation. The mammal may be bled at different time points to determine the expression of protein encoded by the modified mRNA administered present in the serum and/or to determine the complete blood count in the mammal.

[1199] For example, modified mRNA encoding Factor VII, expressed in the liver and secreted into the serum, may be administered intramuscularly and/or subcutaneously. Coincident or prior to modified mRNA administration, siRNA is administered to knock out endogenous Factor VII. Factor VII arising from the intramuscular and/or subcutaneous injection of modified mRNA is administered is measured in the blood. Also, the levels of Factor VII is measured in the tissues near the injection site. If Factor VII is expressed in blood then there is trafficking of the modified mRNA. If Factor VII is expressed in tissue and not in the blood than there is only local expression of Factor VII.

### Example 26. Formulations of Multiple Modified mRNA

[1200] LNP formulations of modified mRNA are formulated according to methods known in the art and/or described herein or known in the art. The LNP formulations may include at least one modified mRNA which may encode a protein such as G-CSF, EPO, thrombopoietin and/or any protein described herein. The at least one modified mRNA may include 1, 2, 3, 4 or 5 modified mRNA molecules. The formulations containing at least one modified mRNA may be administered intravenously, intramuscularly or subcutaneously in a single or multiple dosing regimens. Biological samples such as, but not limited to, blood and/or serum may be collected and analyzed at different time points before and/or after administration of the at least one modified mRNA formulation. An expression of a protein in a biological sample of 50-200 pg/ml after the mammal has been administered a formulation containing at least one modified mRNA encoding said protein would be considered biologically effective.

### Example 27. Polyethylene Glycol Ratio Studies

### A. Formulation and Characterization of PEG LNPs

[1201] Lipid nanoparticles (LNPs) were formulated using the syringe pump method. The LNPs were formulated at a 20:1 weight ratio of total lipid to modified G-CSF mRNA (mRNA sequence shown in SEQ ID NO: 33897; polyA tail of approximately 160 nucleotides not shown in sequence; 5′cap, Cap1; fully modified with 5-methylcytosine and pseudouridine). The molar ratio ranges of the formulations are shown in Table 52.

TABLE 52
Molar Ratios

| | DLin-KC2-DMA | DSPC | Cholesterol | PEG-c-DOMG |
|---|---|---|---|---|
| Mole Percent | 50.0 | 10.0 | 37-38.5 | 1.5-3 |
| (mol %) | | | | |

[1202] Two types of PEG lipid, 1,2-Dimyristoyl-sn-glycerol, methoxypolyethylene Glycol (PEG-DMG, NOF Cat #SUNBRIGHT® GM-020) and 1,2-Distearoyl-sn-glycerol, methoxypolyethylene Glycol (PEG-DSG, NOF Cat #SUNBRIGHT® GS-020), were tested at 1.5 or 3.0 mol %. After the formation of the LNPs and the encapsulation of the modified G-CSF mRNA, the LNP formulations were characterized by particle size, zeta potential and encapsulation percentage and the results are shown in Table 53.

TABLE 53
Characterization of LNP Formulations

| | | | | |
|---|---|---|---|---|
| Formulation No. | NPA-071-1 | NPA-072-1 | NPA-073-1 | NPA-074-1 |
| Lipid | PEG-DMG | PEG-DMG | PEG-DSA | PEG-DSA |
| | 1.5% | 3% | 1.5% | 3% |
| Mean Size | 95 nm | 85 nm | 95 nm | 75 nm |
| | PDI: 0.01 | PDI: 0.06 | PDI: 0.08 | PDI: 0.08 |
| Zeta at pH 7.4 | −1.1 mV | −2.6 mV | 1.7 mV | 0.7 mV |
| Encapsulation | 88% | 89% | 98% | 95% |
| (RiboGreen) | | | | |

### B. In Vivo Screening of PEG LNPs

[1203] Formulations of the PEG LNPs described in Table 54 were administered to mice (n=5) intravenously at a dose of 0.5 mg/kg. Serum was collected from the mice at 2 hours, 8 hours, 24 hours, 48 hours, 72 hours and 8 days after administration of the formulation. The serum was analyzed by ELISA to determine the protein expression of G-CSF and the expression levels are shown in Table 54. LNP formulations using PEG-DMG gave substantially higher levels of protein expression than LNP formulations with PEG-DSA.

TABLE 54
Protein Expression

| | | | Protein |
|---|---|---|---|
| | Formulation | | Expression |
| Lipid | No. | Time | (pg/ml) |
| PEG-DMG, | NPA-071-1 | 2 hours | 114,102 |
| 1.5% | | 8 hours | 357,944 |
| | | 24 hours | 104,832 |
| | | 48 hours | 6,697 |
| | | 72 hours | 980 |
| | | 8 days | 0 |
| PEG-DMG, | NPA-072-1 | 2 hours | 154,079 |
| 3% | | 8 hours | 354,994 |
| | | 24 hours | 164,311 |
| | | 48 hours | 13,048 |
| | | 72 hours | 1,182 |
| | | 8 days | 13 |
| PEG-DSA, | NPA-073-1 | 2 hours | 3,193 |
| 1.5% | | 8 hours | 6,162 |
| | | 24 hours | 446 |
| | | 48 hours | 197 |
| | | 72 hours | 124 |
| | | 8 days | 5 |
| PEG-DSA, | NPA-074-1 | 2 hours | 259 |
| 3% | | 8 hours | 567 |
| | | 24 hours | 258 |
| | | 48 hours | 160 |
| | | 72 hours | 328 |
| | | 8 days | 33 |

### Example 28. Cationic Lipid Formulation Studies

### A. Formulation and Characterization of Cationic Lipid Nanoparticles

[1204] Lipid nanoparticles (LNPs) were formulated using the syringe pump method. The LNPs were formulated at a 20:1 weight ratio of total lipid to modified mRNA. The final lipid molar ratio ranges of cationic lipid, DSPC, cholesterol and PEG-c-DOMG are outlined in Table 55.

TABLE 55
Molar Ratios

| | Cationic | | | |
|---|---|---|---|---|
| | Lipid | DSPC | Cholesterol | PEG-c-DOMG |
| Mole Percent | 50.0 | 10.0 | 38.5 | 1.5 |
| (mol %) | | | | |

[1205] A 25 mM lipid solution in ethanol and modified RNA in 50 mM citrate at a pH of 3 were mixed to create spontaneous vesicle formation. The vesicles were stabilized in ethanol before the ethanol was removed and there was a buffer exchange by dialysis. The LNPs were then characterized by particle size, zeta potential, and encapsulation percentage. Table 56 describes the characterization of LNPs encapsulating EPO modified mRNA (mRNA sequence shown in SEQ ID NO: 33900 polyA tail of approximately 160 nucleotides not shown in sequence; 5′cap, Cap1; fully modified with 5-methylcytosine and pseudouridine) or G-CSF modified mRNA (mRNA sequence shown in SEQ ID NO: 33897; polyA tail of approximately 160 nucleotides not shown in sequence; 5′cap, Cap1; fully modified with 5-methylcytosine and pseudouridine) using DLin-MC3-DMA, DLin-DMA or C12-200 as the cationic lipid.

TABLE 56
Characterization of Cationic Lipid Formulations

| Formulation | NPA- | NPA- | NPA- | NPA- | NPA- | NPA- |
|---|---|---|---|---|---|---|
| No. | 071-1 | 072-1 | 073-1 | 074-1 | 075-1 | 076-1 |
| Lipid | DLin- | DLin- | DLin- | DLin- | C12-200 | C12-200 |
| | MC3-DMA | MC3-DMA | DMA | DMA | | |
| Modified | EPO | G-CSF | EPO | G-CSF | EPO | G-CSF |
| RNA | | | | | | |
| Mean Size | 89 nm | 96 nm | 70 nm | 73 nm | 97 nm | 103 nm |
| | PDI: 0.07 | PDI: 0.08 | PDI: 0.04 | PDI: 0.06 | PDI: 0.05 | PDI: 0.09 |
| Zeta at pH 7.4 | −1.1 mV | −1.4 mV | −1.6 mV | −0.4 mV | 1.4 mV | 0.9 mV |
| Encapsulation | 100% | 100% | 99% | 100% | 88% | 98% |
| (RiboGreen) | | | | | | |

### B. In Vivo Screening of Cationic LNP Formulations

[1206] Formulations of the cationic lipid formulations described in Table 56 were administered to mice (n=5) intravenously at a dose of 0.5 mg/kg. Serum was collected from the mice at 2 hours, 24 hours, 72 hours and/or 7 days after administration of the formulation. The serum was analyzed by ELISA to determine the protein expression of EPO or G-CSF and the expression levels are shown in Table 57.

TABLE 57
Protein Expression

| | | | Protein |
|---|---|---|---|
| Modified | Formulation | | Expression |
| mRNA | No. | Time | (pg/ml) |
| EPO | NPA-071-1 | 2 hours | 304,190.0 |
| | | 24 hours | 166,811.5 |
| | | 72 hours | 1,356.1 |
| | | 7 days | 20.3 |
| EPO | NPA-073-1 | 2 hours | 73,852.0 |
| | | 24 hours | 75,559.7 |
| | | 72 hours | 130.8 |
| EPO | NPA-075-1 | 2 hours | 413,010.2 |
| | | 24 hours | 56,463.8 |
| G-CSF | NPA-072-1 | 2 hours | 62,113.1 |
| | | 24 hours | 53,206.6 |
| G-CSF | NPA-074-1 | 24 hours | 25,059.3 |
| G-CSF | NPA-076-1 | 2 hours | 219,198.1 |
| | | 24 hours | 8,470.0 |

[1207] Toxicity was seen in the mice administered the LNPs formulations with the cationic lipid C12-200 (NPA-075-1 and NPA-076-1) and they were sacrificed at 24 hours because they showed symptoms such as scrubby fur, cowering behavior and weight loss of greater than 10%. C12-200 was expected to be more toxic but also had a high level of expression over a short period. The cationic lipid DLin-DMA (NPA-073-1 and NPA-074-1) had the lowest expression out of the three cationic lipids tested. DLin-MC3-DMA (NPA-071-1 and NPA-072-1) showed good expression up to day three and was above the background sample out to day 7 for EPO formulations.

### Example 29. Method of Screening for Protein Expression

### A. Electrospray Ionization

[1208] A biological sample which may contain proteins encoded by modified RNA administered to the subject is prepared and analyzed according to the manufacturer protocol for electrospray ionization (ESI) using 1, 2, 3 or 4 mass analyzers. A biologic sample may also be analyzed using a tandem ESI mass spectrometry system.

[1209] Patterns of protein fragments, or whole proteins, are compared to known controls for a given protein and identity is determined by comparison.

### B. Matrix-Assisted Laser Desorption/Ionization

[1210] A biological sample which may contain proteins encoded by modified RNA administered to the subject is prepared and analyzed according to the manufacturer protocol for matrix-assisted laser desorption/ionization (MALDI).

[1211] Patterns of protein fragments, or whole proteins, are compared to known controls for a given protein and identity is determined by comparison.

### C. Liquid Chromatography-Mass Spectrometry-Mass Spectrometry

[1212] A biological sample, which may contain proteins encoded by modified RNA, may be treated with a trypsin enzyme to digest the proteins contained within. The resulting peptides are analyzed by liquid chromatography-mass spectrometry-mass spectrometry (LC/MS/MS). The peptides are fragmented in the mass spectrometer to yield diagnostic patterns that can be matched to protein sequence databases via computer algorithms. The digested sample may be diluted to achieve 1 ng or less starting material for a given protein. Biological samples containing a simple buffer background (e.g. water or volatile salts) are amenable to direct in-solution digest; more complex backgrounds (e.g. detergent, non-volatile salts, glycerol) require an additional clean-up step to facilitate the sample analysis.

[1213] Patterns of protein fragments, or whole proteins, are compared to known controls for a given protein and identity is determined by comparison.

### Example 30. Lipid Nanoparticle In Vivo Studies

[1214] mCherry mRNA (mRNA sequence shown in SEQ ID NO: 33905; polyA tail of approximately 160 nucleotides not shown in sequence; 5′cap, Cap1; fully modified with 5-methylcytosine and pseudouridine) was formulated as a lipid nanoparticle (LNP) using the syringe pump method. The LNP was formulated at a 20:1 weight ratio of total lipid to modified mRNA with a final lipid molar ratio of 50:10:38.5:1.5 (DLin-KC2-DMA: DSPC: Cholesterol: PEG-c-DOMG). The mCherry formulation, listed in Table 58, was characterized by particle size, zeta potential, and encapsulation.

TABLE 58
mCherry Formulation

| | |
|---|---|
| Formulation # | NPA-003-5 |
| Modified mRNA | mCherry |
| Mean size | 105 nm |
| | PDI: 0.09 |
| Zeta at pH 7.4 | 1.8 mV |
| Encaps. | 100% |
| (RiboGr) | |

[1215] The LNP formulation was administered to mice (n=5) intravenously at a modified mRNA dose of 100 ug. Mice were sacrificed at 24 hrs after dosing. The liver and spleen from the mice administered with mCherry modified mRNA formulations were analyzed by immunohistochemistry (IHC), western blot, or fluorescence-activated cell sorting (FACS).

[1216] Histology of the liver showed uniform mCherry expression throughout the section, while untreated animals did not express mCherry. Western blots were also used to confirm mCherry expression in the treated animals, whereas mCherry was not detected in the untreated animals. Tubulin was used as a control marker and was detected in both treated and untreated mice, indicating that normal protein expression in hepatocytes was unaffected.

[1217] FACS and IHC were also performed on the spleens of mCherry and untreated mice. All leukocyte cell populations were negative for mCherry expression by FACS analysis. By IHC, there were also no observable differences in the spleen in the spleen between mCherry treated and untreated mice.

### Example 31. Syringe Pump In Vivo Studies

[1218] mCherry modified mRNA (mRNA sequence shown in SEQ ID NO: 33898; polyA tail of approximately 160 nucleotides not shown in sequence; 5′cap, Cap1) is formulated as a lipid nanoparticle (LNP) using the syringe pump method. The LNP is formulated at a 20:1 weight ratio of total lipid to modified mRNA with a final lipid molar ratio of 50:10:38.5:1.5 (DLin-KC2-DMA: DSPC: Cholesterol: PEG-c-DOMG). The mCherry formulation is characterized by particle size, zeta potential, and encapsulation.

[1219] The LNP formulation is administered to mice (n=5) intravenously at a modified mRNA dose of 10 or 100 ug. Mice are sacrificed at 24 hrs after dosing. The liver and spleen from the mice administered with mCherry modified mRNA formulations are analyzed by immunohistochemistry (IHC), western blot, and/or fluorescence-activated cell sorting (FACS).

### Example 32. In Vitro and In Vivo Expression

### A. In Vitro Expression in Human Cells Using Lipidoid Formulations

[1220] The ratio of mmRNA to lipidoid used to test for in vitro transfection is tested empirically at different lipidoid:mmRNA ratios. Previous work using siRNA and lipidoids have utilized 2.5:1, 5:1, 10:1, and 15:1 lipidoid:siRNA wt:wt ratios. Given the longer length of mmRNA relative to siRNA, a lower wt:wt ratio of lipidoid to mmRNA may be effective. In addition, for comparison mmRNA were also formulated using RNAIMAX™ (Invitrogen, Carlsbad, CA) or TRANSIT-mRNA (Mirus Bio, Madison, WI) cationic lipid delivery vehicles.

[1221] The ability of lipidoid-formulated Luciferase (IVT cDNA sequence as shown in SEQ ID NO: 33906; mRNA sequence shown in SEQ ID NO: 33907, polyA tail of approximately 160 nucleotides not shown in sequence, 5′cap, Cap1, fully modified with 5-methylcytosine at each cytosine and pseudouridine replacement at each uridine site), green fluorescent protein (GFP) (IVT cDNA sequence as shown in SEQ ID NO: 3308; mRNA sequence shown in SEQ ID NO: 33909, polyA tail of approximately 160 nucleotides not shown in sequence, 5′cap, Cap1, fully modified with 5-methylcytosine at each cytosine and pseudouridine replacement at each uridine site), G-CSF mRNA (mRNA sequence shown in SEQ ID NO: 33898; polyA tail of approximately 160 nucleotides not shown in sequence; 5′cap, Cap1), and EPO mRNA (mRNA sequence shown in SEQ ID NO: 33900; polyA tail of approximately 160 nucleotides not shown in sequence; 5′cap, Cap1) to express the desired protein product can be confirmed by luminescence for luciferase expression, flow cytometry for GFP expression, and by ELISA for G-CSF and Erythropoietin (EPO) secretion.

### B. In Vivo Expression Following Intravenous Injection

[1222] Systemic intravenous administration of the formulations are created using various different lipidoids including, but not limited to, 98N12-5, C12-200, and MD1.

[1223] Lipidoid formulations containing mmRNA are injected intravenously into animals. The expression of the modified mRNA (mmRNA)-encoded proteins are assessed in blood and/or other organs samples such as, but not limited to, the liver and spleen collected from the animal. Conducting single dose intravenous studies will also allow an assessment of the magnitude, dose responsiveness, and longevity of expression of the desired product.

[1224] In one embodiment, lipidoid based formulations of 98N12-5, C12-200, MD1 and other lipidoids, are used to deliver luciferase, green fluorescent protein (GFP), mCherry fluorescent protein, secreted alkaline phosphatase (sAP), human G-CSF, human Factor IX, or human Erythropoietin (EPO) mmRNA into the animal. After formulating mmRNA with a lipid, as described previously, animals are divided into groups to receive either a saline formulation, or a lipidoid-formulation which contains one of a different mmRNA selected from luciferase, GFP, mCherry, sAP, human G-CSF, human Factor IX, and human EPO. Prior to injection into the animal, mmRNA-containing lipidoid formulations are diluted in PBS. Animals are then administered a single dose of formulated mmRNA ranging from a dose of 10 mg/kg to doses as low as 1 ng/kg, with a preferred range to be 10 mg/kg to 100 ng/kg, where the dose of mmRNA depends on the animal body weight such as a 20 gram mouse receiving a maximum formulation of 0.2 ml (dosing is based no mmRNA per kg body weight). After the administration of the mmRNA-lipidoid formulation, serum, tissues, and/or tissue lysates are obtained and the level of the mmRNA-encoded product is determined at a single and/or a range of time intervals. The ability of lipidoid-formulated Luciferase, GFP, mCherry, sAP, G-CSF, Factor IX, and EPO mmRNA to express the desired protein product is confirmed by luminescence for the expression of Luciferase, flow cytometry for the expression of GFP and mCherry expression, by enzymatic activity for sAP, or by ELISA for the section of G-CSF, Factor IX and/or EPO.

[1225] Further studies for a multi-dose regimen are also performed to determine the maximal expression of mmRNA, to evaluate the saturability of the mmRNA-driven expression (by giving a control and active mmRNA formulation in parallel or in sequence), and to determine the feasibility of repeat drug administration (by giving mmRNA in doses separated by weeks or months and then determining whether expression level is affected by factors such as immunogenicity). An assessment of the physiological function of proteins such as G-CSF and EPO are also determined through analyzing samples from the animal tested and detecting increases in granulocyte and red blood cell counts, respectively. Activity of an expressed protein product such as Factor IX, in animals can also be assessed through analysis of Factor IX enzymatic activity (such as an activated partial thromboplastin time assay) and effect of clotting times.

C. In Vitro Expression Following Intramuscular and/or Subcutaneous Injection

[1226] The use of lipidoid formulations to deliver oligonucleotides, including mRNA, via an intramuscular route or a subcutaneous route of injection needs to be evaluated as it has not been previously reported. Intramuscular and/or subcutaneous injection of mmRNA are evaluated to determine if mmRNA-containing lipidoid formulations are capable to produce both localized and systemic expression of a desired proteins.

[1227] Lipidoid formulations of 98N12-5, C12-200, and MD1 containing mmRNA selected from luciferase, green fluorescent protein (GFP), mCherry fluorescent protein, secreted alkaline phosphatase (sAP), human G-CSF, human factor IX, or human Erythropoietin (EPO) mmRNA are injected intramuscularly and/or subcutaneously into animals. The expression of mmRNA-encoded proteins are assessed both within the muscle or subcutaneous tissue and systemically in blood and other organs such as the liver and spleen. Single dose studies allow an assessment of the magnitude, dose responsiveness, and longevity of expression of the desired product.

[1228] Animals are divided into groups to receive either a saline formulation or a formulation containing modified mRNA. Prior to injection mmRNA-containing lipidoid formulations are diluted in PBS. Animals are administered a single intramuscular dose of formulated mmRNA ranging from 50 mg/kg to doses as low as 1 ng/kg with a preferred range to be 10 mg/kg to 100 ng/kg. A maximum dose for intramuscular administration, for a mouse, is roughly 1 mg mmRNA or as low as 0.02 ng mmRNA for an intramuscular injection into the hind limb of the mouse. For subcutaneous administration, the animals are administered a single subcutaneous dose of formulated mmRNA ranging from 400 mg/kg to doses as low as 1 ng/kg with a preferred range to be 80 mg/kg to 100 ng/kg. A maximum dose for subcutaneous administration, for a mouse, is roughly 8 mg mmRNA or as low as 0.02 ng mmRNA.

[1229] For a 20 gram mouse the volume of a single intramuscular injection is maximally 0.025 ml and a single subcutaneous injection is maximally 0.2 ml. The optimal dose of mmRNA administered is calculated from the body weight of the animal. At various points in time points following the administration of the mmRNA-lipidoid, serum, tissues, and tissue lysates is obtained and the level of the mmRNA-encoded product is determined. The ability of lipidoid-formulated luciferase, green fluorescent protein (GFP), mCherry fluorescent protein, secreted alkaline phosphatase (sAP), human G-CSF, human factor IX, or human Erythropoietin (EPO) mmRNA to express the desired protein product is confirmed by luminescence for luciferase expression, flow cytometry for GFP and mCherry expression, by enzymatic activity for sAP, and by ELISA for G-CSF, Factor IX and Erythropoietin (EPO) secretion.

[1230] Additional studies for a multi-dose regimen are also performed to determine the maximal expression using mmRNA, to evaluate the saturability of the mmRNA-driven expression (achieved by giving a control and active mmRNA formulation in parallel or in sequence), and to determine the feasibility of repeat drug administration (by giving mmRNA in doses separated by weeks or months and then determining whether expression level is affected by factors such as immunogenicity). Studies utilizing multiple subcutaneous or intramuscular injection sites at one time point, are also utilized to further increase mmRNA drug exposure and improve protein production. An assessment of the physiological function of proteins, such as GFP, mCherry, sAP, human G-CSF, human factor IX, and human EPO, are determined through analyzing samples from the tested animals and detecting a change in granulocyte and/or red blood cell counts. Activity of an expressed protein product such as Factor IX, in animals can also be assessed through analysis of Factor IX enzymatic activity (such as an activated partial thromboplastin time assay) and effect of clotting times.

### Example 33. Bifunctional mmRNA

[1231] Using the teachings and synthesis methods described herein, modified RNAs are designed and synthesized to be bifunctional, thereby encoding one or more cytotoxic protein molecules as well as be synthesized using cytotoxic nucleosides.

[1232] Administration of the bifunctional modified mRNAs is effected using either saline or a lipid carrier. Once administered, the bifunctional modified mRNA is translated to produce the encoded cytotoxic peptide. Upon degradation of the delivered modified mRNA, the cytotoxic nucleosides are released which also effect therapeutic benefit to the subject.

### Example 34. Modified mRNA Transfection

### A. Reverse Transfection

[1233] For experiments performed in a 24-well collagen-coated tissue culture plate, Keratinocytes are seeded at a cell density of 1×10⁵. For experiments performed in a 96-well collagen-coated tissue culture plate, Keratinocytes are seeded at a cell density of 0.5×10⁵. For each modified mRNA (mmRNA) to be transfected, modified mRNA: RNAIMAX™ is prepared as described and mixed with the cells in the multi-well plate within a period of time, e.g., 6 hours, of cell seeding before cells had adhered to the tissue culture plate.

### B. Forward Transfection

[1234] In a 24-well collagen-coated tissue culture plate, Keratinocytes are seeded at a cell density of 0.7×10⁵. For experiments performed in a 96-well collagen-coated tissue culture plate, Keratinocytes are seeded at a cell density of 0.3×10⁵. Keratinocytes are grown to a confluency of >70% for over 24 hours. For each modified mRNA (mmRNA) to be transfected, modified mRNA: RNAIMAX™ is prepared as described and transfected onto the cells in the multi-well plate over 24 hours after cell seeding and adherence to the tissue culture plate.

C. Modified mRNA Translation Screen: G-CSF ELISA

[1235] Keratinocytes are grown in EPILIFE medium with Supplement S7 from Invitrogen (Carlsbad, CA) at a confluence of >70%. One set of keratinocytes were reverse transfected with 300 ng of the chemically modified mRNA (mmRNA) complexed with RNAIMAX™ from Invitrogen. Another set of keratinocytes are forward transfected with 300 ng modified mRNA complexed with RNAIMAX™ from Invitrogen. The modified mRNA: RNAIMAX™ complex is formed by first incubating the RNA with Supplement-free EPILIFE® media in a 5× volumetric dilution for 10 minutes at room temperature.

[1236] In a second vial, RNAIMAX™ reagent was incubated with Supplement-free EPILIFE® Media in 10× volumetric dilution for 10 minutes at room temperature. The RNA vial was then mixed with the RNAIMAX™ vial and incubated for 20-30 minutes at room temperature before being added to the cells in a drop-wise fashion. Secreted human Granulocyte-Colony Stimulating Factor (G-CSF) concentration in the culture medium is measured at 18 hours post-transfection for each of the chemically modified mRNA in triplicate.

[1237] Secretion of Human G-CSF from transfected human keratinocytes is quantified using an ELISA kit from Invitrogen or R&D Systems (Minneapolis, MN) following the manufacturers recommended instructions.

D. Modified mRNA Dose and Duration: G-CSF ELISA

[1238] Keratinocytes are grown in EPILIFE® medium with Supplement S7 from Invitrogen at a confluence of >70%. Keratinocytes are reverse transfected with either 0 ng, 46.875 ng, 93.75 ng, 187.5 ng, 375 ng, 750 ng, or 1500 ng modified mRNA complexed with the RNAIMAX™ from Invitrogen (Carlsbad, CA). The modified mRNA:RNAIMAX™ complex is formed as described. Secreted human G-CSF concentration in the culture medium is measured at 0, 6, 12, 24, and 48 hours post-transfection for each concentration of each modified mRNA in triplicate. Secretion of human G-CSF from transfected human keratinocytes is quantified using an ELISA kit from Invitrogen or R&D Systems following the manufacturers recommended instructions.

### Example 35. Split Dose Studies

[1239] Studies utilizing multiple subcutaneous or intramuscular injection sites at one time point were designed and performed to investigate ways to increase mmRNA drug exposure and improve protein production. In addition to detection of the expressed protein product, an assessment of the physiological function of proteins was also determined through analyzing samples from the animal tested.

[1240] Surprisingly, it has been determined that split dosing of mmRNA produces greater protein production and phenotypic responses than those produced by single unit dosing or multi-dosing schemes.

[1241] The design of a single unit dose, multi-dose and split dose experiment involved using human erythropoietin (EPO) mmRNA (mRNA shown in SEQ ID NO: 33900; polyA tail of approximately 160 nucleotides not shown in sequence; 5′cap, Cap1) administered in buffer alone. The dosing vehicle (F. buffer) consisted of 150 mM NaCl, 2 mM CaCl₂, 2 mM Na*-phosphate (1.4 mM monobasic sodium phosphate; 0.6 mM dibasic sodium phosphate), and 0.5 mM EDTA, pH 6.5. The pH was adjusted using sodium hydroxide and the final solution was filter sterilized. The mmRNA was modified with 5meC at each cytosine and pseudouridine replacement at each uridine site.

[1242] Animals (n=5) were injected IM (intramuscular) for the single unit dose of 100 ug. For multi-dosing, two schedules were used, 3 doses of 100 μg and 6 doses of 100 ug. For the split dosing scheme, two schedules were used, 3 doses at 33.3 ug and 6 doses of 16.5 ug mmRNA. Control dosing involved use of buffer only at 6 doses. Control mmRNA involved the use of luciferase mmRNA (IVT cDNA sequence shown in SEQ ID NO: 33906; mRNA sequence shown in SEQ ID NO: 33907, polyA tail of approximately 160 nucleotides not shown in sequence, 5′cap, Cap1, fully modified with 5-methylcytosine at each cytosine and pseudouridine replacement at each uridine site) dosed 6 times at 100 ug. Blood and muscle tissue were evaluated 13 hrs post injection.

[1243] Human EPO protein was measured in mouse serum 13 h post I.M. single, multi- or split dosing of the EPO mmRNA in buffer. Seven groups of mice (n=5 mice per group) were treated and evaluated. The results are shown in Table 59.

TABLE 59
Split dose study

| | | | | Avg. | Polypeptide | |
|---|---|---|---|---|---|---|
| | | | | pmol/mL | per unit | Dose |
| | | Dose of | Total | human | drug | Splitting |
| Group | Treatment | mmRNA | Dose | EPO | (pmol/ug) | Factor |
| 1 | Human | 1 × 100 ug | 100 ug | 14.3 | .14 | 1 |
| | EPO | | | | | |
| | mmRNA | | | | | |
| 2 | Human | 3 × 100 ug | 300 ug | 82.5 | .28 | 2 |
| | EPO | | | | | |
| | mmRNA | | | | | |
| 3 | Human | 6 × 100 ug | 600 ug | 273.0 | .46 | 3.3 |
| | EPO | | | | | |
| | mmRNA | | | | | |
| 4 | Human | 3 × 33.3 ug | 100 ug | 104.7 | 1.1 | 7.9 |
| | EPO | | | | | |
| | mmRNA | | | | | |
| 5 | Human | 6 × 16.5 ug | 100 ug | 127.9 | 1.3 | 9.3 |
| | EPO | | | | | |
| | mmRNA | | | | | |
| 6 | Luciferase | 6 × 100 ug | 600 ug | 0 | — | — |
| | mmRNA | | | | | |
| 7 | Buffer | — | — | 0 | — | — |
| | Alone | | | | | |

[1244] The splitting factor is defined as the product per unit drug divided by the single dose product per unit drug (PUD). For example for treatment group 2 the value 0.28 or product (EPO) per unit drug (mmRNA) is divided by the single dose product per unit drug of 0.14. The result is 2. Likewise, for treatment group 4, the value 1.1 or product (EPO) per unit drug (mmRNA) is divided by the single dose product per unit drug of 0.14. The result is 7.9. Consequently, the dose splitting factor (DSF) may be used as an indicator of the efficacy of a split dose regimen. For any single administration of a total daily dose, the DSF should be equal to 1. Therefore any DSF greater than this value in a split dose regimen is an indication of increased efficacy.

[1245] To determine the dose response trends, impact of injection site and impact of injection timing, studies are performed. In these studies, varied doses of 1 ug, 5 ug, 10 ug, 25 ug, 50 ug, and values in between are used to determine dose response outcomes. Split dosing for a 100 ug total dose includes three or six doses of 1.6 ug, 4.2 ug, 8.3 ug, 16.6 ug, or values and total doses equal to administration of the total dose selected.

[1246] Injection sites are chosen from the limbs or any body surface presenting enough area suitable for injection. This may also include a selection of injection depth to target the dermis (Intradermal), epidermis (Epidermal), subcutaneous tissue (SC) or muscle (IM). Injection angle will vary based on targeted delivery site with injections targeting the intradermal site to be 10-15 degree angles from the plane of the surface of the skin, between 20-45 degrees from the plane of the surface of the skin for subcutaneous injections and angles of between 60-90 degrees for injections substantially into the muscle.

### Example 36. Quantification in Exosomes

[1247] The quantity and localization of the mmRNA of the present invention can be determined by measuring the amounts (initial, timecourse, or residual basis) in isolated exosomes. In this study, since the mmRNA are typically codon-optimized and distinct in sequence from endogenous mRNA, the levels of mmRNA are quantitated as compared to endogenous levels of native or wild type mRNA by using the methods of Gibbings, PCT/IB2009/005878, the contents of which are incorporated herein by reference in their entirety.

[1248] In these studies, the method is performed by first isolating exosomes or vesicles preferably from a bodily fluid of a patient previously treated with a polynucleotide, primary construct or mmRNA of the invention, then measuring, in said exosomes, the polynucleotide, primary construct or mmRNA levels by one of mRNA microarray, qRT-PCR, or other means for measuring RNA in the art including by suitable antibody or immunohistochemical methods.

### Example 37. Effect of Modified mRNA on Cellular Viability, Cytotoxicity and Apoptosis

[1249] This experiment demonstrates cellular viability, cytotoxicity and apoptosis for distinct modified mRNA in-vitro transfected Human Keratinocyte cells. Keratinocytes are grown in EPILIFE® medium with Human Keratinocyte Growth Supplement in the absence of hydrocortisone from Invitrogen (Carlsbad, CA) at a confluence of >70%. Keratinocytes are reverse transfected with 0 ng, 46.875 ng, 93.75 ng, 187.5 ng, 375 ng, 750 ng, 1500 ng, 3000 ng, or 6000 ng of modified mRNA complexed with RNAIMAX™ from Invitrogen. The modified mRNA:RNAIMAX™ complex is formed. Secreted human G-CSF concentration in the culture medium is measured at 0, 6, 12, 24, and 48 hours post-transfection for each concentration of each modified m RNA in triplicate. Secretion of human G-CSF from transfected human keratinocytes is quantified using an ELISA kit from Invitrogen or R&D Systems following the manufacturers recommended instructions.

[1250] Cellular viability, cytotoxicity and apoptosis is measured at 0, 12, 48, 96, and 192 hours post-transfection using the APOTOX-GLO™ kit from Promega (Madison, WI) according to manufacturer instructions.

### Example 38. Detection of a Cellular Innate Immune Response to Modified mRNA Using an ELISA Assay

[1251] An enzyme-linked immunosorbent assay (ELISA) for Human Tumor Necrosis Factor-α (TNF-α), Human Interferon-β (IFN-β) and Human Granulocyte-Colony Stimulating Factor (G-CSF) secreted from in vitro-transfected Human Keratinocyte cells is tested for the detection of a cellular innate immune response. Keratinocytes are grown in EPILIFE® medium with Human Keratinocyte Growth Supplement in the absence of hydrocortisone from Invitrogen (Carlsbad, CA) at a confluence of >70%. Secreted TNF-a keratinocytes are reverse transfected with 0 ng, 93.75 ng, 1 87.5 ng, 375 ng, 750 ng, 1500 ng or 3000 ng of the chemically modified mRNA (mmRNA) complexed with RNAIMAX™ from Invitrogen as described in triplicate. Secreted TNF-α in the culture medium is measured 24 hours post-transfection for each of the chemically modified mRNA using an ELISA kit from Invitrogen according to the manufacturer protocols.

[1252] Secreted IFN-β in the same culture medium is measured 24 hours post-transfection for each of the chemically modified mRNA using an ELISA kit from Invitrogen according to the manufacturer protocols. Secreted human G-CSF concentration in the same culture medium is measured at 24 hours post-transfection for each of the chemically modified mRNA. Secretion of human G-CSF from transfected human keratinocytes is quantified using an ELISA kit from Invitrogen or R&D Systems (Minneapolis, MN) following the manufacturers recommended instructions. These data indicate which modified mRNA (mmRNA) are capable eliciting a reduced cellular innate immune response in comparison to natural and other chemically modified polynucleotides or reference compounds by measuring exemplary type 1 cytokines TNF-α and IFN-β.

### Example 39. Human Granulocyte —Colony Stimulating Factor (G-CSF) Modified mRNA-Induced Cell Proliferation Assay

[1253] Human keratinocytes are grown in EPILIFE® medium with Supplement S7 from Invitrogen at a confluence of >70% in a 24-well collagen-coated TRANSWELL® (Coming, Lowell, MA) co-culture tissue culture plate. Keratinocytes are reverse transfected with 750 ng of the indicated chemically modified mRNA (mmRNA) complexed with RNAIMAX from Invitrogen as described in triplicate. The modified mRNA:RNAIMAX complex is formed as described. Keratinocyte media is exchanged 6-8 hours post-transfection. 42-hours post-transfection, the 24-well TRANSWELL® plate insert with a 0.4 μm-pore semi-permeable polyester membrane is placed into the human G-CSF modified mRNA-transfected keratinocyte containing culture plate

[1254] Human myeloblast cells, Kasumi-1 cells or KG-1 (0.2×10⁵ cells), are seeded into the insert well and cell proliferation is quantified 42 hours post-co-culture initiation using the CyQuant Direct Cell Proliferation Assay (Invitrogen, Carlsbad, CA) in a 100-120 μl volume in a 96-well plate. Modified mRNA-encoding human G-CSF-induced myeloblast cell proliferation is expressed as a percent cell proliferation normalized to untransfected keratinocyte/myeloblast co-culture control wells. Secreted human G-CSF concentration in both the keratinocyte and myeloblast insert co-culture wells is measured at 42 hours post-co-culture initiation for each modified mRNA in duplicate. Secretion of human G-CSF is quantified using an ELISA kit from Invitrogen following the manufacturer recommended instructions.

[1255] Transfected human G-CSF modified mRNA in human keratinocyte feeder cells and untransfected human myeloblast cells are detected by RT-PCR. Total RNA from sample cells is extracted and lysed using RNEASY® kit (Qiagen, Valencia, CA) according to the manufacturer instructions. Extracted total RNA is submitted to RT-PCR for specific amplification of modified mRNA-G-CSF using PROTOSCRIPT® M-MuLV Taq RT-PCR kit (New England BioLabs, Ipswich, MA) according to the manufacturer instructions with human G-CSF-specific primers. RT-PCR products are visualized by 1.2% agarose gel electrophoresis.

### Example 40: Co-Culture Assay

[1256] Modified mRNA comprised of chemically-distinct modified nucleotides encoding human Granulocyte-Colony Stimulating Factor (G-CSF) may stimulate the cellular proliferation of a transfection incompetent cell in a co-culture environment. The co-culture includes a highly transfectable cell type such as a human keratinocyte and a transfection incompetent cell type such as a white blood cell (WBC). The modified mRNA encoding G-CSF are transfected into the highly transfectable cell allowing for the production and secretion of G-CSF protein into the extracellular environment where G-CSF acts in a paracrine-like manner to stimulate the white blood cell expressing the G-CSF receptor to proliferate. The expanded WBC population may be used to treat immune-compromised patients or partially reconstitute the WBC population of an immunosuppressed patient and thus reduce the risk of opportunistic infections.

[1257] In another example, a highly transfectable cell such as a fibroblast are transfected with certain growth factors support and simulate the growth, maintenance, or differentiation of poorly transfectable embryonic stem cells or induced pluripotent stem cells.

### Example 41: Detection Assays of Human IgG Antibodies

### A. ELISA Detection of Human IgG Antibodies

[1258] This example describes an ELISA for Human IgG from Chinese Hamster Ovary's (CHO) and Human Embryonic Kidney (HEK, HER-2 Negative) 293 cells transfected with human IgG modified mRNA (mmRNA). The Human Embryonic Embryonic Kidney (HEK) 293 are grown in CD 293 Medium with Supplement of L-Glutamine from Invitrogen until they reach a confluence of 80-90%. The CHO cells are grown in CD CHO Medium with Supplement of L-Glutamine, Hypoxanthine and Thymidine. In one aspect, 2×106 cells are transfected with 24 pg modified mRNA complexed with RNAIMAX™ from Invitrogen in a 75 cm2 culture flask from Corning in 7 ml of medium. In another aspect, 80,000 cells are transfected with 1 pg modified mRNA complexed with RNAIMAX™ from Invitrogen in a 24-well plate. The modified mRNA:RNAIMAX™ complex is formed by incubating in a vial the mmRNA with either the CD 293 or CD CHO medium in a 5× volumetric dilution for 10 minutes at room temperature. In a second vial, RNAIMAX™ reagent is incubated with CD 293 medium or CD CHO medium in a 10× volumetric dilution for 10 minutes at room temperature. The mmRNA vial is then mixed with the RNAIMAX™ vial and incubated for 20-30 minutes at room temperature before it is added to the CHO or HEK cells in a drop-wise fashion. The culture supernatants are stored at 4 degrees celsius. The concentration of the secreted human IgG in the culture medium in the 24 pg mmRNA transfections is measured at 12, 24, 36 hours post-transfection and the 1 pg mmRNA transfection is measured at 36 hours. Secretion of Trastuzumab from transfected HEK 293 cells is quantified using an ELISA kit from Abcam (Cambridge, MA) following the manufacturers recommended instructions. The data shows that a Humanized IgG antibody (such as Trastuzumab) mmRNA is capable of being translated in HEK Cells and that Trastuzumab is secreted out of the cells and released into the extracellular environment. Furthermore, the data demonstrate that transfection of cells with mmRNA encoding Trastuzumab for the production of secreted protein can be scaled up to a bioreactor or large cell culture conditions.

B. Western Detection of Modified mRNA Produced Human IgG Antibody

[1259] A Western Blot of CHO-K1 cells is co-transfected with 1 pg each of Heavy and Light Chain of Trastuzumab modified mRNA (mmRNA). CHO cells are grown using standard protocols in 24-well plates. The cell supernatants or cell lysates are collected 24 hours post-transfection, separated on a 12% SDS-Page gel and transferred onto a nitrocellulose membrane using the IBOT® by Invitrogen (Carlsbad, CA). The cells are incubated with a first conjugation of a rabbit polyclonal antibody to Human IgG conjugated to DYLIGHT594 (ab96904, abcam, Cambridge, MA) and a second conjugation of a goat polyclonal antibody to Rb IgG which is conjugated to alkaline phosphatase. After incubation, the antibody is detected using Novex® alkaline phosphatase chromogenic substrate by Invitrogen (Carlsbad, CA).

C. Cell Immuno Staining of Modified mRNA Produced Trastuzumab and Rituximab

[1260] CHO-K1 cells are co-transfected with 500 ng each of Heavy and Light Chain of either Trastuzumab or Rituximab. Cells are grown in F-12K Medium from GIBCO® (Grand Island, NY) and 10% FBS. Cells are fixed with 4% paraformaldehyde in PBS, permeabilized with 0.1% Triton X-100 in PBS for 5-10 minutes at room temperature and cells are washed 3 times with room temperature PBS. Trastuzumab and Rituximab staining is performed using rabbit polyclonal antibody to Human IgG conjugated to DYLIGHT® 594 (ab96904, abcam, Cambridge, MA) according to the manufacture's recommended dilutions. Nuclear DNA staining is performed with DAPI dye from Invitrogen (Carlsbad, CA). The protein for Trastuzumab and Rituximab is translated and localized to the cytoplasm upon modified mRNA transfections. Pictures are taken 13 hours post-transfection.

D. Binding Immunoblot Assay for Modified mRNA Produced Trastuzumab and Rituximab

[1261] Trastuzumab and Rituximab are detected using a binding immunoblot detection assay. Varying concentrations (100 ng/ul to 0 ng/ul) of the ErB2 peptide (ab40048, abeam, Cambridge, MA), antigen for Trastuzumab and the CD20 peptide (ab97360, abeam, Cambridge, MA), antigen for Rituximab are run on a 12% SDS-Page gel and transferred onto a membrane using the iBlot from Invitrogen. The membranes are incubated for 1 hour with their respective cell supernatants from CHO-K1 cells which are co-transfected with 500 ng each of Heavy and Light Chain of either Trastuzumab or Rituximab. The membranes are blocked with 1% BSA and a secondary anti-human IgG antibody conjugated to alkaline phosphatase (abcam, Cambridge, MA) is added. Antibody detection is conducted using the NOVEX alkaline phosphatase chromogenic substrate by Invitrogen (Carlsbad, CA). The data shows that a humanized IgG antibodies generated from modified mRNA is capable of recognizing and binding to their respective antigens.

### E. Cell Proliferation Assay

[1262] The SK-BR-3 cell line, an adherent cell line derived from a human breast adenocarcinoma, which overexpresses the HER2/neu receptor can be used to compare the anti-proliferative properties of modified mRNA (mmRNA) generated Trastuzumab. Varying concentrations of purified Trastuzumab generated from modified mRNA and trastuzumab are be added to cell cultures, and their effects on cell growth are be assessed in triplicate cytotoxicity and viability assays.

### Example 42: Bulk Transfection of Modified mRNA into Cell Culture

### A. Cationic Lipid Delivery Vehicles

[1263] RNA transfections are carried out using RNAIMAX™ (Invitrogen, Carlsbad, CA) or TRANSIT-mRNA (Mirus Bio, Madison, WI) cationic lipid delivery vehicles. RNA and reagent are first diluted in Opti-MEM basal media (Invitrogen, Carlsbad, CA). 100 ng/uL RNA is diluted 5× and 5 L of RNAIMax per g of RNA is diluted 10×. The diluted components are pooled and incubated 15 minutes at room temperature before they are dispensed to culture media. For TRANSIT-mRNA transfections, 100 ng/uL RNA is diluted 10× in Opti-MEM and BOOST reagent is added (at a concentration of 2 L per g of RNA), TRANSIT-mRNA is added (at a concentration of 2 L per g of RNA), and then the RNA-lipid complexes are delivered to the culture media after a 2-minute incubation at room temperature. RNA transfections are performed in Nutristem xenofree hES media (Stemgent, Cambridge, MA) for RiPS derivations, Dermal Cell Basal Medium plus Keratinocyte Growth Kit (ATCC) for keratinocyte experiments, and Opti-MEM plus 2% FBS for all other experiments. Successful introduction of a modified mRNA (mmRNA) into host cells can be monitored using various known methods, such as a fluorescent marker, such as Green Fluorescent Protein (GFP). Successful transfection of a modified mRNA can also be determined by measuring the protein expression level of the target polypeptide by e.g., Western Blotting or immunocytochemistry. Similar methods may be followed for large volume scale-up to multi-liter (5-10,000L) culture format following similar RNA-lipid complex ratios.

B. Electroporation Delivery of Exogenous Synthetic mRNA Transcripts

[1264] Electroporation parameters are optimized by transfecting MRC-5 fibroblasts with in vitro synthetic modified mRNA (mmRNA) transcripts and measuring transfection efficiency by quantitative RT-PCR with primers designed to specifically detect the exogenous transcripts. Discharging a 150 uF capacitor charged to F into 2.5×10⁶ cells suspended in 50 μl of Opti-MEM (Invitrogen, Carlsbad, CA) in a standard electroporation cuvette with a 2 mm gap is sufficient for repeated delivery in excess of 10,000 copies of modified mRNA transcripts per cell, as determined using the standard curve method, while maintaining high viability (>70%). Further experiments may reveal that the voltage required to efficiently transfect cells with mmRNA transcripts can depend on the cell density during electroporation. Cell density may vary from 1×10⁶ cell/50 μl to a density of 2.5×10⁶ cells/50 μl and require from 110V to 145V to transfect cells with similar efficiencies measured in transcript copies per cell. Large multi-liter (5-10,000 L) electroporation may be performed similar to large volume flow electroporation strategies similar to methods described with the above described constraints (Li et al., 2002; Geng et al., 2010).

### Example 43: In Vivo Delivery Using Lipoplexes

### A. Human EPO Modified RNA Lipoplex

[1265] A formulation containing 100 μg of modified human erythropoietin mRNA(mRNA shown in SEQ ID NO: 33897; polyA tail of approximately 160 nucleotides not shown in sequence; 5′cap, Cap1) (EPO; fully modified 5-methylcytosine; N1-methylpseudouridine) was lipoplexed with 30% by volume of RNAIMAX™ (Lipoplex-h-Epo-46; Generation 2 or Gen2) in 50-70 uL delivered intramuscularly to four C57/BL6 mice. Other groups consisted of mice receiving an injection of the lipoplexed modified luciferase mRNA (Lipoplex-luc) (IVT cDNA sequence shown in SEQ ID NO: 33906; mRNA sequence shown in SEQ ID NO: 33907, polyA tail of approximately 160 nucleotides not shown in sequence, 5′cap, Cap1, fully modified with 5-methylcytosine at each cytosine and pseudouridine replacement at each uridine site) which served as a control containing 100 μg of modified luciferase mRNA was lipoplexed with 30% by volume of RNAiMAX™ or mice receiving an injection of the formulation buffer as negative control at a dose volume of 65 ul. 13 hours after the intramuscular injection, serum was collected from each mouse to measure the amount of human EPO protein in the mouse serum by human EPO ELISA and the results are shown in Table 60.

TABLE 60
Human EPO Production (IM Injection Route)

| Formualtion | Average |
|---|---|
| Lipoplex-h-Epo-46 | 251.95 |
| Lipoplex-Luc | 0 |
| Formulation Buffer | 0 |

### B. Human G-CSF Modified RNA Lipoplex

[1266] A formulation containing 100 μg of one of the two types of modified human G-CSF mRNA(mRNA sequence shown in SEQ ID NO: 33897; polyA tail of approximately 160 nucleotides not shown in sequence; 5′cap, Cap1) (G-CSF fully modified with 5-methylcytosine and pseudouridine (G-CSF) or G-CSF fully modified with 5-methylcytosine and N1-methyl-pseudouridine (G-CSF—N1) lipoplexed with 30% by volume of RNAIMAX™ and delivered in 150 uL intramuscularly (IM), in 150 uL subcutaneously (SC) and in 225 uL intravenously (IV) to C57/BL6 mice. Three control groups were administered either 100 μg of modified luciferase mRNA (IVT cDNA sequence shown in SEQ ID NO: 33906; mRNA sequence shown in SEQ ID NO: 33907, polyA tail of approximately 160 nucleotides not shown in sequence, 5′cap, Cap1, fully modified with 5-methylcytosine at each cytosine and pseudouridine replacement at each uridine site) intramuscularly (Luc-unsp I.M.) or 150 μg of modified luciferase mRNA intravenously (Luc-unsp I.V.) or 150 μL of the formulation buffer intramuscularly (Buffer I.M.). 6 hours after administration of a formulation, serum was collected from each mouse to measure the amount of human G-CSF protein in the mouse serum by human G-CSF ELISA and the results are shown in Table 61.

[1267] These results demonstrate that both 5-methylcytosine/pseudouridine and 5-methylcytosine/N1-methylpseudouridine modified human G-CSF mRNA can result in specific human G-CSF protein expression in serum when delivered via I.V. or I.M. route of administration in a lipoplex formulation.

TABLE 61
Human G-CSF in Serum
(I.M., I.V., S.C. Injection Route)

| | | G-CSF |
|---|---|---|
| Formulation | Route | (pg/ml) |
| G-CSF | I.M. | 85.6 |
| G-CSF N1 | I.M. | 40.1 |
| G-CSF | S.C. | 3.9 |
| G-CSF N1 | S.C. | 0.0 |
| G-CSF | I.V. | 31.0 |
| G-CSF N1 | I.V. | 6.1 |
| Luc-unsp | I.M. | 0.0 |
| Luc-unsp | I.V. | 0.0 |
| Buffer | I.M. | 0.0 |

### C. Human G-CSF Modified RNA Lipoplex Comparison

[1268] A formulation containing 100 μg of either modified human G-CSF mRNA lipoplexed with 30% by volume of RNAIMAX™ with a 5-methylcytosine (5mc) and a pseudouridine (ψ) modification (G-CSF-Gen1-Lipoplex), modified human G-CSF mRNA with a 5mc and ψ modification in saline (G-CSF-Gen1-Saline), modified human G-CSF mRNA with a N1-5-methylcytosine (N1-5mc) and a ψ modification lipoplexed with 30% by volume of RNAIMAX™ (G-CSF-Gen2-Lipoplex), modified human G-CSF mRNA with a N1-5mc and ψ modification in saline (G-CSF-Gen2-Saline), modified luciferase with a 5mc and ψ modification lipoplexed with 30% by volume of RNAIMAX™ (Luc-Lipoplex), or modified luciferase mRNA with a a 5mc and W modification in saline (Luc-Saline) was delivered intramuscularly (I.M.) or subcutaneously (S.C.) and a control group for each method of administration was giving a dose of 80 μL of the formulation buffer (F. Buffer) to C57/BL6 mice. 13 hours post injection serum and tissue from the site of injection were collected from each mouse and analyzed by G-CSF ELISA to compare human G-CSF protein levels. The results of the human G-CSF protein in mouse serum from the intramuscular administration, and the subcutaneous administration results are shown in Table 62.

[1269] These results demonstrate that 5-methylcytosine/pseudouridine and 5-methylcytosine/N1-methylpseudouridine modified human G-CSF mRNA can result in specific human G-CSF protein expression in serum when delivered via I.M. or S.C. route of administration whether in a saline formulation or in a lipoplex formulation. As shown in Table 62, 5-methylcytosine/N1-methyl-pseudouridine modified human G-CSF mRNA generally demonstrates increased human G-CSF protein production relative to 5-methylcytosine/pseudouridine modified human G-CSF mRNA.

TABLE 62
Human G-CSF Protein in Mouse Serum

| | G-CSF (pg/ml) | |
|---|---|---|
| | I.M. Injection | S.C. Injenction |
| Formulation | Route | Route |
| G-CSF-Gen1-Lipoplex | 13.988 | 42.855 |
| GCSF-Gen1-saline | 9.375 | 4.614 |
| GCSF-Gen2-lipoplex | 75.572 | 32.107 |
| GCSF-Gen2-saline | 20.190 | 45.024 |
| Luc lipoplex | 0 | 3.754 |
| Luc saline | 0.0748 | 0 |
| F. Buffer | 4.977 | 2.156 |

D. mCherry Modified RNA Lipoplex Comparison

### Intramuscular and Subcutaneous Administration

[1270] A formulation containing 100 μg of either modified mCherry mRNA (mRNA sequence shown in SEQ ID NO: 33898; polyA tail of approximately 160 nucleotides not shown in sequence; 5′cap, Cap1) lipoplexed with 30% by volume of RNAIMAX™ or modified mCherry mRNA in saline is delivered intramuscularly and subcutaneously to mice. A formulation buffer is also administered to a control group of mice either intramuscularly or subcutaneously. The site of injection on the mice may be collected 17 hours post injection for sectioning to determine the cell type(s) responsible for producing protein.

### Intravitreal Administration

[1271] A formulation containing 10 μg of either modified mCherry mRNA lipoplexed with RNAIMAX™, modified mCherry mRNA in a formulation buffer, modified luciferase mRNA lipoplexed with RNAMAX™, modified luciferase mRNA in a formulation buffer can be administered by intravitreal injection (IVT) in rats in a dose volume of 5 μl/eye. A formulation buffer is also administered by IVT to a control group of rats in a dose volume of 5 μl/eye. Eyes from treated rats can be collected after 18 hours post injection for sectioning and lysating to determine whether mmRNA can be effectively delivered in vivo to the eye and result in protein production, and to also determine the cell type(s) responsible for producing protein in vivo.

### Intranasal Administration

[1272] A formulation containing 100 μg of either modified mCherry mRNA lipoplexed with 30% by volume of RNAIMAX™, modified mCherry mRNA in saline, modified luciferase mRNA lipoplexed with 30% by volume of RNAIMAX™ or modified luciferase mRNA in saline is delivered intranasally. A formulation buffer is also administered to a control group intranasally. Lungs may be collected about 13 hours post instillation for sectioning (for those receiving mCherry mRNA) or homogenization (for those receiving luciferase mRNA). These samples will be used to determine whether mmRNA can be effectively delivered in vivo to the lungs and result in protein production, and to also determine the cell type(s) responsible for producing protein in vivo.

### Example 44: In Vivo Delivery Using Varying Lipid Ratios

[1273] Modified mRNA was delivered to C57/BL6 mice to evaluate varying lipid ratios and the resulting protein expression. Formulations of 100 μg modified human EPO mRNA (mRNA shown in SEQ ID NO: 33900; polyA tail of approximately 160 nucleotides not shown in sequence; 5′cap, Cap1; fully modified with 5-methylcytosine and pseudouridine) lipoplexed with 10%, 30% or 50% RNAIMAX™, 100 μg modified luciferase mRNA (IVT cDNA sequence shown in SEQ ID NO: 33906; mRNA sequence shown in SEQ ID NO: 33907, polyA tail of approximately 160 nucleotides not shown in sequence, 5′cap, Cap1, fully modified with 5-methylcytosine at each cytosine and pseudouridine replacement at each uridine site) lipoplexed with 10%, 30% or 50% RNAIMAX™ or a formulation buffer were administered intramuscularly to mice in a single 70 μl dose. Serum was collected 13 hours post injection to undergo a human EPO ELISA to determine the human EPO protein level in each mouse. The results of the human EPO ELISA, shown in Table 63, show that modified human EPO expressed in the muscle is secreted into the serum for each of the different percentage of RNAIMAX™

TABLE 63
Human EPO Protein in Mouse Serum
(IM Injection Route)

| | EPO |
|---|---|
| Formulation | (pg/ml) |
| Epo + 10% RNAiMAX | 11.4 |
| Luc + 10% RNAiMAX | 0 |
| Epo + 30% RNAiMAX | 27.1 |
| Luc + 30% RNAiMAX | 0 |
| Epo + 50% RNAiMAX | 19.7 |
| Luc + 50% RNAiMAX | 0 |
| F. Buffer | 0 |

### Example 45: Intramuscular and Subcutaneous In Vivo Delivery in Mammals

[1274] Modified human EPO mRNA (mRNA sequence shown in SEQ ID NO: 33900; polyA tail of approximately 160 nucleotides not shown in sequence; 5′cap, Cap1; fully modified with 5-methylcytosine and pseudouridine) formulated in saline was delivered to either C57/BL6 mice or Sprague-Dawley rats to evaluate the dose dependency on human EPO production. Rats were intramuscularlly injected with 50 μl of the modified human EPO mRNA (h-EPO), modified luciferase mRNA (Luc) (IVT cDNA sequence shown in SEQ ID NO: 33906; mRNA sequence shown in SEQ ID NO: 33907, polyA tail of approximately 160 nucleotides not shown in sequence, 5′cap, Cap1, fully modified with 5-methylcytosine at each cytosine and pseudouridine replacement at each uridine site) or the formulation buffer (F.Buffer) as described in the dosing chart Table 64.

[1275] Mice were intramuscularly or subcutaneously injected with 50 μl of the modified human EPO mRNA (h-EPO), modified luciferase mRNA (Luc) or the formulation buffer (F.Buffer) as described in the dosing chart Table 65. 13 hours post injection blood was collected and serum was analyzed to determine the amount human EPO for each mouse or rat. The average and geometric mean in pg/ml for the rat study are also shown in Table 64.

TABLE 64
Rat Study

| | | Dose | | | | | | | Avg. | Geometric- |
|---|---|---|---|---|---|---|---|---|---|---|
| | Group | (ug) | R#1 | R#2 | R#3 | R#4 | R#5 | R#6 | pg/ml | mean pg/ml |
| h-EPO | G#1 | 150 | 61.8 | 86.3 | 69.9 | 55.2 | 59 | 74.2 | 67.7 | 67.1 |
| h-EPO | G#2 | 100 | 69.4 | 77.8 | 48.2 | 17.6 | 101.9 | 161.5 | 79.4 | 66.9 |
| h-EPO | G#3 | 50 | 143.6 | 60.9 | 173.4 | 145.9 | 61.5 | 23.9 | 101.5 | 85.4 |
| h-EPO | G#4 | 10 | 7.8 | 11.8 | 30.9 | 36.2 | 40.6 | 150.3 | 46.3 | 31.2 |
| h-EPO | G#5 | 1 | 9.1 | 35.8 | — | 46.2 | 18.1 | 34.1 | 28.7 | 25.4 |
| Luc | G#6 | 100 | 34.1 | 36.5 | 13.5 | 13.7 | — | — | 24.5 | 22.4 |
| F. | G#7 | — | 14.7 | 18.5 | 21.2 | 20.3 | — | — | 18.7 | 18.5 |
| Buffer | | | | | | | | | | |

TABLE 65
Mouse Study

| | | | | Average |
|---|---|---|---|---|
| | | | | Level |
| | | | | in serum |
| Route | Treatment | Group | Dose | pg/ml |
| IM | h-EPO | 1 | 100 μg | 96.2 |
| IM | h-EPO | 2 | 50 μg | 63.5 |
| IM | h-EPO | 3 | 25 μg | 18.7 |
| IM | h-EPO | 4 | 10 μg | 25.9 |
| IM | h-EPO | 5 | 1 μg | 2.6 |
| IM | Luc | 6 | 100 μg | 0 |
| IM | F. Buffer | 7 | — | 1.0 |
| SC | h-EPO | 1 | 100 μg | 72.0 |
| SC | Luc | 2 | 100 μg | 26.7 |
| SC | F. Buffer | 3 | — | 17.4 |

### Example 46: Duration of Activity after Intramuscular In Vivo Delivery in Rats

[1276] Modified human EPO mRNA (mRNA sequence shown in SEQ ID NO: 33900; polyA tail of approximately 160 nucleotides not shown in sequence; 5′cap, Cap1; fully modified with 5-methylcytosine and pseudouridine) formulated in formulation buffer was delivered to Sprague-Dawley rats to determine the duration of the dose response. Rats were intramuscularly injected with 50 μl of the modified human EPO mRNA (h-EPO), modified luciferase mRNA(IVT cDNA sequence shown in SEQ ID NO: 33906; mRNA sequence shown in SEQ ID NO: 33907, polyA tail of approximately 160 nucleotides not shown in sequence, 5′cap, Cap1, fully modified with 5-methylcytosine at each cytosine and pseudouridine replacement at each uridine site) (Luc) or the formulation buffer (F.Buffer) as described in the dosing chart Table 66. The rats were bled 2, 6, 12, 24, 48 and 72 hours after the intramuscular injection to determine the concentration of human EPO in serum at a given time. The average and geometric mean in pg/ml for this study are also shown in Table 66.

TABLE 66
Dosing Chart

| | | Dose | Avg. | Geometric- |
|---|---|---|---|---|
| | Group | (μg) | pg/ml | mean pg/ml |
| h-EPO | 2 hour | 100 | 59.6 | 58.2 |
| h-EPO | 6 hour | 100 | 68.6 | 55.8 |
| h-EPO | 12 hour | 100 | 87.4 | 84.5 |
| h-EPO | 24 hour | 100 | 108.6 | 95.3 |
| h-EPO | 48 hour | 100 | 77.9 | 77.0 |
| h-EPO | 72 hour | 100 | 80.1 | 75.8 |
| Luc | 24, 48 | 100 | 37.2 | 29.2 |
| | and 72 | | | |
| | hour | | | |
| F. Buffer | 24, 48 | — | 48.9 | 10.4 |
| | and 72 | | | |
| | hour | | | |

### Example 47: Routes of Administration

[1277] Further studies were performed to investigate dosing using different routes of administration. Following the protocol outlined in Example 35, 4 mice per group were dosed intramuscularly (I.M.), intravenously (IV) or subcutaneously (S.C.) by the dosing chart outlined in Table 67. Serum was collected 13 hours post injection from all mice, tissue was collected from the site of injection from the intramuscular and subcutaneous group and the spleen, liver and kidneys were collected from the intravenous group. The results from the intramuscular group and the subcutaneous group results are shown in Table 68.

TABLE 67
Dosing Chart

| | | | | Total | | Dosing |
|---|---|---|---|---|---|---|
| Group | Treatment | Route | Dose of mmRNA | Dose | | Vehicle |
| 1 | Lipoplex-human EPO mmRNA | I.M. | 4 × 100 ug + 30% Lipoplex | 4 × 70 | ul | Lipoplex |
| 2 | Lipoplex-human EPO mmRNA | I.M. | 4 × 100 ug | 4 × 70 | ul | Buffer |
| 3 | Lipoplex-human EPO mmRNA | S.C. | 4 × 100 ug + 30% Lipoplex | 4 × 70 | ul | Lipoplex |
| 4 | Lipoplex-human EPO mmRNA | S.C. | 4 × 100 ug | 4 × 70 | ul | Buffer |
| 5 | Lipoplex-human EPO mmRNA | I.V. | 200 ug + 30% Lipoplex | 140 | ul | Lipoplex |
| 6 | Lipoplexed-Luciferase mmRNA | I.M. | 100 ug + 30% Lipoplex | 4 × 70 | ul | Lipoplex |
| 7 | Lipoplexed-Luciferase mmRNA | I.M. | 100 ug | 4 × 70 | ul | Buffer |
| 8 | Lipoplexed-Luciferase mmRNA | S.C. | 100 ug + 30% Lipoplex | 4 × 70 | ul | Lipoplex |
| 9 | Lipoplexed-Luciferase mmRNA | S.C. | 100 ug | 4 × 70 | ul | Buffer |
| 10 | Lipoplexed-human EPO mmRNA | I.V. | 200 ug + 30% Lipoplex | 140 | ul | Lipoplex |
| 11 | Formulation Buffer | I.M. | 4× multi dosing | 4 × 70 | ul | Buffer |

TABLE 68
Human EPO Protein in Mouse Serum (I.M. Injection Route)

| | EPO (pg/ml) | |
|---|---|---|
| | I.M. Injection | S.C. Injection |
| Formulation | Route | Route |
| Epo-Lipoplex | 67.115 | 2.154 |
| Luc-Lipoplex | 0 | 0 |
| Epo-Saline | 100.891 | 11.37 |
| Luc-Saline | 0 | 0 |
| Formulation Buffer | 0 | 0 |

### Example 48. Rapidly Eliminated Lipid Nanoparticle (reLNP) Studies

A. Formulation of Modified RNA reLNPs

[1278] Solutions of synthesized lipid, 1,2-distearoyl-3-phosphatidylcholine (DSPC) (Avanti Polar Lipids, Alabaster, AL), cholesterol (Sigma-Aldrich, Taufkirchen, Germany), and α-[3′-(1,2-dimyristoyl-3-propanoxy)-carboxamide-propyl]-o-methoxy-polyoxyethylene (PEG-c-DOMG) (NOF, Bouwelven, Belgium) are prepared and stored at −20° C. The synthesized lipid is selected from DLin-DMA with an internal ester, DLin-DMA with a terminal ester, DLin-MC3-DMA-internal ester, and DLin-MC3-DMA with a terminal ester. The reLNPs are combined to yield a molar ratio of 50:10:38.5:1.5 (reLNP: DSPC: Cholesterol: PEG-c-DOMG). Formulations of the reLNPs and modified mRNA are prepared by combining the lipid solution with the modified mRNA solution at total lipid to modified mRNA weight ratio of 10:1, 15:1, 20:1 and 30:1.

B. Characterization of formulations

[1279] A Zetasizer Nano ZS (Malvern Instruments Ltd, Malvern, Worcestershire, UK) is used to determine the particle size, the polydispersity index (PDI) and the zeta potential of the modified mRNA nanoparticles in 1×PBS in determining particle size and 15 mM PBS in determining zeta potential.

[1280] Ultraviolet-visible spectroscopy is used to determine the concentration of modified mRNA nanoparticle formulation. After mixing, the absorbance spectrum of the solution is recorded between 230 nm and 330 nm on a DU 800 spectrophotometer (Beckman Coulter, Beckman Coulter, Inc., Brea, CA). The modified RNA concentration in the nanoparticle formulation is calculated based on the extinction coefficient of the modified RNA used in the formulation and on the difference between the absorbance at a wavelength of 260 nm and the baseline value at a wavelength of 330 nm.

[1281] QUANT-IT™ RIBOGREEN® RNA assay (Invitrogen Corporation Carlsbad, CA) is used to evaluate the encapsulation of modified RNA by the nanoparticle. The samples are diluted, transferred to a polystyrene 96 well plate, then either a TE buffer or a 2% Triton X-100 solution is added. The plate is incubated and the RIBOGREEN® reagent is diluted in TE buffer, and of this solution is added to each well. The fluorescence intensity is measured using a fluorescence plate reader (Wallac Victor 1420 Multilablel Counter; Perkin Elmer, Waltham, MA) The fluorescence values of the reagent blank are subtracted from each of the samples and the percentage of free modified RNA is determined by dividing the fluorescence intensity of the intact sample by the fluorescence value of the disrupted sample.

### C. In Vitro Incubation

[1282] Human embryonic kidney epithelial (HEK293) and hepatocellular carcinoma epithelial (HepG2) cells (LGC standards GmbH, Wesel, Germany) are seeded on 96-well plates (Greiner Bio-one GmbH, Frickenhausen, Germany) and plates for HEK293 cells are precoated with collagen type1. HEK293 are seeded at a density of about 30,000 and HepG2 are seeded at a density of about 35,000 cells per well in 100 μl cell culture medium. Formulations containing mCherry mRNA (mRNA sequence shown in SEQ ID NO: 33898; polyA tail of approximately 160 nucleotides not shown in sequence; 5′cap, Cap1) are added directly after seeding the cells and incubated. The mCherry cDNA with the T7 promoter, 5′untranslated region (UTR) and 3′ UTR used in in vitro transcription (IVT) is given in SEQ ID NO: 33899.

[1283] Cells are harvested by transferring the culture media supernatants to a 96-well Pro-Bind U-bottom plate (Beckton Dickinson GmbH, Heidelberg, Germany). Cells are trypsinized with ½ volume Trypsin/EDTA (Biochrom AG, Berlin, Germany), pooled with respective supernatants and fixed by adding one volume PBS/2% FCS (both Biochrom AG, Berlin, Germany)/0.5% formaldehyde (Merck, Darmstadt, Germany). Samples are then submitted to a flow cytometer measurement with an excitation laser and a filter for PE-Texas Red in a LSRII cytometer (Beckton Dickinson GmbH, Heidelberg, Germany). The mean fluorescence intensity (MFI) of all events and the standard deviation of four independent wells are presented in for samples analyzed.

### D. In Vivo Formulation Studies

[1284] Mice are administered intravenously a single dose of a formulation containing a modified mRNA and a reLNP. The modified mRNA administered to the mice is selected from G-CSF (mRNA sequence shown in SEQ ID NO: 33897; polyA tail of approximately 160 nucleotides not shown in sequence; 5′cap, Cap1), Factor IX (mRNA shown in SEQ ID NO: 33901; polyA tail of approximately 160 nucleotides not shown in sequence; 5′cap, Cap1) or mCherry (mRNA sequence shown in SEQ ID NO: 33898; polyA tail of approximately 160 nucleotides not shown in sequence; 5′cap, Cap1).

[1285] The mice are injected with 100 ug, 10 μg or 1 μg of the formulated modified mRNA and are sacrificed 8 hours after they are administered the formulation. Serum from the mice administered formulations containing human G-CSF modified mRNA are measured by specific G-CSF ELISA and serum from mice administered human Factor IX modified RNA is analyzed by specific factor IX ELISA or chromogenic assay. The liver and spleen from the mice administered with mCherry modified mRNA are analyzed by immunohistochemistry (IHC) or fluorescence-activated cell sorting (FACS). As a control, a group of mice are not injected with any formulation and their serum and tissue are collected analyzed by ELISA, FACS and/or IHC.

### Example 49. In Vitro Transfection of VEGF-A

[1286] Human vascular endothelial growth factor-isoform A (VEGF-A) modified mRNA (mRNA sequence shown in SEQ ID NO: 33910; polyA tail of approximately 160 nucleotides not shown in sequence; 5′cap, Cap1) was transfected via reverse transfection in Human Keratinocyte cells in 24 multi-well plates. Human Keratinocytes cells were grown in EPILIFE® medium with Supplement S7 from Invitrogen (Carlsbad, CA) until they reached a confluence of 50-70%. The cells were transfected with 0, 46.875, 93.75, 187.5, 375, 750, and 1500 ng of modified mRNA (mmRNA) encoding VEGF-A which had been complexed with RNAIMAX™ from Invitrogen (Carlsbad, CA). The RNA:RNAIMAX™ complex was formed by first incubating the RNA with Supplement-free EPILIFE® media in a 5× volumetric dilution for 10 minutes at room temperature. In a second vial, RNAIMAX™ reagent was incubated with Supplement-free EPILIFE® Media in a 10× volumetric dilution for 10 minutes at room temperature. The RNA vial was then mixed with the RNAIMAX™ vial and incubated for 20-30 minutes at room temperature before being added to the cells in a drop-wise fashion.

[1287] The fully optimized mRNA encoding VEGF-A (mRNA sequence shown in SEQ ID NO: 33910; polyA tail of approximately 160 nucleotides not shown in sequence; 5′cap, Cap1) transfected with the Human Keratinocyte cells included modifications during translation such as natural nucleoside triphosphates (NTP), pseudouridine at each uridine site and 5-methylcytosine at each cytosine site (pseudo-U/5mC), and N1-methyl-pseudouridine at each uridine site and 5-methylcytosine at each cytosine site (N1-methyl-Pseudo-U/5mC). Cells were transfected with the mmRNA encoding VEGF-A and secreted VEGF-A concentration (pg/ml) in the culture medium was measured at 6, 12, 24, and 48 hours post-transfection for each of the concentrations using an ELISA kit from Invitrogen (Carlsbad, CA) following the manufacturers recommended instructions. These data, shown in Table 69, show that modified mRNA encoding VEGF-A is capable of being translated in Human Keratinocyte cells and that VEGF-A is transported out of the cells and released into the extracellular environment.

TABLE 69
VEGF-A Dosing and Protein Secretion

| | | | | |
|---|---|---|---|---|
| | 6 hours | 12 hours | 24 hours | 48 hours |
| Dose (ng) | (pg/ml) | (pg/ml) | (pg/ml) | (pg/ml) |

VEGF-A Dose Containing Natural NTPs

| | | | | |
|---|---|---|---|---|
| 46.875 | 10.37 | 18.07 | 33.90 | 67.02 |
| 93.75 | 9.79 | 20.54 | 41.95 | 65.75 |
| 187.5 | 14.07 | 24.56 | 45.25 | 64.39 |
| 375 | 19.16 | 37.53 | 53.61 | 88.28 |
| 750 | 21.51 | 38.90 | 51.44 | 61.79 |
| 1500 | 36.11 | 61.90 | 76.70 | 86.54 |

VEGF-A Dose Containing Pseudo-U/5mC

| | | | | |
|---|---|---|---|---|
| 46.875 | 10.13 | 16.67 | 33.99 | 72.88 |
| 93.75 | 11.00 | 20.00 | 46.47 | 145.61 |
| 187.5 | 16.04 | 34.07 | 83.00 | 120.77 |
| 375 | 69.15 | 188.10 | 448.50 | 392.44 |
| 750 | 133.95 | 304.30 | 524.02 | 526.58 |
| 1500 | 198.96 | 345.65 | 426.97 | 505.41 |

VEGF-A Dose Containing N1-methyl-Pseudo-U/5mC

| | | | | |
|---|---|---|---|---|
| 46.875 | 0.03 | 6.02 | 27.65 | 100.42 |
| 93.75 | 12.37 | 46.38 | 121.23 | 167.56 |
| 187.5 | 104.55 | 365.71 | 1025.41 | 1056.91 |
| 375 | 605.89 | 1201.23 | 1653.63 | 1889.23 |
| 750 | 445.41 | 1036.45 | 1522.86 | 1954.81 |
| 1500 | 261.61 | 714.68 | 1053.12 | 1513.39 |

### Example 50. In Vivo Studies of Factor IX

[1288] Human Factor IX mmRNA (Gen1; fully modified 5-methycytosine and pseudouridine) formulated in formulation buffer was delivered to mice via intramuscular injection. The results demonstrate that Factor IX protein was elevated in serum as measured 13 hours after administration.

[1289] In this study, mice (N=5 for Factor IX, N=3 for Luciferase or Buffer controls) were intramuscularly injected with 50 μl of the Factor IX mmRNA (mRNA sequence shown in SEQ ID NO: 33901; polyA tail of approximately 160 nucleotides not shown in sequence; 5′cap, Cap1), Luciferase (IVT cDNA sequence shown in SEQ ID NO: 33906; mRNA sequence shown in SEQ ID NO: 33907, polyA tail of approximately 160 nucleotides not shown in sequence, 5′cap, Cap1, fully modified with 5-methylcytosine at each cytosine and pseudouridine replacement at each uridine site) or the formulation buffer (F.Buffer) at 2×100 ug/mouse. The mice were bled at 13 hours after the intramuscular injection to determine the concentration of human the polypeptide in serum in pg/mL. The results revealed that administration of Factor IX mmRNA resulted in levels of 1600 μg/mL at 13 hours as compared to less than 100 μg/mL of Factor IX for either Luciferase or buffer control administration.

### Example 51. Multi-Site Administration: Intramuscular and Subcutaneous

[1290] Human G-CSF modified mRNA (mRNA sequence shown in SEQ ID NO: 33897; polyA tail of approximately 160 nucleotides not shown in sequence; 5′cap, Cap1) modified as either Gen1 or Gen2 (5-methylcytosine (5mc) and a pseudouridine (W) modification, G-CSF-Gen1; or N1-5-methylcytosine (N1-5mc) and a W modification, G-CSF-Gen2) and formulated in formulation buffer were delivered to mice via intramuscular (IM) or subcutaneous (SC) injection. Injection of four doses or 2×50 ug (two sites) daily for three days (24 hrs interval) was performed. The fourth dose was administered 6 hrs before blood collection and CBC analysis. Controls included Luciferase (IVT cDNA sequence shown in SEQ ID NO: 33906; mRNA sequence shown in SEQ ID NO: 33907, polyA tail of approximately 160 nucleotides not shown in sequence, 5′cap, Cap1, fully modified with 5-methylcytosine at each cytosine and pseudouridine replacement at each uridine site) or the formulation buffer (F.Buffer). The mice were bled at 72 hours after the first mRNA injection (6 hours after the last modified mRNA dose) to determine the effect of mRNA-encoded human G-CSF on the neutrophil count. The dosing regimen is shown in Table 70 as are the resulting neutrophil counts (thousands/uL). In Table 70, an asterisk(*) indicates statistical significance at p<0.05. For intramuscular administration, the data reveal a four fold increase in neutrophil count above control at day 3 for the Gen1 G-CSF mRNA and a two fold increase for the Gen2 G-CSF mmRNA. For subcutaneous administration, the data reveal a two fold increase in neutrophil count above control at day 3 for the Gen2 G-CSF mRNA.

[1291] These data demonstrate that both 5-methylcytidine/pseudouridine and 5-methylcytidine/N1-methylpseudouridine-modified mRNA can be biologically active, as evidenced by specific increases in blood neutrophil counts.

TABLE 70
Dosing Regimen

| | | | | | | | Neutro- |
|---|---|---|---|---|---|---|---|
| | | | | | | | phil |
| | Treat- | | | Dose | Dose Vol. | Dosing | Thous/ |
| Gr. | ment | Route | N = | (μg/mouse) | (μl/mouse) | Vehicle | uL |
| 1 | G-CSF | I.M | 5 | 2 × 50 ug | 50 | F. | 840* |
| | (Gen1) | | | (four doses) | | buffer | |
| 2 | G-CSF | S.C | 5 | 2 × 50 ug | 50 | F. | 430 |
| | (Gen1) | | | (four doses) | | buffer | |
| 3 | G-CSF | I.M | 5 | 2 × 50 ug | 50 | F. | 746* |
| | (Gen2) | | | (four doses) | | buffer | |
| 4 | G-CSF | S.C | 5 | 2 × 50 ug | 50 | F. | 683 |
| | (Gen2) | | | (four doses) | | buffer | |
| 5 | Luc | I.M. | 5 | 2 × 50 ug | 50 | F. | 201 |
| | (Gen1) | | | (four doses) | | buffer | |
| 6 | Luc | S.C. | 5 | 2 × 50 ug | 50 | F. | 307 |
| | (Gen1) | | | (four doses) | | buffer | |
| 7 | Luc | I.M | 5 | 2 × 50 ug | 50 | F. | 336 |
| | (Gen2) | | | (four doses) | | buffer | |
| 8 | Luc | S.C | 5 | 2 × 50 ug | 50 | F. | 357 |
| | (Gen2) | | | (four doses) | | buffer | |
| 9 | F. | I.M | 4 | 0 | 50 | F. | 245 |
| | Buffer | | | (four doses) | | buffer | |
| 10 | F. | S.C. | 4 | 0 | 50 | F. | 509 |
| | Buffer | | | (four doses) | | buffer | |
| 11 | Un- | — | 4 | | | — | 312 |
| | treated | | | | | | |

### Example 52. Intravenous Administration

[1292] Human G-CSF modified mRNA (mRNA sequence shown in SEQ ID NO: 33897; polyA tail of approximately 160 nucleotides not shown in sequence; 5′cap, Cap1) modified with 5-methylcytosine (5mc) and a pseudouridine (ψ) modification (Gen1); or having no modifications and formulated in 10% lipoplex (RNAiMax) were delivered to mice at a dose of 50 ug RNA and in a volume of 100 ul via intravenous (IV) injection at days 0, 2 and 4. Neutrophils were measured at days 1, 5 and 8. Controls included non-specific mammalian RNA or the formulation buffer alone (F.Buffer). The mice were bled at days 1, 5 and 8 to determine the effect of modified mRNA-encoded human G-CSF to increase neutrophil count. The dosing regimen is shown in Table 71 as are the resulting neutrophil counts (thousands/uL; K/uL).

[1293] For intravenous administration, the data reveal a four to five fold increase in neutrophil count above control at day 5 with G-CSF modified mRNA but not with unmodified G-CSF mRNA or non-specific controls. Blood count returned to baseline four days after the final injection. No other changes in leukocyte populations were observed. In Table 71, an asterisk(*) indicates statistical significance at p<0.001 compared to buffer.

[1294] These data demonstrate that lipoplex-formulated 5-methylcytidine/pseudouridine-modified mRNA can be biologically active, when delivered through an I.V. route of administration as evidenced by specific increases in blood neutrophil counts. No other cell subsets were significantly altered. Unmodified G-CSF mRNA similarly administered showed no pharmacologic effect on neutrophil counts.

TABLE 71
Dosing Regimen

| | | | | | | Neutro- |
|---|---|---|---|---|---|---|
| | | | | Dose Vol. | Dosing | phil |
| Gr. | Day | Treatment | N = | (μl/mouse) | Vehicle | K/uL |
| 1 | 1 | G-CSF (Gen 1) | 5 | 100 | 10% lipoplex | 2.91 |
| 2 | 5 | G-CSF (Gen 1) | 5 | 100 | 10% lipoplex | 5.32* |
| 3 | 8 | G-CSF (Gen 1) | 5 | 100 | 10% lipoplex | 2.06 |
| 4 | 1 | G-CSF | 5 | 100 | 10% lipoplex | 1.88 |
| | | (no modification) | | | | |
| 5 | 5 | G-CSF | 5 | 100 | 10% lipoplex | 1.95 |
| | | (no modification) | | | | |
| 6 | 8 | G-CSF | 5 | 100 | 10% lipoplex | 2.09 |
| | | (no modification) | | | | |
| 7 | 1 | RNA control | 5 | 100 | 10% lipoplex | 2.90 |
| 8 | 5 | RNA control | 5 | 100 | 10% lipoplex | 1.68 |
| 9 | 8 | RNA control | 4 | 100 | 10% lipoplex | 1.72 |
| 10 | 1 | F. Buffer | 4 | 100 | 10% lipoplex | 2.51 |
| 11 | 5 | F. Buffer | 4 | 100 | 10% lipoplex | 1.31 |
| 12 | 8 | F. Buffer | 4 | 100 | 10% lipoplex | 1.92 |

### Example 53. Saline Formulation: Intramuscular Administration

### A. Protein Production

[1295] Human G-CSF modified mRNA (mRNA sequence shown in SEQ ID NO: 33897; polyA tail of approximately 160 nucleotides not shown in sequence; 5′cap, Cap1) and human EPO mmRNA (mRNA sequence shown in SEQ ID NO: 33900; polyA tail of approximately 160 nucleotides not shown in sequence; 5′cap, Cap1); G-CSF modified mRNA (modified with 5-methylcytosine (5mc) and pseudouridine (ψ)) and EPO modified mRNA (modified with N1-5-methylcytosine (N1-5mc) and ψ modification), were formulated in formulation buffer (150 mM sodium chloride, 2 mM calcium chloride, 2 mM phosphate, 0.5 mM EDTA at a pH of 6.5) and delivered to mice via intramuscular (IM) injection at a dose of 100 ug.

[1296] Controls included Luciferase (IVT cDNA sequence shown in SEQ ID NO: 33906; mRNA sequence shown in SEQ ID NO: 33907, polyA tail of approximately 160 nucleotides not shown in sequence, 5′cap, Cap1, fully modified with 5-methylcytosine at each cytosine and pseudouridine replacement at each uridine site) or the formulation buffer (F.Buffer). The mice were bled at 13 hours after the injection to determine the concentration of the human polypeptide in serum in pg/mL. (G-CSF groups measured human G-CSF in mouse serum and EPO groups measured human EPO in mouse serum). The data are shown in Table 72.

TABLE 72
Dosing Regimen

| | | | Dose | | Average |
|---|---|---|---|---|---|
| | | | Vol. | Dosing | Protein Product |
| Group | Treatment | N= | (μl/mouse) | Vehicle | pg/mL, serum |
| G-CSF | G-CSF | 5 | 50 | Saline | 19.8 |
| G-CSF | Luciferase | 5 | 50 | Saline | 0.5 |
| G-CSF | F. buffer | 5 | 50 | F. buffer | 0.5 |
| EPO | EPO | 5 | 50 | Saline | 191.5 |
| EPO | Luciferase | 5 | 50 | Saline | 15.0 |
| EPO | F. buffer | | | F. buffer | 4.8 |

### B. Dose Response

[1297] Human EPO modified mRNA (mRNA sequence shown in SEQ ID NO: 33900; polyA tail of approximately 160 nucleotides not shown in sequence; 5′cap, Cap1; fully modified with 5-methylcytosine and pseudouridine) were formulated in formulation buffer and delivered to mice via intramuscular (IM) injection.

[1298] Controls included Luciferase (mRNA sequence shown in SEQ ID NO: 33906, polyA tail of approximately 160 nucleotides not shown in sequence, 5′cap, Cap1, fully modified with 5-methylcytosine and pseudouridine) or the formulation buffer (F.Buffer). The mice were bled at 13 hours after the injection to determine the concentration of the human polypeptide in serum in pg/mL. The dose and expression are shown in Table 73.

TABLE 73
Dosing Regimen and Expression

| | | Average |
|---|---|---|
| | Dose Vol. | Protein Product |
| Treatment | (μl/mouse) | pg/mL, serum |
| EPO | 100 | 96.2 |
| EPO | 50 | 63.5 |
| EPO | 25 | 18.7 |
| EPO | 10 | 25.9 |
| EPO | 1 | 2.6 |
| Luciferase | 100 | 0.0 |
| F. buffer | 100 | 1.0 |

### Example 54. EPO Multi-Dose/Multi-Administration

[1299] Studies utilizing multiple intramuscular injection sites at one time point were designed and performed.

[1300] The design of a single multi-dose experiment involved using human erythropoietin (EPO) mmRNA (mRNA sequence shown in SEQ ID NO: 33900; polyA tail of approximately 160 nucleotides not shown in sequence; 5′cap, Cap1) or G-CSF mmRNA (mRNA sequence shown in SEQ ID NO: 33897; polyA tail of approximately 160 nucleotides not shown in sequence; 5′cap, Cap1) administered in formulation buffer. The dosing vehicle (F. buffer) was used as a control. The EPO and G-CSF modified mRNA were modified with 5-methylcytosine at each cytosine and pseudouridine replacement at each uridine site.

[1301] Animals (n=5), Sprague-Dawley rats, were injected IM (intramuscular) for the single unit dose of 100 ug (delivered to one thigh). For multi-dosing 6 doses of 100 ug (delivered to two thighs) were used for both EPO and G-CSF mmRNA. Control dosing involved use of buffer at a single dose. Human EPO blood levels were evaluated 13 hrs post injection.

[1302] Human EPO protein was measured in rat serum 13 hrs post intramuscular injection. Five groups of rats were treated and evaluated. The results are shown in Table 74.

TABLE 74
Multi-dose study

| | | | | Avg. Pg/mL |
|---|---|---|---|---|
| | | Dose of | Total | human EPO, |
| Group | Treatment | mmRNA | Dose | serum |
| 1 | Human EPO | 1 × 100 ug | 100 ug | 143 |
| | mmRNA | | | |
| 2 | Human EPO | 6 × 100 ug | 600 ug | 256 |
| | mmRNA | | | |
| 3 | G-CSF mmRNA | 1 × 100 ug | 100 ug | 43 |
| 4 | G-CSF mmRNA | 6 × 100 ug | 600 ug | 58 |
| 5 | Buffer Alone | — | — | 20 |

### Example 55. Signal Sequence Exchange Study

[1303] Several variants of mmRNAs encoding human Granulocyte colony stimulating factor (G-CSF) (mRNA sequence shown in SEQ ID NO: 33897; polyA tail of approximately 160 nucleotides not shown in sequence; 5′cap, Cap1) were synthesized using modified nucleotides pseudouridine and 5-methylcytosine (pseudo-U/5mC). These variants included the G-CSF constructs encoding either the wild-type N terminal secretory signal peptide sequence (MAGPATQSPMKLMALQLLLWHSALWTVQEA; SEQ ID NO: 95), no secretory signal peptide sequence, or secretory signal peptide sequences taken from other mRNAs. These included sequences where the wild type G-CSF signal peptide sequence was replaced with the signal peptide sequence of either:

human α-1-anti trypsin (AAT)
(MMPSSVSWGILLLAGLCCLVPVSLA; SEQ ID NO: 94),
human Factor IX (FIX)
(MQRVNMIMAESPSLITICLLGYLLSAECTVFLDHENANKILNRPKR;
SEQ ID NO: 96),
human Prolactin (Prolac)
(MKGSLLLLLVSNLLLCQSVAP; SEQ ID NO: 97),
or
human Albumin (Alb)
(MKWVTFISLLFLFSSAYSRGVFRR; SEQ ID NO: 98).

[1304] 250 ng of modified mRNA encoding each G-CSF variant was transfected into HEK293A (293A in the table), mouse myoblast (MM in the table) (C2C12, CRL-1772, ATCC) and rat myoblast (RM in the table) (L6 line, CRL-1458, ATCC) cell lines in a 24 well plate using 1 ul of Lipofectamine 2000 (Life Technologies), each well containing 300,000 cells. The supernatants were harvested after 24 hrs and the secreted G-CSF protein was analyzed by ELISA using the Human G-CSF ELISA kit (Life Technologies). The data shown in Table 75 reveal that cells transfected with G-CSF mmRNA encoding the Albumin signal peptide secrete at least 12 fold more G-CSF protein than its wild type counterpart.

TABLE 75
Signal Peptide Exchange

| | 293A | MM | RM |
|---|---|---|---|
| Signal peptides | (pg/ml) | (pg/ml) | (pg/ml) |
| G-CSF Natural | 9650 | 3450 | 6050 |
| α-1-anti trypsin | 9950 | 5000 | 8475 |
| Factor IX | 11675 | 6175 | 11675 |
| Prolactin | 7875 | 1525 | 9800 |
| Albumin | 122050 | 81050 | 173300 |
| No Signal peptide | 0 | 0 | 0 |

### Example 56. Cytokine Study: PBMC

### A. PBMC Isolation and Culture

[1305] 50 mL of human blood from two donors was received from Research Blood Components (lots KP30928 and KP30931) in sodium heparin tubes. For each donor, the blood was pooled and diluted to 70 mL with DPBS (SAFC Bioscience 59331C, lot 071M8408) and split evenly between two 50 mL conical tubes. 10 mL of Ficoll Paque (GE Healthcare 17-5442-03, lot 10074400) was gently dispensed below the blood layer. The tubes were centrifuged at 2000 rpm for 30 minutes with low acceleration and braking. The tubes were removed and the buffy coat PBMC layers were gently transferred to a fresh 50 mL conical and washed with DPBS. The tubes were centrifuged at 1450 rpm for 10 minutes.

[1306] The supernatant was aspirated and the PBMC pellets were resuspended and washed in 50 mL of DPBS. The tubes were centrifuged at 1250 rpm for 10 minutes. This wash step was repeated, and the PBMC pellets were resuspended in 19 mL of Optimem I (Gibco 11058, lot 1072088) and counted. The cell suspensions were adjusted to a concentration of 3.0×10\hat{ }6 cells/mL live cells.

[1307] These cells were then plated on five 96 well tissue culture treated round bottom plates (Costar 3799) per donor at 50 uL per well. Within 30 minutes, transfection mixtures were added to each well at a volume of 50 uL per well. After 4 hours post transfection, the media was supplemented with 10 μL of Fetal Bovine Serum (Gibco 10082, lot 1012368)

### B. Transfection Preparation

[1308] mmRNA encoding human G-CSF (mRNA sequence shown in SEQ ID NO: 33897; polyA tail of approximately 160 nucleotides not shown in sequence; 5′cap, Cap1) (containing either (1) natural NTPs, (2) 100% substitution with 5-methyl cytidine and pseudouridine, or (3) 100% substitution with 5-methyl cytidine and N1-methyl pseudouridine; mmRNA encoding luciferase (IVT cDNA sequence shown in SEQ ID NO: 33906; mRNA sequence shown in SEQ ID NO: 33907, polyA tail of approximately 160 nucleotides not shown in sequence, 5′cap, Cap1, fully modified with 5-methylcytosine at each cytosine and pseudouridine replacement at each uridine site) (containing either (1) natural NTPs or (2) 100% substitution with 5-methyl cytidine and pseudouridine) and TLR agonist R848 (Invivogen tlrl-r848) were diluted to 38.4 ng/uL in a final volume of 2500 uL Optimem I.

[1309] Separately, 432 μL of Lipofectamine 2000 (Invitrogen 11668-027, lot 1070962) was diluted with 13.1 mL Optimem I. In a 96 well plate nine aliquots of 135 μL of each mmRNA, positive control (R-848) or negative control (Optimem I) was added to 135 μL of the diluted Lipofectamine 2000. The plate containing the material to be transfected was incubated for 20 minutes. The transfection mixtures were then transferred to each of the human PBMC plates at 50 uL per well. The plates were then incubated at 37 C. At 2, 4, 8, 20, and 44 hours each plate was removed from the incubator, and the supernatants were frozen.

[1310] After the last plate was removed, the supernatants were assayed using a human G-CSF ELISA kit (Invitrogen KHC2032) and human IFN-alpha ELISA kit (Thermo Scientific 41105-2). Each condition was done in duplicate.

### C. Results

[1311] The ability of unmodified and modified mRNA (mmRNAs) to produce the encoded protein was assessed (G-CSF production) over time as was the ability of the mRNA to trigger innate immune recognition as measured by interferon-alpha production. Use of in vitro PBMC cultures is an accepted way to measure the immunostimulatory potential of oligonucleotides (Robbins et al., Oligonucleotides 2009 19:89-102; herein incorporated by reference in its entirety).

[1312] Results were interpolated against the standard curve of each ELISA plate using a four parameter logistic curve fit. Shown in Tables 76 and 77 are the average from 2 separate PBMC donors of the G-CSF and IFN-alpha production over time as measured by specific ELISA.

[1313] In the G-CSF ELISA, background signal from the Lipofectamine 2000 untreated condition was subtracted at each timepoint. The data demonstrated specific production of human G-CSF protein by human peripheral blood mononuclear is seen with G-CSF mRNA containing natural NTPs, 100% substitution with 5-methyl cytidine and pseudouridine, or 100% substitution with 5-methyl cytidine and N1-methyl-pseudouridine. Production of G-CSF was significantly increased through the use of modified mRNA relative to unmodified mRNA, with the 5-methyl cytidine and N1-methyl-pseudouridine containing G-CSF mmRNA showing the highest level of G-CSF production. With regards to innate immune recognition, unmodified mRNA resulted in substantial IFN-alpha production, while the modified mRNA largely prevented interferon-alpha production. G-CSF mRNA fully modified with 5-methyl cytidine and N1-methyl-pseudouridine did not significantly increase cytokines whereas G-CSF mRNA fully modified with 5-methyl cytidine and pseudouridine induced IFN-alpha, TNF-alpha and IP10. Many other cytokines were not affected by either modification.

TABLE 76
G-CSF Signal
G-CSF signal - 2 Donor Average

| pg/mL | 2 Hr | 4 Hr | 8 Hr | 20 Hr | 44 Hr |
|---|---|---|---|---|---|
| G-CSF (5 mC/pseudouridine) | 120.3 | 136.8 | 421.0 | 346.1 | 431.8 |
| G-CSF (5 mC/N1-methyl | 256.3 | 273.7 | 919.3 | 1603.3 | 1843.3 |
| pseudouridine) | | | | | |
| GCSF(Natural-no modification) | 63.5 | 92.6 | 129.6 | 258.3 | 242.4 |
| Luciferase (5 mC/pseudouridine) | 4.5 | 153.7 | 33.0 | 186.5 | 58.0 |

TABLE 77
IFN-alpha signal
IFN-alpha signal - 2 donor average

| pg/mL | 2 Hr | 4 Hr | 8 Hr | 20 Hr | 44 Hr |
|---|---|---|---|---|---|
| G-CSF (5 mC/pseudouridine) | 21.1 | 2.9 | 3.7 | 22.7 | 4.3 |
| G-CSF (5 mC/N1-methyl | 0.5 | 0.4 | 3.0 | 2.3 | 2.1 |
| pseudouridine) | | | | | |
| G-CSF(Natural) | 0.0 | 2.1 | 23.3 | 74.9 | 119.7 |
| Luciferase (5 mC/pseudouridine) | 0.4 | 0.4 | 4.7 | 1.0 | 2.4 |
| R-848 | 39.1 | 151.3 | 278.4 | 362.2 | 208.1 |
| Lpf. 2000 control | 0.8 | 17.2 | 16.5 | 0.7 | 3.1 |

### Example 57. Chemical Modification Ranges of Modified mRNA

[1314] Modified nucleotides such as, but not limited to, the chemical modifications 5-methylcytosine and pseudouridine have been shown to lower the innate immune response and increase expression of RNA in mammalian cells. Surprisingly, and not previously known, the effects manifested by the chemical modifications can be titrated when the amount of chemical modification is less than 100%. Previously, it was believed that full modification was necessary and sufficient to elicit the beneficial effects of the chemical modifications and that less than 100% modification of an mRNA had little effect. However, it has now been shown that the benefits of chemical modification can be derived using less than complete modification and that the effects are target, concentration and modification dependent.

### A. Modified RNA Transfected in PBMC

[1315] 960 ng of G-CSF mRNA modified with 5-methylcytosine (5mC) and pseudouridine (pseudoU) or unmodified G-CSF mRNA was transfected with 0.8 uL of Lipofectamine 2000 into peripheral blood mononuclear cells (PBMC) from three normal blood donors (D1, D2, D3). The G-CSF mRNA (mRNA sequence shown in SEQ ID NO: 33897; polyA tail of approximately 160 nucleotides not shown in sequence; 5′cap, Cap1) was completely modified with 5mC and pseudoU (100% modification), not modified with 5mC and pseudoU (0% modification) or was partially modified with 5mC and pseudoU so the mRNA would contain 50% modification, 25% modification, 10% modification, %5 modification, 1% modification or 0.1% modification. A control sample of Luciferase (mRNA sequence shown in SEQ ID NO: 33907; polyA tail of approximately 160 nucleotides not shown in sequence; 5′cap, Cap1; fully modified 5meC and pseudoU) was also analyzed for G-CSF expression. For TNF-alpha and IFN-alpha control samples of Lipofectamine2000, LPS, R-848, Luciferase (mRNA sequence shown in SEQ ID NO: 33907; polyA tail of approximately 160 nucleotides not shown in sequence; 5′cap, Cap1; fully modified 5mC and pseudo), and P(I)P(C) were also analyzed. The supernatant was harvested and run by ELISA 22 hours after transfection to determine the protein expression. The expression of G-CSF is shown in Table 78 and the expression of IFN-alpha and TNF-alpha is shown in Table 79. The expression of IFN-alpha and TNF-alpha may be a secondary effect from the transfection of the G-CSF mRNA. Tables 78 and 79 show that the amount of chemical modification of G-CSF, IFN-alpha and TNF-alpha is titratable when the mRNA is not fully modified and the titratable trend is not the same for each target.

TABLE 78
G-CSF Expression

| | G-CSF Expression | | |
|---|---|---|---|
| | (pg/ml) | | |
| | D1 | D2 | D3 |
| 100% modification | 270.3 | 151.6 | 162.2 |
| 50% modification | 45.6 | 19.8 | 26.3 |
| 25% modification | 23.6 | 10.8 | 8.9 |
| 10% modification | 39.4 | 12.9 | 12.9 |
| 5% modification | 70.9 | 26.8 | 26.3 |
| 1% modification | 70.3 | 26.9 | 66.9 |
| 0.1% modification | 67.5 | 25.2 | 28.7 |
| Luciferase | 14.5 | 3.1 | 10.0 |

TABLE 79
IFN-alpha and TNF-alpha Expression

| | IFN-alpha Expression | | | TNF-alpha Expression | | |
|---|---|---|---|---|---|---|
| | (pg/ml) | | | (pg/ml) | | |
| | D1 | D2 | D3 | D1 | D2 | D3 |
| 100% modification | 76.8 | 6.8 | 15.1 | 5.6 | 1.4 | 21.4 |
| 50% modification | 22.0 | 5.5 | 257.3 | 4.7 | 1.7 | 12.1 |
| 25% modification | 64.1 | 14.9 | 549.7 | 3.9 | 0.7 | 10.1 |
| 10% modification | 150.2 | 18.8 | 787.8 | 6.6 | 0.9 | 13.4 |
| 5% modification | 143.9 | 41.3 | 1009.6 | 2.5 | 1.8 | 12.0 |
| 1% modification | 189.1 | 40.5 | 375.2 | 9.1 | 1.2 | 25.7 |
| 0.1% modification | 261.2 | 37.8 | 392.8 | 9.0 | 2. | 13.7 |
| 0% modification | 230.3 | 45.1 | 558.3 | 10.9 | 1.4 | 10.9 |
| LF 200 | 0 | 0 | 1.5 | 45.8 | 2.8 | 53.6 |
| LPS | 0 | 0 | 1.0 | 114.5 | 70.0 | 227.0 |
| R-848 | 39.5 | 11.9 | 183.5 | 389.3 | 256.6 | 410.6 |
| Luciferase | 9.1 | 0 | 3.9 | 4.5 | 2.7 | 13.6 |
| P(I)P(C) | 1498.1 | 216.8 | 238.8 | 61.2 | 4.4 | 69.1 |

### B. Modified RNA Transfected in HEK293

[1316] Human embryonic kidney epithelial (HEK293) cells were seeded on 96-well plates at a density of 30,000 cells per well in 100 ul cell culture medium. 250 ng of modified G-CSF mRNA (mRNA sequence shown in SEQ ID NO: 33897; polyA tail of approximately 160 nucleotides not shown in sequence; 5′cap, Cap1) formulated with RNAiMAX™ (Invitrogen, Carlsbad, CA) was added to a well. The G-CSF was completely modified with 5mC and pseudoU (100% modification), not modified with 5mC and pseudoU (0% modification) or was partially modified with 5mC and pseudoU so the mRNA would contain 75% modification, 50% modification or 25% modification. Control samples (AK 5/2, mCherry (SEQ ID NO: 33898; polyA tail of approximately 160 nucleotides not shown in sequence; 5′cap, Cap1; fully modified 5mC and pseudoU) and untreated) were also analyzed. The half-life of G-CSF mRNA fully modified with 5-methylcytosine and pseudouridine is approximately 8-10 hours. The supernatants were harvested after 16 hours and the secreted G-CSF protein was analyzed by ELISA. Table 80 shows that the amount of chemical modification of G-CSF is titratable when the mRNA is not fully modified.

TABLE 80
G-CSF Expression

| | G-CSF |
|---|---|
| | Expression |
| | (ng/ml) |
| 100% modification | 118.4 |
| 75% modification | 101.9 |
| 50% modification | 105.7 |
| 25% modification | 231.1 |
| 0% modification | 270.9 |
| AK 5/2 | 166.8 |
| mCherry | 0 |
| Untreated | 0 |

### Example 58: In Vivo Delivery of Modified mRNA (mmRNA)

[1317] Modified RNA was delivered to C57/BL6 mice intramuscularly, subcutaneously, or intravenously to evaluate the bio-distribution of modified RNA using luciferase. A formulation buffer used with all delivery methods contained 150 mM sodium chloride, 2 mM calcium chloride, 2 mM Na+-phosphate which included 1.4 mM monobasic sodium phosphate and 0.6 mM of dibasic sodium phosphate, and 0.5 mM ethylenediaminetetraacetic acid (EDTA) was adjusted using sodium hydroxide to reach a final pH of 6.5 before being filtered and sterilized. A 1× concentration was used as the delivery buffer. To create the lipoplexed solution delivered to the mice, in one vial 50 μg of RNA was equilibrated for 10 minutes at room temperature in the delivery buffer and in a second vial 10 μl RNAiMAX™ was equilibrated for 10 minutes at room temperature in the delivery buffer. After equilibrium, the vials were combined and delivery buffer was added to reach a final volume of 100 μl which was then incubated for 20 minutes at room temperature. Luciferin was administered by intraperitoneal injection (IP) at 150 mg/kg to each mouse prior to imaging during the plateau phase of the luciferin exposure curve which was between 15 and 30 minutes. To create luciferin, 1 g of D-luciferin potassium or sodium salt was dissolved in 66.6 ml of distilled phosphate buffer solution (DPBS), not containing Mg2+ or Ca2+, to make a 15 mg/ml solution. The solution was gently mixed and passed through a 0.2 μm syringe filter, before being purged with nitrogen, aliquoted and frozen at −80° C. while being protected from light as much as possible. The solution was thawed using a waterbath if luciferin was not dissolved, gently mixed and kept on ice on the day of dosing.

[1318] Whole body images were taken of each mouse 2, 8 and 24 hours after dosing. Tissue images and serum was collected from each mouse 24 hours after dosing. Mice administered doses intravenously had their liver, spleen, kidneys, lungs, heart, peri-renal adipose tissue and thymus imaged. Mice administered doses intramuscularly or subcutaneously had their liver, spleen, kidneys, lungs, peri-renal adipose tissue, and muscle at the injection site. From the whole body images the bioluminescence was measured in photon per second for each route of administration and dosing regimen.

### A. Intramuscular Administration

[1319] Mice were intramuscularly (I.M.) administered either modified luciferase mRNA fully modified with 5-methylcytosine and pseudouridine (Naked-Luc), lipoplexed modified luciferase mRNA fully modified with 5-methylcytosine and pseudouridine (Lipoplex-luc) (IVT cDNA sequence shown in SEQ ID NO: 33906; mRNA sequence shown in SEQ ID NO: 33907, polyA tail of approximately 160 nucleotides not shown in sequence, 5′cap, Cap1, fully modified with 5-methylcytosine at each cytosine and pseudouridine replacement at each uridine site), lipoplexed modified granulocyte colony-stimulating factor (G-CSF) mRNA (mRNA sequence shown in SEQ ID NO: 33897; polyA tail of approximately 160 nucleotides not shown in sequence; 5′cap, Cap1; fully modified with 5-methylcytosine and pseudouridine) (Lipoplex-Cytokine) or the formation buffer at a single dose of 50 μg of modified RNA in an injection volume of 50p for each formulation in the right hind limb and a single dose of 5 μg of modified RNA in an injection volume of 50 μl in the left hind limb. The bioluminescence average for the luciferase expression signals for each group at 2, 8 and 24 hours after dosing are shown Table 81. The bioluminescence showed a positive signal at the injection site of the 5 μg and 50 pg modified RNA formulations containing and not containing lipoplex.

TABLE 81
In vivo Biophotoic Imaging (I.M. Injection Route)

| | Dose | Bioluminescence (photon/sec) | | |
|---|---|---|---|---|
| Formulation | (ug) | 2 hours | 8 hours | 24 hours |
| Naked-Luc | 5 | 224,000 | 683,000 | 927,000 |
| Lipolplex-Luc | 5 | 579,000 | 639,000 | 186,000 |
| Lipoplex-G-CSF | 5 | 64,600 | 85,600 | 75,100 |
| Formulation Buffer | 5 | 102,000 | 86,000 | 90,700 |
| Naked-Luc | 50 | 446,000 | 766,000 | 509,000 |
| Lipolplex-Luc | 50 | 374,000 | 501,000 | 332,000 |
| Lipoplex-G-CSF | 50 | 49,400 | 74,800 | 74,200 |
| Formulation Buffer | 50 | 59,300 | 69,200 | 63,600 |

### B. Subcutaneous Administration

[1320] Mice were subcutaneously (S.C.) administered either modified luciferase mRNA (Naked-Luc), lipoplexed modified luciferase mRNA (Lipoplex-luc), lipoplexed modified G-CSF mRNA (Lipoplex-G-CSF) or the formation buffer at a single dose of 50 μg of modified mRNA in an injection volume of 100 μl for each formulation. The bioluminescence average for the luciferase expression signals for each group at 2, 8 and 24 hours after dosing are shown in Table 82. The bioluminescence showed a positive signal at the injection site of the 50 pg modified mRNA formulations containing and not containing lipoplex.

TABLE 82
In vivo Biophotoic Imaging (S.C. Injection Route)

| | Bioluminescence (photon/sec) | | |
|---|---|---|---|
| Formulation | 2 hours | 8 hours | 24 hours |
| Naked-Luc | 3,700,000 | 8,060,000 | 2,080,000 |
| Lipolplex-Luc | 3,960,000 | 1,700,000 | 1,290,000 |
| Lipoplex-G-CSF | 123,000 | 121,000 | 117,000 |
| Formulation Buffer | 116,000 | 127,000 | 123,000 |

### C. Intravenous Administration

[1321] Mice were intravenously (I.V.) administered either modified luciferase mRNA (Naked-Luc), lipoplexed modified luciferase mRNA (Lipoplex-luc), lipoplexed modified G-CSF mRNA (Lipoplex-G-CSF) or the formation buffer at a single dose of 50 μg of modified mRNA in an injection volume of 100 μl for each formulation. The bioluminescence average for the luciferase expression signal in the spleen from each group at 2 hours after dosing is shown in Table 83. The bioluminescence showed a positive signal in the spleen of the 50 pg modified mRNA formulations containing lipoplex.

TABLE 83
In vivo Biophotoic Imaging (I.V. Injection Route)

| | Bioluminescence |
|---|---|
| | (photon/sec) |
| Formulation | of the Spleen |
| Naked-Luc | 58,400 |
| Lipolplex-Luc | 65,000 |
| Lipoplex-G-CSF | 57,100 |
| Formulation Buffer | 58,300 |

### Example 59. Buffer Formulation Studies

[1322] G-CSF modified mRNA (mRNA sequence shown in SEQ ID NO: 33897; polyA tail of approximately 160 nucleotides not shown in sequence; 5′cap, Cap1; fully modified with N1-pseudouridine and 5-methylcytosine) or Factor IX modified mRNA (mRNA sequence shown in SEQ ID NO: 33901; polyA tail of approximately 160 nucleotides not shown in sequence; 5′cap, Cap1; fully modified with N1-pseudouridine and 5-methylcytosine) in a buffer solution is administered intramuscularly to rats in an injection volume of 50 μl (n=5) at a modified mRNA dose of 200 μg per rat as described in Table 84. The modified mRNA is lyophilized in water for 1-2 days. It is then reconstituted in the buffers listed below to a target concentration of 6 mg/ml. Concentration is determined by OD 260. Samples are diluted to 4 mg/ml in the appropriate buffer before dosing.

[1323] To precipitate the modified mRNA, 3M sodium acetate, pH 5.5 and pure ethanol are added at 1/10^{th} the total volume and 4 times the total volume of modified mRNA, respectively. The material is placed at −80 C for a minimum of 1 hour. The material is then centrifuged for 30 minutes at 4000 rpm, 4 C. The supernatant is removed and the pellet is centrifuged and washed 3× with 75% ethanol. Finally, the pellet is reconstituted with buffer to a target concentration of 6 mg/ml. Concentration is determined by OD 260. Samples are diluted to 4 mg/ml in the appropriate buffer before dosing. All samples are prepared by lyophilization unless noted below.

TABLE 84
Buffer Dosing Groups

| Group | Treatment | Buffer | Dose (ug/rat) |
|---|---|---|---|
| 1 | G-CSF | 0.9% Saline | 200 |
| | Factor IX | 0.9% Saline | 200 |
| 2 | G-CSF | 0.9% Saline + 2 mM Calcium | 200 |
| | Factor IX | 0.9% Saline + 2 mM Calcium | 200 |
| 3 | G-CSF | Lactated Ringer's | 200 |
| | Factor IX | Lactated Ringer's | 200 |
| 4 | G-CSF | 5% Sucrose | 200 |
| | Factor IX | 5% Sucrose | 200 |
| 5 | G-CSF | 5% Sucrose + 2 mM Calcium | 200 |
| | Factor IX | 5% Sucrose + 2 mM Calcium | 200 |
| 6 | G-CSF | 5% Mannitol | 200 |
| | Factor IX | 5% Mannitol | 200 |
| 7 | G-CSF | 5% Mannitol + 2 mM Calcium | 200 |
| | Factor IX | 5% Mannitol + 2 mM Calcium | 200 |
| 8 | G-CSF | 0.9% saline (precipitation) | 200 |
| | Factor IX | 0.9% saline (precipitation) | 200 |

[1324] Serum samples are collected from the rats at various time intervals and analyzed for G-CSF or Factor IX protein expression using G-CSF or Factor IX ELISA.

### Example 60. Multi-Dose Study

[1325] Sprague-Dawley rats (n=8) are injected intravenously eight times (twice a week) over 28 days. The rats are injected with 0.5 mg/kg, 0.05 mg/kg, 0.005 mg/kg or 0.0005 mg/kg of human G-CSF modified mRNA of luciferase modified mRNA formulated in a lipid nanoparticle, 0.5 mg/kg of human G-CSF modified mRNA in saline, 0.2 mg/kg of the human G-CSF protein Neupogen or non-translatable human G-CSF modified mRNA formulated in a lipid nanoparticle. Serum is collected during pre-determined time intervals to evaluate G-CSF protein expression (8, 24 and 72 hours after the first dose of the week), complete blood count and white blood count (24 and 72 hours after the first dose of the week) and clinical chemistry (24 and 72 hours after the first dose of the week). The rats are sacrificed at day 29, 4 days after the final dosing, to determine the complete blood count, white blood count, clinical chemistry, protein expression and to evaluate the effect on the major organs by histopathology and necropsy. Further, an antibody assay is performed on the rats on day 29.

### Example 61. LNP In Vivo Study

[1326] Luciferase modified mRNA (mRNA sequence shown in SEQ ID NO: 33907; polyA tail of approximately 160 nucleotides not shown in sequence, 5′ cap, Cap1; fully modified with 5-methylcytosine and pseudouridine was formulated as a lipid nanoparticle (LNP) using the syringe pump method. The LNP was formulated at a 20:1 weight ratio of total lipid to modified mRNA with a final lipid molar ratio of 50:10:38.5:1.5 (DLin-KC2-DMA: DSPC: Cholesterol: PEG-DMG). As shown in Table 85, the luciferase LNP formulation was characterized by particle size, zeta potential, and encapsulation.

TABLE 85
Luciferase Formulation

| | |
|---|---|
| Formulation | NPA-098-1 |
| Modified mRNA | Luciferase |
| Mean size | 135 nm |
| | PDI: 0.08 |
| Zeta at pH 7.4 | −0.6 mV |
| Encaps. | 91% |
| (RiboGr) | |

[1327] As outlined in Table 86, the luciferase LNP formulation was administered to Balb-C mice (n=3) intramuscularly, intravenously and subcutaneously and a luciferase modified RNA formulated in PBS was administered to mice intravenously.

TABLE 86
Luciferase Formulations

| | | | | | Amount | |
|---|---|---|---|---|---|---|
| | | | | In- | of | |
| | | | Concen- | jection | modified | |
| | | | tration | Volume | RNA | Dose |
| Formulation | Vehicle | Route | (mg/ml) | (ul) | (ug) | (mg/kg) |
| Luc-LNP | PBS | IV | 0.20 | 50 | 10 | 0.50 |
| Luc-LNP | PBS | IM | 0.20 | 50 | 10 | 0.50 |
| Luc-LNP | PBS | SC | 0.20 | 50 | 10 | 0.50 |
| Luc-PBS | PBS | IV | 0.20 | 50 | 10 | 0.50 |

[1328] The mice administered the luciferase LNP formulation intravenously and intramuscularly were imaged at 2, 8, 24, 48, 120 and 192 hours and the mice administered the luciferase LNP formulation subcutaneously were imaged at 2, 8, 24, 48 and 120 hours to determine the luciferase expression as shown in Table 87. In Table 87, “NT” means not tested. Twenty minutes prior to imaging, mice were injected intraperitoneally with a D-luciferin solution at 150 mg/kg. Animals were then anesthetized and images were acquired with an IVIS Lumina II imaging system (Perkin Elmer). Bioluminescence was measured as total flux (photons/second) of the entire mouse.

TABLE 87
Luciferase Expression

| | Route of | Averge Expression (photon/second) | | | | | |
|---|---|---|---|---|---|---|---|
| Form. | Administration | 2 hours | 8 hours | 24 hours | 48 hours | 120 hours | 192 hours |
| Luc- | IV | 1.62E+08 | 3.00E+09 | 7.77E+08 | 4.98E+08 | 1.89E+08 | 6.08E+07 |
| LNP | | | | | | | |
| Luc- | IM | 4.85E+07 | 4.92E+08 | 9.02E+07 | 3.17E+07 | 1.22E+07 | 2.38E+06 |
| LNP | | | | | | | |
| Luc- | SC | 1.85E+07 | 9.79E+08 | 3.09E+08 | 4.94E+07 | 1.98E+06 | NT |
| LNP | | | | | | | |
| Luc- | IV | 3.61E+05 | 5.64E+05 | 3.19E+05 | NT | NT | NT |
| PBS | | | | | | | |

[1329] One mouse administered the LNP formulation intravenously was sacrificed at 8 hours to determine the luciferase expression in the liver and spleen. Also, one mouse administered the LNP formulation intramuscular was sacrificed at 8 hours to determine the luciferase expression of the muscle around the injection site and in the liver and spleen. As shown in Table 88, expression was seen in the both the liver and spleen after intravenous and intramuscular administration and in the muscle around the intramuscular injection site.

TABLE 88
Luciferase Expression in Tissue

| | Expression |
|---|---|
| | (photon/second) |
| Luciferase LNP: IV | |
| Administration | |
| Liver | 7.984E+08 |
| Spleen | 3.951E+08 |
| Luciferase LNP: IM | |
| Administration | |
| Muscle around the | 3.688E+07 |
| injection site | |
| Liver | 1.507E+08 |
| Spleen | 1.096E+07 |

### Example 62. Cytokine Study: PBMC

### A. PBMC Isolation and Culture

[1330] 50 mL of human blood from two donors was received from Research Blood Components (lots KP30928 and KP30931) in sodium heparin tubes. For each donor, the blood was pooled and diluted to 70 mL with DPBS (SAFC Bioscience 59331C, lot 071M8408) and split evenly between two 50 mL conical tubes. 10 mL of Ficoll Paque (GE Healthcare 17-5442-03, lot 10074400) was gently dispensed below the blood layer. The tubes were centrifuged at 2000 rpm for 30 minutes with low acceleration and braking. The tubes were removed and the buffy coat PBMC layers were gently transferred to a fresh 50 mL conical and washed with DPBS. The tubes were centrifuged at 1450 rpm for 10 minutes.

[1331] The supernatant was aspirated and the PBMC pellets were resuspended and washed in 50 mL of DPBS. The tubes were centrifuged at 1250 rpm for 10 minutes. This wash step was repeated, and the PBMC pellets were resuspended in 19 mL of Optimem I (Gibco 11058, lot 1072088) and counted. The cell suspensions were adjusted to a concentration of 3.0×10\hat{ }6 cells/mL live cells.

[1332] These cells were then plated on five 96 well tissue culture treated round bottom plates (Costar 3799) per donor at 50 uL per well. Within 30 minutes, transfection mixtures were added to each well at a volume of 50 uL per well. After 4 hours post transfection, the media was supplemented with 10 μL of Fetal Bovine Serum (Gibco 10082, lot 1012368).

### B. Transfection Preparation

[1333] Modified mRNA encoding human G-CSF (mRNA sequence shown in SEQ ID NO. 33897; polyA tail of approximately 160 nucleotides not shown in sequence; 5′cap, Cap1) (containing either (1) natural NTPs, (2) 100% substitution with 5-methyl cytidine and pseudouridine, or (3) 100% substitution with 5-methyl cytidine and N1-methyl pseudouridine; mRNA encoding luciferase (IVT cDNA sequence shown in SEQ ID NO: 33906; mRNA sequence shown in SEQ ID NO: 33907, polyA tail of approximately 160 nucleotides not shown in sequence, 5′cap, Cap1, fully modified with 5-methylcytosine at each cytosine and pseudouridine replacement at each uridine site) (containing either (1) natural NTPs or (2) 100% substitution with 5-methyl cytidine and pseudouridine) and TLR agonist R848 (Invivogen tlrl-r848) were diluted to 38.4 ng/uL in a final volume of 2500 uL Optimem I.

[1334] Separately, 110 μL of Lipofectamine 2000 (Invitrogen 11668-027, lot 1070962) was diluted with 6.76 mL Optimem I. In a 96 well plate nine aliquots of 135 μL of each mRNA, positive control (R-848) or negative control (Optimem I) was added to 135 μL of the diluted Lipofectamine 2000. The plate containing the material to be transfected was incubated for 20 minutes. The transfection mixtures were then transferred to each of the human PBMC plates at 50 uL per well. The plates were then incubated at 37° C. At 2, 4, 8, 20, and 44 hours each plate was removed from the incubator, and the supernatants were frozen.

[1335] After the last plate was removed, the supernatants were assayed using a human G-CSF ELISA kit (Invitrogen KHC2032) and human IFN-alpha ELISA kit (Thermo Scientific 41105-2). Each condition was done in duplicate.

### C. Protein and Innate Immune Response Analysis

[1336] The ability of unmodified and modified mRNA to produce the encoded protein was assessed (G-CSF production) over time as was the ability of the mRNA to trigger innate immune recognition as measured by interferon-alpha production. Use of in vitro PBMC cultures is an accepted way to measure the immunostimulatory potential of oligonucleotides (Robbins et al., Oligonucleotides 2009 19:89-102).

[1337] Results were interpolated against the standard curve of each ELISA plate using a four parameter logistic curve fit. Shown in Tables 89 and 90 are the average from 3 separate PBMC donors of the G-CSF, interferon-alpha (IFN-alpha) and tumor necrosis factor alpha (TNF-alpha) production over time as measured by specific ELISA.

[1338] In the G-CSF ELISA, background signal from the Lipofectamine 2000 (LF2000) untreated condition was subtracted at each time point. The data demonstrated specific production of human G-CSF protein by human peripheral blood mononuclear is seen with G-CSF mRNA containing natural NTPs, 100% substitution with 5-methyl cytidine and pseudouridine, or 100% substitution with 5-methyl cytidine and N1-methyl pseudouridine. Production of G-CSF was significantly increased through the use of 5-methyl cytidine and N1-methyl pseudouridine modified mRNA relative to 5-methyl cytidine and pseudouridine modified mRNA.

[1339] With regards to innate immune recognition, while both modified mRNA chemistries largely prevented IFN-alpha and TNF-alpha production relative to positive controls (R848, p(I)p(C)), significant differences did exist between the chemistries. 5-methyl cytidine and pseudouridine modified mRNA resulted in low but detectable levels of IFN-alpha and TNF-alpha production, while 5-methyl cytidine and N1-methyl pseudouridine modified mRNA resulted in no detectable IFN-alpha and TNF-alpha production.

[1340] Consequently, it has been determined that, in addition to the need to review more than one cytokine marker of the activation of the innate immune response, it has surprisingly been found that combinations of modifications provide differing levels of cellular response (protein production and immune activation). The modification, N1-methyl pseudouridine, in this study has been shown to convey added protection over the standard combination of 5-methylcytidine/pseudouridine explored by others resulting in twice as much protein and almost 150 fold reduction in immune activation (TNF-alpha).

[1341] Given that PBMC contain a large array of innate immune RNA recognition sensors and are also capable of protein translation, it offers a useful system to test the interdependency of these two pathways. It is known that mRNA translation can be negatively affected by activation of such innate immune pathways (Kariko et al. Immunity (2005) 23:165-175; Warren et al. Cell Stem Cell (2010) 7:618-630; each of which is herein incorporated by reference in its entirety). Using PBMC as an in vitro assay system it is possible to establish a correlation between translation (in this case G-CSF protein production) and cytokine production (in this case exemplified by IFN-alpha and TNF-alpha protein production). Better protein production is correlated with lower induction of innate immune activation pathway, and new chemistries can be judged favorably based on this ratio (Table 91).

[1342] In this study, the PC Ratio for the two chemical modifications, pseudouridine and N1-methyl pseudouridine, both with 5-methy cytosine was 4742/141=34 as compared to 9944/1=9944 for the cytokine IFN-alpha. For the cytokine, TNF-alpha, the two chemistries had PC Ratios of 153 and 1243, respectively suggesting that for either cytokine, the N1-methylpseudouridine is the superior modification. In Tables 89 and 90, “NT” means not tested.

TABLE 89
G-CSF
G-CSF: 3 Donor Average (pg/ml)

| | |
|---|---|
| G-CSF | 4742 |
| 5-methyl cytosine/ | |
| pseudouridine | |
| G-CSF | 9944 |
| 5-methylcytosine/ | |
| N1-methylpseudouridine | |
| Luciferase | 18 |
| LF2000 | 16 |

TABLE 90
IFN-alpha and TNF-alpha

| | IFN-alpha: 3 | TNF-alpha: 3 |
|---|---|---|
| | Donor Aver- | Donor Aver- |
| | age (pg/ml) | age (pg/ml) |
| G-CSF | 141 | 31 |
| 5-methyl cytosine/ | | |
| pseudouridine | | |
| G-CSF | 1 | 8 |
| 5-methylcytosine/ | | |
| N1-methylpseudouridine | | |
| P(I)P(C) | 1104 | NT |
| R-848 | NT | 1477 |
| LF2000 | 17 | 25 |

TABLE 91
G-CSF to Cytokine Ratios

| | G-CSF/IFN-alpha (ratio) | | G-CSF/TNF-alpha (ratio) | |
|---|---|---|---|---|
| | 5-methyl | 5-methylcytosine/ | 5-methyl | 5-methylcytosine/ |
| | cytosine/ | N1-methyl- | cytosine/ | N1-methyl- |
| | pseudo- | pseudo- | pseudo- | pseudo- |
| | uridine | uridine | uridine | uridine |
| PC Ratio | 34 | 9944 | 153 | 1243 |

### Example 63. In Vitro PBMC Studies: Percent Modification

[1343] 480 ng of G-CSF mRNA modified with 5-methylcytosine (5mC) and pseudouridine (pseudoU) or unmodified G-CSF mRNA was transfected with 0.4 uL of Lipofectamine 2000 into peripheral blood mononuclear cells (PBMC) from three normal blood donors (D1, D2, and D3). The G-CSF mRNA (mRNA sequence shown in SEQ ID NO: 33897; polyA tail of approximately 160 nucleotides not shown in sequence; 5′cap, Cap1) was completely modified with 5mC and pseudoU (100% modification), not modified with 5mC and pseudoU (0% modification) or was partially modified with 5mC and pseudoU so the mRNA would contain 75% modification, 50% modification or 25% modification. A control sample of Luciferase (mRNA sequence shown in SEQ ID NO: 33907; polyA tail of approximately 160 nucleotides not shown in sequence; 5′cap, Cap1; fully modified 5meC and pseudoU) was also analyzed for G-CSF expression. For TNF-alpha and IFN-alpha control samples of Lipofectamine2000, LPS, R-848, Luciferase (mRNA sequence shown in SEQ ID NO: 33907; polyA tail of approximately 160 nucleotides not shown in sequence; 5′cap, Cap1; fully modified 5mC and pseudo), and P(I)P(C) were also analyzed. The supernatant was harvested and run by ELISA 22 hours after transfection to determine the protein expression. The expression of G-CSF is shown in Table 94 and the expression of IFN-alpha and TNF-alpha is shown in Table 95. The expression of IFN-alpha and TNF-alpha may be a secondary effect from the transfection of the G-CSF mRNA. Tables 94 and 95 show that the amount of chemical modification of G-CSF, interferon alpha (IFN-alpha) and tumor necrosis factor-alpha (TNF-alpha) is titratable when the mRNA is not fully modified and the titratable trend is not the same for each target.

[1344] By using PBMC as an in vitro assay system it is possible to establish a correlation between translation (in this case G-CSF protein production) and cytokine production (in this case exemplified by IFN-alpha protein production). Better protein production is correlated with lower induction of innate immune activation pathway, and the percentage modification of a chemistry can be judged favorably based on this ratio (Table 96). As calculated from Tables 94 and 95 and shown in Table 96, full modification with 5-methylcytidine and pseudouridine shows a much better ratio of protein/cytokine production than without any modification (natural G-CSF mRNA) (100-fold for IFN-alpha and 27-fold for TNF-alpha). Partial modification shows a linear relationship with increasingly less modification resulting in a lower protein/cytokine ratio.

TABLE 94
G-CSF Expression

| | G-CSF Expression (pg/ml) | | |
|---|---|---|---|
| | D1 | D2 | D3 |
| 100% modification | 1968.9 | 2595.6 | 2835.7 |
| 75% modification | 566.7 | 631.4 | 659.5 |
| 50% modification | 188.9 | 187.2 | 191.9 |
| 25% modification | 139.3 | 126.9 | 102.0 |
| 0% modification | 194.8 | 182.0 | 183.3 |
| Luciferase | 90.2 | 0.0 | 22.1 |

TABLE 95
IFN-alpha and TNF-alpha Expression

| | IFN-alpha Expression | | | TNF-alpha Expression | | |
|---|---|---|---|---|---|---|
| | (pg/ml) | | | (pg/ml) | | |
| | D1 | D2 | D3 | D1 | D2 | D3 |
| 100% | 336.5 | 78.0 | 46.4 | 115.0 | 15.0 | 11.1 |
| modification | | | | | | |
| 75% | 339.6 | 107.6 | 160.9 | 107.4 | 21.7 | 11.8 |
| modification | | | | | | |
| 50% | 478.9 | 261.1 | 389.7 | 49.6 | 24.1 | 10.4 |
| modification | | | | | | |
| 25% | 564.3 | 400.4 | 670.7 | 85.6 | 26.6 | 19.8 |
| modification | | | | | | |
| 0% | 1421.6 | 810.5 | 1260.5 | 154.6 | 96.8 | 45.9 |
| modification | | | | | | |
| LPS | 0.0 | 0.6 | 0.0 | 0.0 | 12.6 | 4.3 |
| R-848 | 0.5 | 3.0 | 14.1 | 655.2 | 989.9 | 420.4 |
| P(I)P(C) | 130.8 | 297.1 | 585.2 | 765.8 | 2362.7 | 1874.4 |
| Lipid only | 1952.2 | 866.6 | 855.8 | 248.5 | 82.0 | 60.7 |

TABLE 96
PC Ratio and Effect of Percentage of Modification

| | Average | Average | Average | G-CSF/IFN- | G-CSF/TNF- |
|---|---|---|---|---|---|
| | G-CSF | IFN-a | TNF-a | alpha | alpha |
| % Modification | (pg/ml) | (pg/ml) | (pg/ml) | (PC ratio) | (PC ratio) |
| 100 | 2466 | 153 | 47 | 16 | 52 |
| 75 | 619 | 202 | 47 | 3.1 | 13 |
| 50 | 189 | 376 | 28 | 0.5 | 6.8 |
| 25 | 122 | 545 | 44 | 0.2 | 2.8 |
| 0 | 186 | 1164 | 99 | 0.16 | 1.9 |

### Example 64. Modified RNA Transfected in PBMC

[1345] ng of G-CSF mRNA modified with 5-methylcytosine (5mC) and pseudouridine (pseudoU) or unmodified G-CSF mRNA was transfected with 0.4 uL of Lipofectamine 2000 into peripheral blood mononuclear cells (PBMC) from three normal blood donors (D1, D2, and D3). The G-CSF mRNA (mRNA sequence shown in SEQ ID NO: 33897; polyA tail of approximately 160 nucleotides not shown in sequence; 5′cap, Cap1) was completely modified with 5mC and pseudoU (100% modification), not modified with 5mC and pseudoU (0% modification) or was partially modified with 5mC and pseudoU so the mRNA would contain 50% modification, 25% modification, 10% modification, %5 modification, 1% modification or 0.1% modification. A control sample of mCherry (mRNA sequence shown in SEQ ID NO: 33898; polyA tail of approximately 160 nucleotides not shown in sequence; 5′cap, Cap1; fully modified 5meC and pseudouridine), G-CSF fully modified with 5-methylcytosine and pseudouridine (Control G-CSF) and an untreated control was also analyzed for expression of G-CSF, tumor necrosis factor-alpha (TNF-alpha) and interferon-alpha (IFN-alpha). The supernatant was harvested 6 hours and 18 hours after transfection and run by ELISA to determine the protein expression. The expression of G-CSF, IFN-alpha, and TNF-alpha for Donor 1 is shown in Table 97, Donor 2 is shown in Table 98 and Donor 3 is shown in Table 99.

[1346] Full 100% modification with 5-methylcytidine and pseudouridine resulted in the most protein translation (G-CSF) and the least amount of cytokine produced across all three human PBMC donors. Decreasing amounts of modification results in more cytokine production (IFN-alpha and TNF-alpha), thus further highlighting the importance of fully modification to reduce cytokines and to improve protein translation (as evidenced here by G-CSF production).

TABLE 9
Donor 1

| | | | | | TNF-alpha | |
|---|---|---|---|---|---|---|
| | G-CSF (pg/mL) | | IFN-alpha (pg/mL) | | (pg/mL) | |
| | 6 hours | 18 hours | 6 hours | 18 hours | 6 hours | 18 hours |
| 100% Mod | 1815 | 2224 | 1 | 13 | 0 | 0 |
| 75% Mod | 591 | 614 | 0 | 89 | 0 | 0 |
| 50% Mod | 172 | 147 | 0 | 193 | 0 | 0 |
| 25% Mod | 111 | 92 | 2 | 219 | 0 | 0 |
| 10% Mod | 138 | 138 | 7 | 536 | 18 | 0 |
| 1% Mod | 199 | 214 | 9 | 660 | 18 | 3 |
| 0.1% Mod | 222 | 208 | 10 | 597 | 0 | 6 |
| 0% Mod | 273 | 299 | 10 | 501 | 10 | 0 |
| Control | 957 | 1274 | 3 | 123 | 18633 | 1620 |
| G-CSF | | | | | | |
| mCherry | 0 | 0 | 0 | 10 | 0 | 0 |
| Untreated | N/A | N/A | 0 | 0 | 1 | 1 |

TABLE 98
Donor 2

| | G-CSF | | IFN-alpha | | TNF-alpha | |
|---|---|---|---|---|---|---|
| | (pg/mL) | | (pg/mL) | | (pg/mL) | |
| | 6 hours | 18 hours | 6 hours | 18 hours | 6 hours | 18 hours |
| 100% Mod | 2184 | 2432 | 0 | 7 | 0 | 11 |
| 75% Mod | 935 | 958 | 3 | 130 | 0 | 0 |
| 50% Mod | 192 | 253 | 2 | 625 | 7 | 23 |
| 25% Mod | 153 | 158 | 7 | 464 | 6 | 6 |
| 10% Mod | 203 | 223 | 25 | 700 | 22 | 39 |
| 1% Mod | 288 | 275 | 27 | 962 | 51 | 66 |
| 0.1% Mod | 318 | 288 | 33 | 635 | 28 | 5 |
| 0% Mod | 389 | 413 | 26 | 748 | 1 | 253 |
| Control | 1461 | 1634 | 1 | 59 | 481 | 814 |
| G-CSF | | | | | | |
| mCherry | 0 | 7 | 0 | 1 | 0 | 0 |
| Untreated | N/A | N/A | 1 | 0 | 0 | 0 |

TABLE 99
Donor 3

| | G-CSF | | IFN-alpha | | TNF-alpha | |
|---|---|---|---|---|---|---|
| | (pg/mL) | | (pg/mL) | | (pg/mL) | |
| | 6 hours | 18 hours | 6 hours | 18 hours | 6 hours | 18 hours |
| 100% Mod | 6086 | 7549 | 7 | 658 | 11 | 11 |
| 75% Mod | 2479 | 2378 | 23 | 752 | 4 | 35 |
| 50% Mod | 667 | 774 | 24 | 896 | 22 | 18 |
| 25% Mod | 480 | 541 | 57 | 1557 | 43 | 115 |
| 10% Mod | 838 | 956 | 159 | 2755 | 144 | 123 |
| 1% Mod | 1108 | 1197 | 235 | 3415 | 88 | 270 |
| 0.1% Mod | 1338 | 1177 | 191 | 2873 | 37 | 363 |
| 0% Mod | 1463 | 1666 | 215 | 3793 | 74 | 429 |
| Control | 3272 | 3603 | 16 | 1557 | 731 | 9066 |
| G-CSF | | | | | | |
| mCherry | 0 | 0 | 2 | 645 | 0 | 0 |
| Untreated | N/A | N/A | 1 | 1 | 0 | 8 |

### Example 65. Innate Immune Response Study in BJ Fibroblasts

### A. Single Transfection

[1347] Human primary foreskin fibroblasts (BJ fibroblasts) were obtained from American Type Culture Collection (ATCC) (catalog #CRL-2522) and grown in Eagle's Minimum Essential Medium (ATCC, catalog #30-2003) supplemented with 10% fetal bovine serum at 37° C., under 5% CO2. BJ fibroblasts were seeded on a 24-well plate at a density of 300,000 cells per well in 0.5 ml of culture medium. 250 ng of modified G-CSF mRNA (mRNA sequence shown in SEQ ID NO: 33897; polyA tail of approximately 140 nucleotides not shown in sequence; 5′cap, Cap 1) fully modified with 5-methylcytosine and pseudouridine (Gen1) or fully modified with 5-methylcytosine and N1-methylpseudouridine (Gen2) having Cap0, Cap1 or no cap was transfected using Lipofectamine 2000 (Invitrogen, catalog #11668-019), following manufacturer's protocol. Control samples of poly I:C (PIC), Lipofectamine 2000 (Lipo), natural luciferase mRNA (mRNA sequence shown in SEQ ID NO: 33907; polyA tail of approximately 160 nucleotides not shown in sequence; 5′cap, Cap1) and natural G-CSF mRNA were also transfected. The cells were harvested after 18 hours, the total RNA was isolated and DNASE® treated using the RNeasy micro kit (catalog #74004) following the manufacturer's protocol. 100 ng of total RNA was used for cDNA synthesis using High Capacity cDNA Reverse Transcription kit (catalog #4368814) following the manufacturer's protocol. The cDNA was then analyzed for the expression of innate immune response genes by quantitative real time PCR using SybrGreen in a Biorad CFX 384 instrument following manufacturer's protocol. Table 100 shows the expression level of innate immune response transcripts relative to house-keeping gene HPRT (hypoxanthine phosphoribosytransferase) and is expressed as fold-induction relative to HPRT. In the table, the panel of standard metrics includes: RIG-I is retinoic acid inducible gene 1, IL6 is interleukin-6, OAS-1 is oligoadenylate synthetase 1, IFNb is interferon-beta, AIM2 is absent in melanoma-2, IFIT-1 is interferon-induced protein with tetratricopeptide repeats 1, PKR is protein kinase R, TNFa is tumor necrosis factor alpha and IFNa is interferon alpha.

TABLE 100
Innate Immune Response Transcript Levels

| Form. | RIG-I | IL6 | OAS-1 | IFNb | AIM2 | IFIT-1 | PKR | TNFa | IFNa |
|---|---|---|---|---|---|---|---|---|---|
| Natural | 71.5 | 20.6 | 20.778 | 11.404 | 0.251 | 151.218 | 16.001 | 0.526 | 0.067 |
| Luciferase | | | | | | | | | |
| Natural | 73.3 | 47.1 | 19.359 | 13.615 | 0.264 | 142.011 | 11.667 | 1.185 | 0.153 |
| G-CSF | | | | | | | | | |
| PIC | 30.0 | 2.8 | 8.628 | 1.523 | 0.100 | 71.914 | 10.326 | 0.264 | 0.063 |
| G-CSF | 0.81 | 0.22 | 0.080 | 0.009 | 0.008 | 2.220 | 1.592 | 0.090 | 0.027 |
| Gen1-UC | | | | | | | | | |
| G-CSF | 0.54 | 0.26 | 0.042 | 0.005 | 0.008 | 1.314 | 1.568 | 0.088 | 0.038 |
| Gen1- | | | | | | | | | |
| Cap0 | | | | | | | | | |
| G-CSF | 0.58 | 0.30 | 0.035 | 0.007 | 0.006 | 1.510 | 1.371 | 0.090 | 0.040 |
| Gen1- | | | | | | | | | |
| Cap1 | | | | | | | | | |
| G-CSF | 0.21 | 0.20 | 0.002 | 0.007 | 0.007 | 0.603 | 0.969 | 0.129 | 0.005 |
| Gen2- | | | | | | | | | |
| UC | | | | | | | | | |
| G-CSF | 0.23 | 0.21 | 0.002 | 0.0014 | 0.007 | 0.648 | 1.547 | 0.121 | 0.035 |
| Gen2- | | | | | | | | | |
| Cap0 | | | | | | | | | |
| G-CSF | 0.27 | 0.26 | 0.011 | 0.004 | 0.005 | 0.678 | 1.557 | 0.099 | 0.037 |
| Gen2- | | | | | | | | | |
| Cap1 | | | | | | | | | |
| Lipo | 0.27 | 0.53 | 0.001 | 0 | 0.007 | 0.954 | 1.536 | 0.158 | 0.064 |

### B. Repeat Transfection

[1348] Human primary foreskin fibroblasts (BJ fibroblasts) were obtained from American Type Culture Collection (ATCC) (catalog #CRL-2522) and grown in Eagle's Minimum Essential Medium (ATCC, catalog #30-2003) supplemented with 10% fetal bovine serum at 37° C., under 5% CO₂. BJ fibroblasts were seeded on a 24-well plate at a density of 300,000 cells per well in 0.5 ml of culture medium. 250 ng of modified G-CSF mRNA (mRNA sequence shown in SEQ ID NO: 33897; polyA tail of approximately 140 nucleotides not shown in sequence; 5′cap, Cap1) unmodified, fully modified with 5-methylcytosine and pseudouridine (Gen1) or fully modified with 5-methylcytosine and N1-methylpseudouridine (Gen2) was transfected daily for 5 days following manufacturer's protocol. Control samples of Lipofectamine 2000 (L2000) and mCherry mRNA (mRNA sequence shown in SEQ ID NO: 33898; polyA tail of approximately 160 nucleotides not shown in sequence; 5′cap, Cap1; fully modified with 5-methylcytidine and pseudouridine) were also transfected daily for 5 days. The results are shown in Table 101.

[1349] Unmodified mRNA showed a cytokine response in interferon-beta (IFN-beta) and interleukin-6 (IL-6) after one day. mRNA modified with at least pseudouridine showed a cytokine response after 2-3 days whereas mRNA modified with 5-methylcytosine and N1-methylpseudouridine showed a reduced response after 3-5 days.

TABLE 101
Cytokine Response

| Formulation | Transfection | IFN-beta (pg/ml) | IL-6 (pg/ml) |
|---|---|---|---|
| G-CSF unmodified | 6 hours | 0 | 3596 |
| | Day 1 | 1363 | 15207 |
| | Day 2 | 238 | 12415 |
| | Day 3 | 225 | 5017 |
| | Day 4 | 363 | 4267 |
| | Day 5 | 225 | 3094 |
| G-CSF Gen 1 | 6 hours | 0 | 3396 |
| | Day 1 | 38 | 3870 |
| | Day 2 | 1125 | 16341 |
| | Day 3 | 100 | 25983 |
| | Day 4 | 75 | 18922 |
| | Day 5 | 213 | 15928 |
| G-CSF Gen 2 | 6 hours | 0 | 3337 |
| | Day 1 | 0 | 3733 |
| | Day 2 | 150 | 974 |
| | Day 3 | 213 | 4972 |
| | Day 4 | 1400 | 4122 |
| | Day 5 | 350 | 2906 |
| mCherry | 6 hours | 0 | 3278 |
| | Day 1 | 238 | 3893 |
| | Day 2 | 113 | 1833 |
| | Day 3 | 413 | 25539 |
| | Day 4 | 413 | 29233 |
| | Day 5 | 213 | 20178 |
| L2000 | 6 hours | 0 | 3270 |
| | Day 1 | 13 | 3933 |
| | Day 2 | 388 | 567 |
| | Day 3 | 338 | 1517 |
| | Day 4 | 475 | 1594 |
| | Day 5 | 263 | 1561 |

### Example 66. In Vivo Detection of Innate Immune Response

[1350] In an effort to distinguish the importance of different chemical modification of mRNA on in vivo protein production and cytokine response in vivo, female BALB/C mice (n=5) are injected intramuscularly with G-CSF mRNA (G-CSF mRNA unmod) (mRNA sequence shown in SEQ TD NO: 33897; polyA tail of approximately 160 nucleotides not shown in sequence;) with a 5′cap of Cap1, G-CSF mRNA fully modified with 5-methylcytosine and pseudouridine (G-CSF mRNA mc/pU), G-CSF mRNA fully modified with 5-methylcytosine and N1-methylpseudouridine with (G-CSF mRNA 5mc/N1pU) or without a 5′ cap (G-CSF mRNA 5mc/N1 pU no cap) or a control of either R848 or 5% sucrose as described in Table 102.

TABLE 102
Dosing Chart

| Formulation | Route | Dose (ug/mouse) | Dose (ul) |
|---|---|---|---|
| G-CSF mRNA | I.M. | 200 | 50 |
| unmod | | | |
| G-CSF mRNA | I.M. | 200 | 50 |
| 5mc/pU | | | |
| G-CSF mRNA | I.M. | 200 | 50 |
| 5mc/N1pU | | | |
| G-CSF mRNA | I.M. | 200 | 50 |
| 5mc/N1pU no cap | | | |
| R848 | I.M. | 75 | 50 |
| 5% sucrose | I.M. | — | 50 |
| Untreated | I.M. | — | — |

[1351] Blood is collected at 8 hours after dosing. Using ELISA the protein levels of G-CSF, TNF-alpha and IFN-alpha is determined by ELISA. 8 hours after dosing, muscle is collected from the injection site and quantitative real time polymerase chain reaction (QPCR) is used to determine the mRNA levels of RIG-I, PKR, AIM-2, IFIT-1, OAS-2, MDA-5, IFN-beta, TNF-alpha, TL-6, G-CSF, CD45 in the muscle.

### Example 67. In Vivo Detection of Innate Immune Response Study

[1352] Female BALB/C mice (n=5) were injected intramuscularly with G-CSF mRNA (G-CSF mRNA unmod) (mRNA sequence shown in SEQ ID NO: 33897; polyA tail of approximately 160 nucleotides not shown in sequence;) with a 5′cap of Cap1, G-CSF mRNA fully modified with 5-methylcytosine and pseudouridine (G-CSF mRNA 5mc/pU), G-CSF mRNA fully modified with 5-methylcytosine and N1-methylpseudouridine with (G-CSF mRNA 5mc/N1pU) or without a 5′ cap (G-CSF mRNA 5mc/N1 pU no cap) or a control of either R848 or 5% sucrose as described in Table 103. Blood is collected at 8 hours after dosing and using ELISA the protein levels of G-CSF and interferon-alpha (IFN-alpha) is determined by ELISA and are shown in Table 103.

[1353] As shown in Table 103, unmodified, 5mc/pU, and 5mc/N1pU modified G-CSF mRNA resulted in human G-CSF expression in mouse serum. The uncapped 5mC/N1pU modified G-CSF mRNA showed no human G-CSF expression in serum, highlighting the importance of having a 5′ cap structure for protein translation.

[1354] As expected, no human G-CSF protein was expressed in the R848, 5% sucrose only, and untreated groups. Importantly, significant differences were seen in cytokine production as measured by mouse IFN-alpha in the serum. As expected, unmodified G-CSF mRNA demonstrated a robust cytokine response in vivo (greater than the R848 positive control). The 5mc/pU modified G-CSF mRNA did show a low but detectable cytokine response in vivo, while the 5mc/N1pU modified mRNA showed no detectable IFN-alpha in the serum (and same as vehicle or untreated animals).

[1355] Also, the response of 5mc/N1pU modified mRNA was the same regardless of whether it was capped or not. These in vivo results reinforce the conclusion that 1) that unmodified mRNA produce a robust innate immune response, 2) that this is reduced, but not abolished, through 100% incorporation of 5mc/pU modification, and 3) that incorporation of 5mc/N1pU modifications results in no detectable cytokine response.

[1356] Lastly, given that these injections are in 5% sucrose (which has no effect by itself), these result should accurately reflect the immunostimulatory potential of these modifications.

[1357] From the data it is evident that N1pU modified molecules produce more protein while concomitantly having little or no effect on IFN-alpha expression. It is also evident that capping is required for protein production for this chemical modification. The Protein: Cytokine Ratio of 748 as compared to the PC Ratio for the unmodified mRNA (PC=9) means that this chemical modification is far superior as related to the effects or biological implications associated with IFN-alpha.

TABLE 103
Human G-CSF and Mouse IFN-alpha in serum

| | | Dose | | G-CSF | IFN-alpha | |
|---|---|---|---|---|---|---|
| | | (ug/ | Dose | protein | expression | PC |
| Formulation | Route | mouse) | (ul) | (pg/ml) | (pg/ml) | Ratio |
| G-CSF mRNA | I.M. | 200 | 50 | 605.6 | 67.01 | 9 |
| unmod | | | | | | |
| G-CSF mRNA | I.M. | 200 | 50 | 356.5 | 8.87 | 40 |
| 5mc/pU | | | | | | |
| G-CSF | I.M. | 200 | 50 | 748.1 | 0 | 748 |
| mRNA5mc/ | | | | | | |
| N1pU | | | | | | |
| G-CSF | I.M. | 200 | 50 | 6.5 | 0 | 6.5 |
| mRNA5mc/ | | | | | | |
| N1pU no cap | | | | | | |
| R848 | I.M. | 75 | 50 | 3.4 | 40.97 | .08 |
| 5% sucrose | I.M. | — | 50 | 0 | 1.49 | 0 |
| Untreated | I.M. | — | — | 0 | 0 | 0 |

### Example 68: In Vivo Delivery of Modified RNA

[1358] Protein production of modified mRNA was evaluated by delivering modified G-CSF mRNA or modified Factor IX mRNA to female Sprague Dawley rats (n=6). Rats were injected with 400 μg in 100 ul of G-CSF mRNA (mRNA sequence shown in SEQ ID NO: 33897; polyA tail of approximately 160 nucleotides not shown in sequence; 5′cap, Cap1) fully modified with 5-methylcytosine and pseudouridine (G-CSF Gen1), G-CSF mRNA fully modified with 5-methylcytosine and N1-methylpseudouridine (G-CSF Gen2) or Factor IX mRNA (mRNA sequence shown in SEQ ID NO: 33901; polyA tail of approximately 160 nucleotides not shown in sequence; 5′cap, Cap1) fully modified with 5-methylcytosine and pseudouridine (Factor IX Gen1) reconstituted from the lyophilized form in 5% sucrose. Blood was collected 8 hours after injection and the G-CSF protein level in serum was measured by ELISA. Table 104 shows the G-CSF protein levels in serum after 8 hours.

[1359] These results demonstrate that both G-CSF Gen 1 and G-CSF Gen 2 modified mRNA can produce human G-CSF protein in a rat following a single intramuscular injection, and that human G-CSF protein production is improved when using Gen 2 chemistry over Gen 1 chemistry.

TABLE 104
G-CSF Protein in Rat Serum (I.M. Injection Route)

| Formulation | G-CSF protein (pg/ml) |
|---|---|
| G-CSF Gen1 | 19.37 |
| G-CSF Gen2 | 64.72 |
| Factor IX Gen 1 | 2.25 |

### Example 69. Chemical Modification: In Vitro Studies

### A. In Vitro Screening in PBMC

[1360] 500 ng of G-CSF (mRNA sequence shown in SEQ ID NO: 33897; polyA tail of approximately 160 nucleotides not shown in sequence; 5′cap, Cap1) mRNA fully modified with the chemical modification outlined Tables 105 and 106 was transfected with 0.4 uL Lipofectamine 2000 into peripheral blood mononuclear cells (PBMC) from three normal blood donors. Control samples of LPS, R848, P(I)P(C) and mCherry (mRNA sequence shown in SEQ ID NO: 33898; polyA tail of approximately 160 nucleotides not shown in sequence, 5′cap, Cap1; fully modified with 5-methylcytosine and pseudouridine) were also analyzed. The supernatant was harvested and stored frozen until analyzed by ELISA to determine the G-CSF protein expression, and the induction of the cytokines interferon-alpha (IFN-α) and tumor necrosis factor alpha (TNF-α). The protein expression of G-CSF is shown in Table 105, the expression of IFN-α and TNF-α is shown in Table 106.

[1361] The data in Table 105 demonstrates that many, but not all, chemical modifications can be used to productively produce human G-CSF in PBMC. Of note, 100% N1-methylpseudouridine substitution demonstrates the highest level of human G-CSF production (almost 10-fold higher than pseudouridine itself). When N1-methylpseudouridine is used in combination with 5-methylcytidine a high level of human G-CSF protein is also produced (this is also higher than when pseudouridine is used in combination with 5 methylcytidine).

[1362] Given the inverse relationship between protein production and cytokine production in PBMC, a similar trend is also seen in Table 106, where 100% substitution with N1-methylpseudouridine results no cytokine induction (similar to transfection only controls) and pseudouridine shows detectable cytokine induction which is above background.

[1363] Other modifications such as N6-methyladenosine and alpha-thiocytidine appear to increase cytokine stimulation.

TABLE 105
Chemical Modifications and G-CSF Protein Expression

| | G-CSF Protein Expression (pg/ml) | | |
|---|---|---|---|
| | Donor | Donor | Donor |
| Chemical Modifications | 1 | 2 | 3 |
| Pseudouridine | 2477 | 1,909 | 1,498 |
| 5-methyluridine | 318 | 359 | 345 |
| N1-methyl-pseudouridine | 21,495 | 16,550 | 12,441 |
| 2-thiouridine | 932 | 1,000 | 600 |
| 4-thiouridine | 5 | 391 | 218 |
| 5-methoxyuridine | 2,964 | 1,832 | 1,800 |
| 5-methylcytosine and | 2,632 | 1,955 | 1,373 |
| pseudouridine (1^{st} set) | | | |
| 5-methylcytosine and N1-methyl- | 10,232 | 7,245 | 6,214 |
| pseudouridine (1^{st} set) | | | |
| 2′Fluoroguanosine | 59 | 186 | 177 |
| 2′Fluorouridine | 118 | 209 | 191 |
| 5-methylcytosine and | 1,682 | 1,382 | 1,036 |
| pseudouridine (2^{nd} set) | | | |
| 5-methylcytosine and N1-methyl- | 9,564 | 8,509 | 7,141 |
| pseudouridine (2^{nd} set) | | | |
| 5-bromouridine | 314 | 482 | 291 |
| 5-(2-carbomethoxyvinyl)uridine | 77 | 286 | 177 |
| 5-[3(1-E-propenylamino)uridine | 541 | 491 | 550 |
| α-thiocytidine | 105 | 264 | 245 |
| 5-methylcytosine and | 1,595 | 1,432 | 955 |
| pseudouridine (3^{rd} set) | | | |
| N1-methyladenosine | 182 | 177 | 191 |
| N6-methyladenosine | 100 | 168 | 200 |
| 5-methylcytidine | 291 | 277 | 359 |
| N4-acetylcytidine | 50 | 136 | 36 |
| 5-formylcytidine | 18 | 205 | 23 |
| 5-methylcytosine and | 264 | 350 | 182 |
| pseudouridine (4^{th} set) | | | |
| 5-methylcytosine and N1-methyl- | 9,505 | 6,927 | 5,405 |
| pseudouridine (4^{th} set) | | | |
| LPS | 1,209 | 786 | 636 |
| mCherry | 5 | 168 | 164 |
| R848 | 709 | 732 | 636 |
| P(I)P(C) | 5 | 186 | 182 |

TABLE 106
Chemical Modifications and Cytokine Expression

| Chemical | IFN-α Expression (pg/ml) | | | TNF-α Expression (pg/ml) | | |
|---|---|---|---|---|---|---|
| Modifications | Donor 1 | Donor 2 | Donor 3 | Donor 1 | Donor 2 | Donor 3 |
| Pseudouridine | 120 | 77 | 171 | 36 | 81 | 126 |
| 5-methyluridine | 245 | 135 | 334 | 94 | 100 | 157 |
| N1-methyl- | 26 | 75 | 138 | 101 | 106 | 134 |
| pseudouridine | | | | | | |
| 2-thiouridine | 100 | 108 | 154 | 133 | 133 | 141 |
| 4-thiouridine | 463 | 258 | 659 | 169 | 126 | 254 |
| 5-methoxyuridine | 0 | 64 | 133 | 39 | 74 | 111 |
| 5-methylcytosine | 88 | 94 | 148 | 64 | 89 | 121 |
| and pseudouridine | | | | | | |
| (1^{st} set) | | | | | | |
| 5-methylcytosine | 0 | 60 | 136 | 54 | 79 | 126 |
| and N1-methyl- | | | | | | |
| pseudouridine | | | | | | |
| (1^{st} set) | | | | | | |
| 2′Fluoroguanosine | 107 | 97 | 194 | 91 | 94 | 141 |
| 2′Fluorouridine | 158 | 103 | 178 | 164 | 121 | 156 |
| 5-methylcytosine | 133 | 92 | 167 | 99 | 111 | 150 |
| and pseudouridine | | | | | | |
| (2^{nd} set) | | | | | | |
| 5-methylcytosine | 0 | 66 | 140 | 54 | 97 | 149 |
| and N1-methyl- | | | | | | |
| pseudouridine | | | | | | |
| (2^{nd} set) | | | | | | |
| 5-bromouridine | 95 | 86 | 181 | 87 | 106 | 157 |
| 5-(2- | 0 | 61 | 130 | 40 | 81 | 116 |
| carbomethoxyvinyl) | | | | | | |
| uridine | | | | | | |
| 5-[3(1-E- | 0 | 58 | 132 | 71 | 90 | 119 |
| propenylamino) | | | | | | |
| uridine | | | | | | |
| α-thiocytidine | 1.138 | 565 | 695 | 300 | 273 | 277 |
| 5-methylcytosine | 88 | 75 | 150 | 84 | 89 | 130 |
| and pseudouridine | | | | | | |
| (3^{rd} set) | | | | | | |
| N1-methyladenosine | 322 | 255 | 377 | 256 | 157 | 294 |
| N6-methyladenosine | 1.935 | 1.065 | 1,492 | 1,080 | 630 | 857 |
| 5-methylcytidine | 643 | 359 | 529 | 176 | 136 | 193 |
| N4-acetylcytidine | 789 | 593 | 431 | 263 | 67 | 207 |
| 5-formylcytidine | 180 | 93 | 88 | 136 | 30 | 40 |
| 5-methylcytosine | 131 | 28 | 18 | 53 | 24 | 29 |
| and pseudouridine | | | | | | |
| (4^{th} set) | | | | | | |
| 5-methylcytosine | 0 | 0 | 0 | 36 | 14 | 13 |
| and N1-methyl- | | | | | | |
| pseudouridine | | | | | | |
| (4^{th} set) | | | | | | |
| LPS | 0 | 67 | 146 | 7.004 | 3,974 | 4.020 |
| mCherry | 100 | 75 | 143 | 67 | 100 | 133 |
| R848 | 674 | 619 | 562 | 11,179 | 8,546 | 9,907 |
| P(I)P(C) | 470 | 117 | 362 | 249 | 177 | 197 |

### B. In Vitro Screening in HeLa Cells

[1364] The day before transfection, 20,000 HeLa cells (ATCC no. CCL-2; Manassas, VA) were harvested by treatment with Trypsin-EDTA solution (LifeTechnologies, Grand Island, NY) and seeded in a total volume of 100 ul EMEM medium (supplemented with 10% FCS and 1× Glutamax) per well in a 96-well cell culture plate (Corning, Manassas, VA). The cells were grown at 37oG in 5% CO₂ atmosphere overnight. Next day, 83 ng of Luciferase modified RNA (mRNA sequence shown in SEQ ID NO: 33907; polyA tail of approximately 160 nucleotides not shown in sequence; 5′cap, Cap1) with the chemical modification described in Table 107, were diluted in 10 ul final volume of OPTI-MEM (LifeTechnologies, Grand Island, NY).

[1365] Lipofectamine 2000 (LifeTechnologies, Grand Island, NY) was used as transfection reagent and 0.2 ul were diluted in 10 ul final volume of OPTI-MEM. After 5 minutes of incubation at room temperature, both solutions were combined and incubated an additional 15 minute at room temperature. Then the 20 ul combined solution was added to the 100 ul cell culture medium containing the HeLa cells and incubated at room temperature.

[1366] After 18 to 22 hours of incubation cells expressing luciferase were lysed with 100 ul of Passive Lysis Buffer (Promega, Madison, WI) according to manufacturer instructions. Aliquots of the lysates were transferred to white opaque polystyrene 96-well plates (Corning, Manassas, VA) and combined with 100 ul complete luciferase assay solution (Promega, Madison, WI). The lysate volumes were adjusted or diluted until no more than 2 mio relative light units (RLU) per well were detected for the strongest signal producing samples and the RLUs for each chemistry tested are shown in Table 107. The plate reader was a BioTek Synergy H1 (BioTek, Winooski, VT). The background signal of the plates without reagent was about 200 relative light units per well.

[1367] These results demonstrate that many, but not all, chemical modifications can be used to productively produce human G-CSF in HeLa cells. Of note, 100% N1-methyl-pseudouridine substitution demonstrates the highest level of human G-CSF production.

TABLE 107
Relative Light Units of Luciferase

| Chemical Modification | RLU |
|---|---|
| N6-methyladenosine (m6a) | 534 |
| 5-methylcytidine (m5c) | 138,428 |
| N4-acetylcytidine (ac4c) | 235,412 |
| 5-formylcytidine (f5c) | 436 |
| 5-methylcytosine/pseudouridine, test A1 | 48,659 |
| 5-methylcytosine/N1-methyl-pseudouridine, test A1 | 190,924 |
| Pseudouridine | 655,632 |
| 1-methylpseudouridine (m1u) | 1,517,998 |
| 2-thiouridine (s2u) | 3387 |
| 5-methoxyuridine (mo5u) | 253,719 |
| 5-methylcytosine/pseudouridine, test B1 | 317,744 |
| 5-methylcytosine/N1-methyl-pseudouridine, test B1 | 265,871 |
| 5-Bromo-uridine | 43,276 |
| 5 (2 carbovinyl) uridine | 531 |
| 5 (3-1E propenyl Amino) uridine | 446 |
| 5-methylcytosine/pseudouridine, test A2 | 295,824 |
| 5-methylcytosine/N1-methyl-pseudouridine, test A2 | 233,921 |
| 5-methyluridine | 50,932 |
| α-Thio-cytidine | 26,358 |
| 5-methylcytosine/pseudouridine, test B2 | 481,477 |
| 5-methylcytosine/N1-methyl-pseudouridine, test B2 | 271,989 |
| 5-methylcytosine/pseudouridine, test A3 | 438,831 |
| 5-methylcytosine/N1-methyl-pseudouridine, test A3 | 277,499 |
| Unmodified Luciferase | 234,802 |

### C. In Vitro Screening in Rabbit Reticulocyte Lysates

[1368] Luciferase mRNA (mRNA sequence shown in SEQ ID NO: 33907; polyA tail of approximately 160 nucleotides not shown in sequence; 5′cap, Cap1) was modified with the chemical modification listed in Table 108 and were diluted in sterile nuclease-free water to a final amount of 250 ng in 10 ul. The diluted luciferase was added to 40 ul of freshly prepared Rabbit Reticulocyte Lysate and the in vitro translation reaction was done in a standard 1.5 mL polypropylene reaction tube (Thermo Fisher Scientific, Waltham, MA) at 30° C. in a dry heating block. The translation assay was done with the Rabbit Reticulocyte Lysate (nuclease-treated) kit (Promega, Madison, WI) according to the manufacturer's instructions. The reaction buffer was supplemented with a one-to-one blend of provided amino acid stock solutions devoid of either Leucine or Methionine resulting in a reaction mix containing sufficient amounts of both amino acids to allow effective in vitro translation.

[1369] After 60 minutes of incubation, the reaction was stopped by placing the reaction tubes on ice. Aliquots of the in vitro translation reaction containing luciferase modified RNA were transferred to white opaque polystyrene 96-well plates (Corning, Manassas, VA) and combined with 100 ul complete luciferase assay solution (Promega, Madison, WI). The volumes of the in vitro translation reactions were adjusted or diluted until no more than 2 mio relative light units (RLUs) per well were detected for the strongest signal producing samples and the RLUs for each chemistry tested are shown in Table 108. The plate reader was a BioTek Synergy H1 (BioTek, Winooski, VT). The background signal of the plates without reagent was about 200 relative light units per well.

[1370] These cell-free translation results very nicely correlate with the protein production results in HeLa, with the same modifications generally working or not working in both systems. One notable exception is 5-formylcytidine modified luciferase mRNA which worked in the cell-free translation system, but not in the HeLa cell-based transfection system. A similar difference between the two assays was also seen with 5-formylcytidine modified G-CSF mRNA.

TABLE 108
Relative Light Units of Luciferase

| Chemical Modification | RLU |
|---|---|
| N6-methyladenosine (m6a) | 398 |
| 5-methylcytidine (m5c) | 152,989 |
| N4-acetylcytidine (ac4c) | 60,879 |
| 5-formylcytidine (f5c) | 55,208 |
| 5-methylcytosine/pseudouridine, test A1 | 349,398 |
| 5-methylcytosine/N1-methyl-pseudouridine, test A1 | 205,465 |
| Pseudouridine | 587,795 |
| 1-methylpseudouridine (m1u) | 589,758 |
| 2-thiouridine (s2u) | 708 |
| 5-methoxyuridine (mo5u) | 288,647 |
| 5-methylcytosine/pseudouridine, test B1 | 454,662 |
| 5-methylcytosine/N1-methyl-pseudouridine, test B1 | 223,732 |
| 5-Bromo-uridine | 221,879 |
| 5 (2 carbovinyl) uridine | 225 |
| 5 (3-1E propenyl Amino) uridine | 211 |
| 5-methylcytosine/pseudouridine, test A2 | 558,779 |
| 5-methylcytosine/N1-methyl-pseudouridine, test A2 | 333,082 |
| 5-methyluridine | 214,680 |
| α-Thio-cytidine | 123,878 |
| 5-methylcytosine/pseudouridine, test B2 | 487,805 |
| 5-methylcytosine/N1-methyl-pseudouridine, test B2 | 154,096 |
| 5-methylcytosine/pseudouridine, test A3 | 413,535 |
| 5-methylcytosine/N1-methyl-pseudouridine, test A3 | 292,954 |
| Unmodified Luciferase | 225,986 |

### Example 70. Chemical Modification: In Vivo Studies

A. In Vivo Screening of G-CSF Modified mRNA

[1371] Balb-C mice (n=4) are intramuscularly injected in each leg with modified G-CSF mRNA (mRNA sequence shown in SEQ ID NO: 33897; polyA tail of approximately 160 nucleotides not shown in sequence; 5′cap, Cap1), fully modified with the chemical modifications outlined in Table 109, is formulated in 1×PBS. A control of luciferase modified mRNA (mRNA sequence shown in SEQ ID NO: 33907; polyA tail of approximately 160 nucleotides not shown in sequence; 5′cap, Cap1; fully modified with pseudouridine and 5-methylcytosine) and a control of PBS are also tested. After 8 hours serum is collected to determine G-CSF protein levels cytokine levels by ELISA.

TABLE 109
G-CSF

| mRNA | Chemical Modifications |
|---|---|
| G-CSF | Pseudouridine |
| G-CSF | 5-methyluridine |
| G-CSF | 2-thiouridine |
| G-CSF | 4-thiouridine |
| G-CSF | 5-methoxyuridine |
| G-CSF | 2′-fluorouridine |
| G-CSF | 5-bromouridine |
| G-CSF | 5-[3(1-E-propenylamino)uridine) |
| G-CSF | alpha-thio-cytidine |
| G-CSF | 5-methylcytidine |
| G-CSF | N4-acetylcytidine |
| G-CSF | Pseudouridine and 5-methylcytosine |
| G-CSF | N1-methyl-pseudouridine and 5-methylcytosine |
| Luciferase | Pseudouridine and 5-methylcytosine |
| PBS | None |

B. In Vivo Screening of Luciferase Modified mRNA

[1372] Balb-C mice (n=4) were subcutaneously injected with 200 ul containing 42 to 103 μg of modified luciferase mRNA (mRNA sequence shown in SEQ ID NO: 33907; polyA tail of approximately 160 nucleotides not shown in sequence; 5′cap, Cap1), fully modified with the chemical modifications outlined in Table 110, was formulated in 1×PBS. A control of PBS was also tested. The dosages of the modified luciferase mRNA is also outlined in Table 110. 8 hours after dosing the mice were imaged to determine luciferase expression. Twenty minutes prior to imaging, mice were injected intraperitoneally with a D-luciferin solution at 150 mg/kg. Animals were then anesthetized and images were acquired with an IVIS Lumina II imaging system (Perkin Elmer). Bioluminescence was measured as total flux (photons/second) of the entire mouse.

[1373] As demonstrated in Table 110, all luciferase mRNA modified chemistries demonstrated in vivo activity, with the exception of 2′-fluorouridine. In addition 1-methylpseudouridine modified mRNA demonstrated very high expression of luciferase (5-fold greater expression than pseudouridine containing mRNA).

TABLE 110
Luciferase Screening

| | | Dose | Dose | Luciferase |
|---|---|---|---|---|
| | Chemical | (ug) of | volume | expression |
| mRNA | Modifications | mRNA | (ml) | (photon/second) |
| Luciferase | 5-methylcytidine | 83 | 0.72 | 1.94E+07 |
| Luciferase | N4-acetylcytidine | 76 | 0.72 | 1.11E07 |
| Luciferase | Pseudouridine | 95 | 1.20 | 1.36E+07 |
| Luciferase | 1-methylpseudouridine | 103 | 0.72 | 7.40E+07 |
| Luciferase | 5-methoxyuridine | 95 | 1.22 | 3.32+07 |
| Luciferase | 5-methyluridine | 94 | 0.86 | 7.42E+06 |
| Luciferase | 5-bromouridine | 89 | 1.49 | 3.75E+07 |
| Luciferase | 2′-fluoroguanosine | 42 | 0.72 | 5.88E+05 |
| Luciferase | 2′-fluorocytidine | 47 | 0.72 | 4.21E+05 |
| Luciferase | 2′-flurorouridine | 59 | 0.72 | 3.47E+05 |
| PBS | None | — | 0.72 | 3.16E+05 |

### Example 71. In Vivo Screening of Combination Luciferase Modified mRNA

[1374] Balb-C mice (n=4) were subcutaneously injected with 200 ul of 100 μg of modified luciferase mRNA (mRNA sequence shown in SEQ ID NO: 33907; polyA tail of approximately 160 nucleotides not shown in sequence; 5′cap, Cap1), fully modified with the chemical modifications outlined in Table 111, was formulated in 1×PBS. A control of PBS was also tested. 8 hours after dosing the mice were imaged to determine luciferase expression. Twenty minutes prior to imaging, mice were injected intraperitoneally with a D-luciferin solution at 150 mg/kg. Animals were then anesthetized and images were acquired with an IVIS Lumina II imaging system (Perkin Elmer). Bioluminescence was measured as total flux (photons/second) of the entire mouse.

[1375] As demonstrated in Table 111, all luciferase mRNA modified chemistries (in combination) demonstrated in vivo activity. In addition the presence of N1-methyl-pseudouridine in the modified mRNA (with N4-acetylcytidine or 5 methylcytidine) demonstrated higher expression than when the same combinations where tested using with pseudouridine. Taken together, these data demonstrate that N1-methyl-pseudouridine containing luciferase mRNA results in improved protein expression in vivo whether used alone (Table 110) or when used in combination with other modified nucleotides (Table 111).

TABLE 111
Luciferase Screening Combinations

| | | Luciferase |
|---|---|---|
| | | expression |
| mRNA | Chemical Modifications | (photon/second) |
| Luciferase | N4-acetylcytidine/pseudouridine | 4.18E+06 |
| Luciferase | N4-acetylcytidine/N1-methyl- | 2.88E+07 |
| | pseudouridine | |
| Luciferase | 5-methylcytidine/5-methoxyuridine | 3.48E+07 |
| Luciferase | 5-methylcytidine/5-methyluridine | 1.44E+07 |
| Luciferase | 5-methylcytidine/where 50% of the | 2.39E+06 |
| | uridine is replaced with 2-thiouridine | |
| Luciferase | 5-methylcytidine/pseudouridine | 2.36E+07 |
| Luciferase | 5-methylcytidine/N1-methyl- | 4.15E+07 |
| | pseudouridine | |
| PBS | None | 3.59E+05 |

### Example 72. Innate Immune Response in BJ Fibroblasts

[1376] Human primary foreskin fibroblasts (BJ fibroblasts) are obtained from American Type Culture Collection (ATCC) (catalog #CRL-2522) and grown in Eagle's Minimum Essential Medium (ATCC, cat #30-2003) supplemented with 10% fetal bovine serum at 37° C., under 5% CO₂. BJ fibroblasts are seeded on a 24-well plate at a density of 130,000 cells per well in 0.5 ml of culture medium. 250 ng of modified G-CSF mRNA (mRNA sequence shown in SEQ ID NO: 33897; polyA tail of approximately 160 nucleotides not shown in sequence; 5′cap, Cap1) fully modified with 5-methylcytosine and pseudouridine (Gen1) or fully modified with 5-methylcytosine and N1-methylpseudouridine (Gen2) is transfected using Lipofectamine 2000 (Invitrogen, cat #11668-019), following manufacturer's protocol. Control samples of Lipofectamine 2000 and unmodified G-CSF mRNA (natural G-CSF) are also transfected. The cells are transfected for five consecutive days. The transfection complexes are removed four hours after each round of transfection.

[1377] The culture supernatant is assayed for secreted G-CSF (R&D Systems, catalog #DCS50), tumor necrosis factor-alpha (TNF-alpha) and interferon alpha (IFN-alpha) by ELISA every day after transfection following manufacturer's protocols. The cells are analyzed for viability using CELL TITER GLO® (Promega, catalog #G7570) 6 hrs and 18 hrs after the first round of transfection and every alternate day following that. At the same time from the harvested cells, total RNA is isolated and treated with DNASE® using the RNAEASY micro kit (catalog #74004) following the manufacturer's protocol. 100 ng of total RNA is used for cDNA synthesis using the High Capacity cDNA Reverse Transcription kit (Applied Biosystems, cat #4368814) following the manufacturer's protocol. The cDNA is then analyzed for the expression of innate immune response genes by quantitative real time PCR using SybrGreen in a Biorad CFX 384 instrument following the manufacturer's protocol.

### Example 73. In Vitro Transcription with Wild-Type T7 Polymerase

[1378] Luciferase mRNA (mRNA sequence shown in SEQ ID NO: 33907; polyA tail of approximately 160 nucleotides not shown in sequence; 5′cap, Cap1) and G-CSF mRNA (mRNA sequence shown in SEQ ID NO: 33897; polyA tail of approximately 160 nucleotides not shown in sequence; 5′cap, Cap1) were fully modified with different chemistries and chemistry combinations listed in Tables 112-115 using wild-type T7 polymerase as previously described.

The yield of the translation reactions was determined by spectrophometric measurement (OD260) and the yield for Luciferase is shown in Table 112 and G-CSF is shown in Table 114. The luciferase and G-CSF modified mRNA were also subjected to an enzymatic capping reaction and each modified mRNA capping reaction was evaluated for yield by spectrophometic measurement (OD260) and correct size assessed using bioanalyzer. The yield from the capping reaction for luciferase is shown in Table 113 and G-CSF is shown in Table 115.

TABLE 112
In vitro transcription chemistry for Luciferase

| Chemical Modification | Yield (mg) |
|---|---|
| N6-methyladenosine | 0.99 |
| 5-methylcytidine | 1.29 |
| N4-acetylcytidine | 1.0 |
| 5-formylcytidine | 0.55 |
| Pseudouridine | 2.0 |
| N1-methyl-pseudouridine | 1.43 |
| 2-thiouridine | 1.56 |
| 5-methoxyuridine | 2.35 |
| 5-methyluridine | 1.01 |
| α-Thio-cytidine | 0.83 |
| 5-Br-uridine (5Bru) | 1.96 |
| 5 (2 carbomethoxyvinyl) uridine | 0.89 |
| 5 (3-1E propenyl Amino) uridine | 2.01 |
| N4-acetylcytidine/pseudouridine | 1.34 |
| N4-acetylcytidine/N1-methyl-pseudouridine | 1.26 |
| 5-methylcytidine/5-methoxyuridine | 1.38 |
| 5-methylcytidine/5-bromouridine | 0.12 |
| 5-methylcytidine/5-methyluridine | 2.97 |
| 5-methylcytidine/half of the uridines are | 1.59 |
| modified with 2-thiouridine | |
| 5-methylcytidine/2-thiouridine | 0.90 |
| 5-methylcytidine/pseudouridine | 1.83 |
| 5-methylcytidine/N1-methyl-pseudouridine | 1.33 |

TABLE 113
Capping chemistry and yield for Luciferase modified mRNA

| Chemical Modification | Yield (mg) |
|---|---|
| 5-methylcytidine | 1.02 |
| N4-acetylcytidine | 0.93 |
| 5-formylcytidine | 0.55 |
| Pseudouridine | 2.07 |
| N1-methyl-pseudouridine | 1.27 |
| 2-thiouridine | 1.44 |
| 5-methoxyuridine | 2 |
| 5-methyluridine | 0.8 |
| α-Thio-cytidine | 0.74 |
| 5-Br-uridine (5Bru) | 1.29 |
| 5 (2 carbomethoxyvinyl) uridine | 0.54 |
| 5 (3-1E propenyl Amino) uridine | 1.39 |
| N4-acetylcytidine/pseudouridine | 0.99 |
| N4-acetylcytidine/N1-methyl-pseudouridine | 1.08 |
| 5-methylcytidine/5-methoxyuridine | 1.13 |
| 5-methylcytidine/5-methyluridine | 1.08 |
| 5-methylcytidine/half of the uridines are | 1.2 |
| modified with 2-thiouridine | |
| 5-methylcytidine/2-thiouridine | 1.27 |
| 5-methylcytidine/pseudouridine | 1.19 |
| 5-methylcytidine/N1-methyl-pseudouridine | 1.04 |

TABLE 114
In vitro transcription chemistry
and yield for G-CSF modified mRNA

| Chemical Modification | Yield (mg) |
|---|---|
| N6-methyladenosine | 1.57 |
| 5-methylcytidine | 2.05 |
| N4-acetylcytidine | 3.13 |
| 5-formylcytidine | 1.41 |
| Pseudouridine | 4.1 |
| N1-methyl-pseudouridine | 3.24 |
| 2-thiouridine | 3.46 |
| 5-methoxyuridine | 2.57 |
| 5-methyluridine | 4.27 |
| 4-thiouridine | 1.45 |
| 2′-F-uridine | 0.96 |
| α-Thio-cytidine | 2.29 |
| 2′-F-guanosine | 0.6 |
| N-1-methyladenosine | 0.63 |
| 5-Br-uridine (5Bru) | 1.08 |
| 5 (2 carbomethoxyvinyl) uridine | 1.8 |
| 5 (3-1E propenyl Amino) uridine | 2.09 |
| N4-acetylcytidine/pseudouridine | 1.72 |
| N4-acetylcytidine/N1-methyl-pseudouridine | 1.37 |
| 5-methylcytidine/5-methoxyuridine | 1.85 |
| 5-methylcytidine/5-methyluridine | 1.56 |
| 5-methylcytidine/half of the uridines are | 1.84 |
| modified with 2-thiouridine | |
| 5-methylcytidine/2-thiouridine | 2.53 |
| 5-methylcytidine/pseudouridine | 0.63 |
| N4-acetylcytidine/2-thiouridine | 1.3 |
| N4-acetylcytidine/5-bromouridine | 1.37 |
| 5-methylcytidine/N1-methyl-pseudouridine | 1.25 |
| N4-acetylcytidine/pseudouridine | 2.24 |

TABLE 115
Capping chemistry and yield for G-CSF modified mRNA

| Chemical Modification | Yield (mg) |
|---|---|
| N6-methyladenosine | 1.04 |
| 5-methylcytidine | 1.08 |
| N4-acetylcytidine | 2.73 |
| 5-formylcytidine | 0.95 |
| Pseudouridine | 3.88 |
| N1-methyl-pseudouridine | 2.58 |
| 2-thiouridine | 2.57 |
| 5-methoxyuridine | 2.05 |
| 5-methyluridine | 3.56 |
| 4-thiouridine | 0.91 |
| 2′-F-uridine | 0.54 |
| α-Thio-cytidine | 1.79 |
| 2′-F-guanosine | 0.14 |
| 5-Br-uridine (5Bru) | 0.79 |
| 5 (2 carbomethoxyvinyl) uridine | 1.28 |
| 5 (3-1E propenyl Amino) uridine | 1.78 |
| N4-acetylcytidine/pseudouridine | 0.29 |
| N4-acetylcytidine/N1-methyl-pseudouridine | 0.33 |
| 5-methylcytidine/5-methoxyuridine | 0.91 |
| 5-methylcytidine/5-methyluridine | 0.61 |
| 5-methylcytidine/half of the uridines are | 1.24 |
| modified with 2-thiouridine | |
| 5-methylcytidine/pseudouridine | 1.08 |
| N4-acetylcytidine/2-thiouridine | 1.34 |
| N4-acetylcytidine/5-bromouridine | 1.22 |
| 5-methylcytidine/N1-methyl-pseudouridine | 1.56 |

### Example 74. In Vitro Transcription with Mutant T7 Polymerase

[1379] Luciferase mRNA (mRNA sequence shown in SEQ ID NO: 33907; polyA tail of approximately 160 nucleotides not shown in sequence; 5′cap, Cap1) and G-CSF mRNA (mRNA sequence shown in SEQ ID NO: 33897; polyA tail of approximately 160 nucleotides not shown in sequence; 5′ cap, Cap 1) were fully modified with different chemistries and chemistry combinations listed in Tables 116-119 using a mutant T7 polymerase (Durascribe® T7 Transcription kit (Cat. No. DS010925) (Epicentre®, Madison, WI).

[1380] The yield of the translation reactions was determined by spectrophometric measurement (OD260) and the yield for Luciferase is shown in Table 116 and G-CSF is shown in Table 118.

[1381] The luciferase and G-CSF modified mRNA were also subjected to an enzymatic capping reaction and each modified mRNA capping reaction was evaluated for yield by spectrophometic measurement (OD260) and correct size assessed using bioanalyzer. The yield from the capping reaction for luciferase is shown in Table 117 and G-CSF is shown in Table 119.

TABLE 116
In vitro transcription chemistry and
yield for Luciferase modified mRNA

| Chemical Modification | Yield (ug) |
|---|---|
| 2′Fluorocytosine | 71.4 |
| 2′Fluorouridine | 57.5 |
| 5-methylcytosine/pseudouridine, test A | 26.4 |
| 5-methylcytosine/N1-methyl-pseudouridine, test A | 73.3 |
| N1-acetylcytidine/2-fluorouridine | 202.2 |
| 5-methylcytidine/2-fluorouridine | 131.9 |
| 2-fluorocytosine/pseudouridine | 119.3 |
| 2-fluorocytosine/N1-methyl-pseudouridine | 107.0 |
| 2-fluorocytosine/2-thiouridine | 34.7 |
| 2-fluorocytosine/5-bromouridine | 81.0 |
| 2-fluorocytosine/2-fluorouridine | 80.4 |
| 2-fluoroguanine/5-methylcytosine | 61.2 |
| 2-fluoroguanine/5-methylcytosine/pseudouridine | 65.0 |
| 2-fluoroguanine/5-methylcytidine/N1-methyl-pseudouridine | 41.2 |
| 2-fluoroguanine/pseudouridine | 79.1 |
| 2-fluoroguanine/N1-methyl-pseudouridine | 74.6 |
| 5-methylcytidine/pseudouridine, test B | 91.8 |
| 5-methylcytidine/N1-methyl-pseudouridine, test B | 72.4 |
| 2′fluoroadenosine | 190.98 |

TABLE 117
Capping chemistry and yield for Luciferase modified mRNA

| Chemical Modification | Yield (ug) |
|---|---|
| 2′Fluorocytosine | 19.2 |
| 2′Fluorouridine | 16.7 |
| 5-methylcytosine/pseudouridine, test A | 7.0 |
| 5-methylcytosine/N1-methyl-pseudouridine, test A | 21.5 |
| N1-acetylcytidine/2-fluorouridine | 47.5 |
| 5-methylcytidine/2-fluorouridine | 53.2 |
| 2-fluorocytosine/pseudouridine | 58.4 |
| 2-fluorocytosine/N1-methyl-pseudouridine | 26.2 |
| 2-fluorocytosine/2-thiouridine | 12.9 |
| 2-fluorocytosine/5-bromouridine | 26.5 |
| 2-fluorocytosine/2-fluorouridine | 35.7 |
| 2-fluoroguanine/5-methylcytosine | 24.7 |
| 2-fluoroguanine/5-methylcytosine/pseudouridine | 32.3 |
| 2-fluoroguanine/5-methylcytidine/N1-methyl-pseudouridine | 31.3 |
| 2-fluoroguanine/pseudouridine | 20.9 |
| 2-fluoroguanine/N1-methyl-pseudouridine | 29.8 |
| 5-methylcytidine/pseudouridine, test B | 58.2 |
| 5-methylcytidine/N1-methyl-pseudouridine, test B | 44.4 |

TABLE 118
In vitro transcription chemistry
and yield for G-CSF modified mRNA

| Chemical Modification | Yield (ug) |
|---|---|
| 2′Fluorocytosine | 56.5 |
| 2′Fluorouridine | 79.4 |
| 5-methylcytosine/pseudouridine, test A | 21.2 |
| 5-methylcytosine/N1-methyl-pseudouridine, test A | 77.1 |
| N1-acetylcytidine/2-fluorouridine | 168.6 |
| 5-methylcytidine/2-fluorouridine | 134.7 |
| 2-fluorocytosine/pseudouridine | 97.8 |
| 2-fluorocytosine/N1-methyl-pseudouridine | 103.1 |
| 2-fluorocytosine/2-thiouridine | 58.8 |
| 2-fluorocytosine/5-bromouridine | 88.8 |
| 2-fluorocytosine/2-fluorouridine | 93.9 |
| 2-fluoroguanine/5-methylcytosine | 97.3 |
| 2-fluoroguanine/5-methylcytosine/pseudouridine | 96.0 |
| 2-fluoroguanine/5-methylcytidine/N1-methyl-pseudouridine | 82.0 |
| 2-fluoroguanine/pseudouridine | 68.0 |
| 2-fluoroguanine/N1-methyl-pseudouridine | 59.3 |
| 5-methylcytidine/pseudouridine, test B | 58.7 |
| 5-methylcytidine/N1-methyl-pseudouridine, test B | 78.0 |

TABLE 119
Capping chemistry and yield for G-CSF modified mRNA

| Chemical Modification | Yield (ug) |
|---|---|
| 2′Fluorocytosine | 16.9 |
| 2′Fluorouridine | 17.0 |
| 5-methylcytosine/pseudouridine, test A | 10.6 |
| 5-methylcytosine/N1-methyl-pseudouridine, test A | 22.7 |
| N1-acetylcytidine/2-fluorouridine | 19.9 |
| 5-methylcytidine/2-fluorouridine | 21.3 |
| 2-fluorocytosine/pseudouridine | 65.2 |
| 2-fluorocytosine/N1-methyl-pseudouridine | 58.9 |
| 2-fluorocytosine/2-thiouridine | 41.2 |
| 2-fluorocytosine/5-bromouridine | 35.8 |
| 2-fluorocytosine/2-fluorouridine | 36.7 |
| 2-fluoroguanine/5-methylcytosine | 36.6 |
| 2-fluoroguanine/5-methylcytosine/pseudouridine | 37.3 |
| 2-fluoroguanine/5-methylcytidine/N1-methyl-pseudouridine | 30.7 |
| 2-fluoroguanine/pseudouridine | 29.0 |
| 2-fluoroguanine/N1-methyl-pseudouridine | 22.7 |
| 5-methylcytidine/pseudouridine, test B | 60.4 |
| 5-methylcytidine/N1-methyl-pseudouridine, test B | 33.0 |

### Example 75. 2′O-Methyl and 2′Fluoro Compounds

[1382] Luciferase mRNA (mRNA sequence shown in SEQ ID NO: 33907; polyA tail of approximately 160 nucleotides not shown in sequence; 5′cap, Cap1) were produced as fully modified versions with the chemistries in Table 120 and transcribed using mutant T7 polymerase (Durascribe® T7 Transcription kit (Cat. No. DS010925) (Epicentre®, Madison, WI). 2′ fluoro-containing mRNA were made using Durascribe T7, however, 2′Omethyl-containing mRNA could not be transcribed using Durascribe T7.

[1383] Incorporation of 2′Omethyl modified mRNA might possibly be accomplished using other mutant T7 polymerases (Nat Biotechnol. (2004) 22:1155-1160; Nucleic Acids Res. (2002) 30:e138) or U.S. Pat. No. 7,309,570, the contents of each of which are incorporated herein by reference in their entirety. Alternatively, 2′OMe modifications could be introduced post-transcriptionally using enzymatic means.

[1384] Introduction of modifications on the 2′ group of the sugar has many potential advantages. 2′OMe substitutions, like 2′ fluoro substitutions are known to protect against nucleases and also have been shown to abolish innate immune recognition when incorporated into other nucleic acids such as siRNA and anti-sense (incorporated in its entirety, Crooke, ed. Antisense Drug Technology, 2^{nd} edition; Boca Raton: CRC press).

[1385] The 2′Fluoro-modified mRNA were then transfected into HeLa cells to assess protein production in a cell context and the same mRNA were also assessed in a cell-free rabbit reticulocyte system. A control of unmodified luciferase (natural luciferase) was used for both transcription experiments, a control of untreated and mock transfected (Lipofectamine 2000 alone) were also analyzed for the HeLa transfection and a control of no RNA was analyzed for the rabbit reticulysates.

[1386] For the HeLa transfection experiments, the day before transfection, 20,000 HeLa cells (ATCC no. CCL-2; Manassas, VA) were harvested by treatment with Trypsin-EDTA solution (LifeTechnologies, Grand Island, NY) and seeded in a total volume of 100 ul EMEM medium (supplemented with 10% FCS and 1× Glutamax) per well in a 96-well cell culture plate (Corning, Manassas, VA). The cells were grown at 37oG in 5% CO₂ atmosphere overnight. Next day, 83 ng of the 2′fluoro-containing luciferase modified RNA (mRNA sequence shown in SEQ ID NO: 33907; polyA tail of approximately 160 nucleotides not shown in sequence; 5′cap, Cap1) with the chemical modification described in Table 120, were diluted in 10 ul final volume of OPTI-MEM (LifeTechnologies, Grand Island, NY). Lipofectamine 2000 (LifeTechnologies, Grand Island, NY) was used as transfection reagent and 0.2 ul were diluted in 10 ul final volume of OPTI-MEM. After 5 minutes of incubation at room temperature, both solutions were combined and incubated an additional 15 minute at room temperature. Then the 20 ul combined solution was added to the 100 ul cell culture medium containing the HeLa cells and incubated at room temperature. After 18 to 22 hours of incubation cells expressing luciferase were lysed with 100 ul of Passive Lysis Buffer (Promega, Madison, WI) according to manufacturer instructions. Aliquots of the lysates were transferred to white opaque polystyrene 96-well plates (Corning, Manassas, VA) and combined with 100 ul complete luciferase assay solution (Promega, Madison, WI). The lysate volumes were adjusted or diluted until no more than 2 mio relative light units (RLU) per well were detected for the strongest signal producing samples and the RLUs for each chemistry tested are shown in Table 120. The plate reader was a BioTek Synergy H1 (BioTek, Winooski, VT). The background signal of the plates without reagent was about 200 relative light units per well.

[1387] For the rabbit reticulocyte lysate assay, 2′-fluoro-containing luciferase mRNA were diluted in sterile nuclease-free water to a final amount of 250 ng in 10 ul and added to 40 ul of freshly prepared Rabbit Reticulocyte Lysate and the in vitro translation reaction was done in a standard 1.5 mL polypropylene reaction tube (Thermo Fisher Scientific, Waltham, MA) at 30° C. in a dry heating block. The translation assay was done with the Rabbit Reticulocyte Lysate (nuclease-treated) kit (Promega, Madison, WI) according to the manufacturer's instructions. The reaction buffer was supplemented with a one-to-one blend of provided amino acid stock solutions devoid of either Leucine or Methionine resulting in a reaction mix containing sufficient amounts of both amino acids to allow effective in vitro translation. After 60 minutes of incubation, the reaction was stopped by placing the reaction tubes on ice.

[1388] Aliquots of the in vitro translation reaction containing luciferase modified RNA were transferred to white opaque polystyrene 96-well plates (Corning, Manassas, VA) and combined with 100 ul complete luciferase assay solution (Promega, Madison, WI). The volumes of the in vitro translation reactions were adjusted or diluted until no more than 2 mio relative light units (RLUs) per well were detected for the strongest signal producing samples and the RLUs for each chemistry tested are shown in Table 121. The plate reader was a BioTek Synergy H1 (BioTek, Winooski, VT). The background signal of the plates without reagent was about 160 relative light units per well.

[1389] As can be seen in Table 120 and 121, multiple 2′Fluoro-containing compounds are active in vitro and produce luciferase protein.

TABLE 120
HeLa Cells

| | Concentration | Volume | Yield | |
|---|---|---|---|---|
| Chemical Modification | (ug/ml) | (ul) | (ug) | RLU |
| 2′Fluoroadenosine | 381.96 | 500 | 190.98 | 388.5 |
| 2′Fluorocytosine | 654.56 | 500 | 327.28 | 2420 |
| 2′Fluoroguanine | 541.795 | 500 | 270.90 | 11,705.5 |
| 2′Flurorouridine | 944.005 | 500 | 472.00 | 6767.5 |
| Natural luciferase | N/A | N/A | N/A | 133,853.5 |
| Mock | N/A | N/A | N/A | 340 |
| Untreated | N/A | N/A | N/A | 238 |

TABLE 121
Rabbit Reticulysates

| Chemical Modification | RLU |
|---|---|
| 2′Fluoroadenosine | 162 |
| 2′Fluorocytosine | 208 |
| 2′Fluoroguanine | 371,509 |
| 2′Flurorouridine | 258 |
| Natural luciferase | 2,159,968 |
| No RNA | 156 |

### Example 76. Luciferase in HeLa Cells Using a Combination of Modifications

[1390] To evaluate using of 2′fluoro-modified mRNA in combination with other modification a series of mRNA were transcribed using either wild-type T7 polymerase (non-fluoro-containing compounds) or using mutant T7 polymerases (fluyoro-containing compounds) as described in Example 75. All modified mRNA were tested by in vitro transfection in HeLa cells.

[1391] The day before transfection, 20,000 HeLa cells (ATCC no. CCL-2; Manassas, VA) were harvested by treatment with Trypsin-EDTA solution (LifeTechnologies, Grand Island, NY) and seeded in a total volume of 100 ul EMEM medium (supplemented with 10% FCS and 1× Glutamax) per well in a 96-well cell culture plate (Corning, Manassas, VA). The cells were grown at 37oG in 5% CO₂ atmosphere overnight. Next day, 83 ng of Luciferase modified RNA (mRNA sequence shown in SEQ ID NO: 33907; polyA tail of approximately 160 nucleotides not shown in sequence; 5′cap, Cap1) with the chemical modification described in Table 122, were diluted in 10 ul final volume of OPTI-MEM (LifeTechnologies, Grand Island, NY).

[1392] Lipofectamine 2000 (LifeTechnologies, Grand Island, NY) was used as transfection reagent and 0.2 ul were diluted in 10 ul final volume of OPTI-MEM. After 5 minutes of incubation at room temperature, both solutions were combined and incubated an additional 15 minute at room temperature. Then the 20 ul combined solution was added to the 100 ul cell culture medium containing the HeLa cells and incubated at room temperature.

[1393] After 18 to 22 hours of incubation cells expressing luciferase were lysed with 100 ul of Passive Lysis Buffer (Promega, Madison, WI) according to manufacturer instructions. Aliquots of the lysates were transferred to white opaque polystyrene 96-well plates (Corning, Manassas, VA) and combined with 100 ul complete luciferase assay solution (Promega, Madison, WI). The lysate volumes were adjusted or diluted until no more than 2 mio relative light units (RLU) per well were detected for the strongest signal producing samples and the RLUs for each chemistry tested are shown in Table 122. The plate reader was a BioTek Synergy H1 (BioTek, Winooski, VT). The background signal of the plates without reagent was about 200 relative light units per well.

[1394] As evidenced in Table 122, most combinations of modifications resulted in mRNA which produced functional luciferase protein, including all the non-flouro containing compounds and many of the combinations containing 2′fluro modifications.

TABLE 122
Luciferase

| Chemical Modification | RLU |
|---|---|
| N4-acetylcytidine/pseudouridine | 113,796 |
| N4-acetylcytidine/N1-methyl-pseudouridine | 316,326 |
| 5-methylcytidine/5-methoxyuridine | 24,948 |
| 5-methylcytidine/5-methyluridine | 43,675 |
| 5-methylcytidine/half of the uridines modified with | 41,601 |
| 50% 2-thiouridine | |
| 5-methylcytidine/2-thiouridine | 1,102 |
| 5-methylcytidine/pseudouridine | 51,035 |
| 5-methylcytidine/N1-methyl-pseudouridine | 152,151 |
| N4-acetylcytidine/2′Fluorouridine triphosphate | 288 |
| 5-methylcytidine/2′Fluorouridine triphosphate | 269 |
| 2′Fluorocytosine triphosphate/pseudouridine | 260 |
| 2′Fluorocytosine triphosphate/N1-methyl- | 412 |
| pseudouridine | |
| 2′Fluorocytosine triphosphate/2-thiouridine | 427 |
| 2′Fluorocytosine triphosphate/5-bromouridine | 253 |
| 2′Fluorocytosine triphosphate/2′Fluorouridine | 184 |
| triphosphate | |
| 2′Fluoroguanine triphosphate/5-methylcytidine | 321 |
| 2′Fluoroguanine triphosphate/5-methylcytidine/ | 207 |
| Pseudouridine | |
| 2′Fluoroguanine/5-methylcytidine/N1-methyl- | 235 |
| psuedouridine | |
| 2′Fluoroguanine/pseudouridine | 218 |
| 2′Fluoroguanine/N1-methyl-psuedouridine | 247 |
| 5-methylcytidine/pseudouridine, test A | 13,833 |
| 5-methylcytidine/N1-methyl-pseudouridine, test A | 598 |
| 2′Fluorocytosine triphosphate | 201 |
| 2′Fluorouridine triphosphate | 305 |
| 5-methylcytidine/pseudouridine, test B | 115,401 |
| 5-methylcytidine/N1-methyl-pseudouridine, test B | 21,034 |
| Natural luciferase | 30,801 |
| Untreated | 344 |
| Mock | 262 |

### Example 77. G-CSF In Vitro Transcription

[1395] To assess the activity of all our different chemical modifications in the context of a second open reading frame, we replicated experiments previously conducted using luciferase mRNA, with human G-CSF mRNA. G-CSF mRNA (mRNA sequence shown in SEQ TD NO: 33897; polyA tail of approximately 160 nucleotides not shown in sequence; 5′cap, Cap1) were fully modified with the chemistries in Tables 124 and 125 using wild-type T7 polymerase (for all non-fluoro-containing compounds) or mutant T7 polymerase (for all fluoro-containing compounds). The mutant T7 polymerase was obtained commercially (Durascribe® T7 Transcription kit (Cat. No. DS010925) (Epicentre®, Madison, WI).

[1396] The modified RNA in Tables 124 and 125 were transfected in vitro in HeLa cells or added to rabbit reticulysates (250 ng of modified mRNA) as indicated. A control of untreated, mock transfected (transfection reagent alone), G-CSF fully modified with 5-methylcytosine and N1-methyl-pseudouridine or luciferase control (mRNA sequence shown in SEQ ID NO: 33907; polyA tail of approximately 160 nucleotides not shown in sequence; 5′cap, Cap1) fully modified with 5-methylcytosine and N1-methylpseudouridine were also analyzed. The expression of G-CSF protein was determined by ELISA and the values are shown in Tables 124 and 125. In Table 124, “NT” means not tested.

[1397] As shown in Table 124, many, but not all, chemical modifications resulted in human G-CSF protein production. These results from cell-based and cell-free translation systems correlate very nicely with the same modifications generally working or not working in both systems. One notable exception is 5-formylcytidine modified G-CSF mRNA which worked in the cell-free translation system, but not in the HeLa cell-based transfection system. A similar difference between the two assays was also seen with 5-formylcytidine modified luciferase mRNA.

[1398] As demonstrated in Table 125, many, but not all, G-CSF mRNA modified chemistries (when used in combination) demonstrated in vivo activity. In addition the presence of N1-methyl-pseudouridine in the modified mRNA (with N4-acetylcytidine or 5 methylcytidine) demonstrated higher expression than when the same combinations where tested using with pseudouridine. Taken together, these data demonstrate that N1-methyl-pseudouridine containing G-CSF mRNA results in improved protein expression in vitro.

TABLE 124
G-CSF Expression

| | | G-CSF |
|---|---|---|
| | | protein |
| | G-CSF | (pg/ml) |
| | protein | Rabbit |
| | (pg/ml) | reticulysates |
| Chemical Modification | HeLa cells | cells |
| Pseudouridine | 1,150,909 | 147,875 |
| 5-methyluridine | 347,045 | 147,250 |
| 2-thiouridine | 417,273 | 18,375 |
| N1-methylpseudouridine | NT | 230,000 |
| 4-thiouridine | 107,273 | 52,375 |
| 5-methoxyuridine | 1,715,909 | 201,750 |
| 5-methylcytosine/pseudouridine, Test A | 609,545 | 119,750 |
| 5-methylcytosine/N1-methyl- | 1,534,318 | 110,500 |
| pseudouridine, Test A | | |
| 2′-Fluoro-guanosine | 11,818 | 0 |
| 2′-Fluoro-uridine | 60,455 | 0 |
| 5-methylcytosine/pseudouridine, Test B | 358,182 | 57,875 |
| 5-methylcytosine/N1-methyl- | 1,568,636 | 76,750 |
| pseudouridine, Test B | | |
| 5-Bromo-uridine | 186,591 | 72,000 |
| 5-(2carbomethoxyvinyl) uridine | 1,364 | 0 |
| 5-[3(1-E-propenylamino) uridine | 27,955 | 32,625 |
| α-thio-cytidine | 120,455 | 42,625 |
| 5-methylcytosine/pseudouridine, Test C | 882,500 | 49,250 |
| N1-methyl-adenosine | 4,773 | 0 |
| N6-methyl-adenosine | 1,591 | 0 |
| 5-methyl-cytidine | 646,591 | 79,375 |
| N4-acetylcytidine | 39,545 | 8,000 |
| 5-formyl-cytidine | 0 | 24,000 |
| 5-methylcytosine/pseudouridine, Test D | 87,045 | 47,750 |
| 5-methylcytosine/N1-methyl- | 1,168,864 | 97,125 |
| pseudouridine, Test D | | |
| Mock | 909 | 682 |
| Untreated | 0 | 0 |
| 5-methylcytosine/N1-methyl- | 1,106,591 | NT |
| pseudouridine, Control | | |
| Luciferase control | NT | 0 |

TABLE 125
Combination Chemistries in HeLa cells

| | G-CSF protein |
|---|---|
| | (pg/ml) |
| Chemical Modification | HeLa cells |
| N4-acetylcytidine/pseudouridine | 537,273 |
| N4-acetylcytidine/N1-methyl-pseudouridine | 1,091,818 |
| 5-methylcytidine/5-methoxyuridine | 516,136 |
| 5-methylcytidine/5-bromouridine | 48,864 |
| 5-methylcytidine/5-methyluridine | 207,500 |
| 5-methylcytidine/2-thiouridine | 33,409 |
| N4-acetylcytidine/5-bromouridine | 211,591 |
| N4-acetylcytidine/2-thiouridine | 46,136 |
| 5-methylcytosine/pseudouridine | 301,364 |
| 5-methylcytosine/N1-methyl-pseudouridine | 1,017,727 |
| N4-acetylcytidine/2′Fluorouridine triphosphate | 62,273 |
| 5-methylcytidine/2′Fluorouridine triphosphate | 49,318 |
| 2′Fluorocytosine triphosphate/pseudouridine | 7,955 |
| 2′Fluorocytosine triphosphate/N1-methyl- | 1,364 |
| pseudouridine | |
| 2′Fluorocytosine triphosphate/2-thiouridine | 0 |
| 2′Fluorocytosine triphosphate/5-bromouridine | 1,818 |
| 2′Fluorocytosine triphosphate/2′Fluorouridine | 909 |
| triphosphate | |
| 2′Fluoroguanine triphosphate/5-methylcytidine | 0 |
| 2′Fluoroguanine triphosphate/5-methylcytidine/ | 0 |
| pseudouridine | |
| 2′Fluoroguanine triphosphate/5-methylcytidine/ | 1,818 |
| N1-methyl-pseudouridine | |
| 2′Fluoroguanine triphosphate/pseudouridine | 1,136 |
| 2′Fluoroguanine triphosphate/2′Fluorocytosine | 0 |
| triphosphate/N1-methyl-pseudouridine | |
| 5-methylcytidine/pseudouridine | 617,727 |
| 5-methylcytidine/N1-methyl-pseudouridine | 747,045 |
| 5-methylcytidine/pseudouridine | 475,455 |
| 5-methylcytidine/N1-methyl-pseudouridine | 689,091 |
| 5-methylcytosine/N1-methyl-pseudouridine, Control 1 | 848,409 |
| 5-methylcytosine/N1-methyl-pseudouridine, Control 2 | 581,818 |
| Mock | 682 |
| Untreated | 0 |
| Luciferase 2′Fluorocytosine triphosphate | 0 |
| Luciferase 2′Fluorouridine triphosphate | 0 |

### Example 78. Screening of Chemistries

[1399] The tables listed in below (Tables 126-128) summarize much of the in vitro and in vitro screening data with the different compounds presented in the previous examples. A good correlation exists between cell-based and cell-free translation assays. The same chemistry substitutions generally show good concordance whether tested in the context of luciferase or G-CSF mRNA. Lastly, N1-methyl-pseudouridine containing mRNA show a very high level of protein expression with little to no detectable cytokine stimulation in vitro and in vivo, and is superior to mRNA containing pseudouridine both in vitro and in vivo.

[1400] Luciferase mRNA (mRNA sequence shown in SEQ ID NO: 33907; polyA tail of approximately 160 nucleotides not shown in sequence; 5′cap, Cap1) and G-CSF mRNA (mRNA sequence shown in SEQ ID NO: 33897; polyA tail of approximately 160 nucleotides not shown in sequence; 5′cap, Cap1) were modified with naturally and non-naturally occurring chemistries described in Tables 126 and 127 or combination chemistries described in Table 128 and tested using methods described herein.

[1401] In Tables 126 and 127, “*” refers to in vitro transcription reaction using a mutant T7 polymerase (Durascribe® T7 Transcription kit (Cat. No. DS010925) (Epicentre®, Madison, WI); “**” refers to the second result in vitro transcription reaction using a mutant T7 polymerase (Durascribe® T7 Transcription kit (Cat. No. DS010925) (Epicentre®, Madison, WI); “***” refers to production seen in cell free translations (rabbit reticulocyte lysates); the protein production of HeLa is judged by “+,” “+/−” and “−”; when referring to G-CSF PBMC “++++” means greater than 6,000 pg/ml G-CSF, “+++” means greater than 3,000 pg/ml G-CSF, “++” means greater than 1,500 pg/ml G-CSF, “+” means greater than 300 pg/ml G-CSF, “+/−” means 150-300 pg/ml G-CSF and the background was about 110 pg/ml; when referring to cytokine PBMC “++++” means greater than 1,000 pg/ml interferon-alpha (IFN-alpha), “+++” means greater than 600 pg/ml IFN-alpha, “++” means greater than 300 pg/ml IFN-alpha, “+” means greater than 100 pg/ml IFN-alpha, “−” means less than 100 pg/ml and the background was about 70 pg/ml; and “NT” means not tested. In Table 1277, the protein production was evaluated using a mutant T7 polymerase (Durascribe® T7 Transcription kit (Cat. No. DS010925) (Epicentre®, Madison, WI).

TABLE 126
Naturally Occurring

| | | IVT | Protein | Protein | Protein | Cytokines | In Vivo | In Vivo |
|---|---|---|---|---|---|---|---|---|
| Common Name | IVT | (G- | (Luc; | (G-CSF; | (G-CSF; | (G-CSF; | Protein | Protein |
| (symbol) | (Luc) | CSF) | HeLa) | HeLa) | PBMC) | PBMC) | (Luc) | (G-CSF) |
| 1-methyladenosine | Fail | Pass | NT | − | +/− | ++ | NT | NT |
| (m¹A) | | | | | | | | |
| N⁶-methyladenosine | Pass | Pass | − | − | +/− | ++++ | NT | NT |
| (m⁶A) | | | | | | | | |
| 2′-O-methyladenosine | Fail* | Not | NT | NT | NT | NT | NT | NT |
| (Am) | | Done | | | | | | |
| 5-methylcytidine | Pass | Pass | + | + | + | ++ | + | NT |
| (m⁵C) | | | | | | | | |
| 2′-O-methylcytidine | Fail* | Not | NT | NT | NT | NT | NT | NT |
| (Cm) | | Done | | | | | | |
| 2-thiocytidine (s²C) | Fail | Fail | NT | NT | NT | NT | NT | NT |
| N⁴-acetylcytidine | Pass | Pass | + | + | +/− | +++ | + | NT |
| (ac⁴C) | | | | | | | | |
| 5-formylcytidine | Pass | Pass | −*** | −*** | − | + | NT | NT |
| (f⁵C) | | | | | | | | |
| 2′-O-methylguanosine | Fail* | Not | NT | NT | NT | NT | NT | NT |
| (Gm) | | Done | | | | | | |
| inosine (I) | Fail | Fail | NT | NT | NT | NT | NT | NT |
| pseudouridine (Y) | Pass | Pass | + | + | ++ | + | + | NT |
| 5-methyluridine | Pass | Pass | + | + | +/− | + | NT | NT |
| (m⁵U) | | | | | | | | |
| 2′-O-methyluridine | Fail* | Not | NT | NT | NT | NT | NT | NT |
| (Um) | | Done | | | | | | |
| 1-methylpseudouridine | Pass | Pass | + | Not | ++++ | − | + | NT |
| (m¹Y) | | | | Done | | | | |
| 2-thiouridine (s²U) | Pass | Pass | − | + | + | + | NT | NT |
| 4-thiouridine (s⁴U) | Fail | Pass | | + | +/− | ++ | NT | NT |
| 5-methoxyuridine | Pass | Pass | + | + | ++ | − | + | NT |
| (mo⁵U) | | | | | | | | |
| 3-methyluridine | Fail | Fail | NT | NT | NT | NT | NT | NT |
| (m³U) | | | | | | | | |

TABLE 127
Non-Naturally Occurring

| | | | | | | | | In |
|---|---|---|---|---|---|---|---|---|
| | | | | Protein | | | In | Vivo |
| | | IVT | Protein | (G- | Protein | Cytokines | Vivo | Protein |
| Common | IVT | (G- | (Luc; | CSF; | (G-CSF; | (G-CSF; | Protein | (G- |
| Name | (Luc) | CSF) | HeLa) | HeLa) | PBMC) | PBMC) | (Luc) | CSF) |
| 2′-F-ara-guanosine | Fail | Fail | NT | NT | NT | NT | NT | NT |
| 2′-F-ara-adenosine | Fail | Fail | NT | NT | NT | NT | NT | NT |
| 2′-F-ara-cytidine | Fail | Fail | NT | NT | NT | NT | NT | NT |
| 2′-F-ara-uridine | Fail | Fail | NT | NT | NT | NT | NT | NT |
| 2′-F-guanosine | Fail/ | Pass/ | +** | +/− | − | + | + | NT |
| | Pass** | Fail** | | | | | | |
| 2′-F-adenosine | Fail/ | Pass/ | −** | NT | NT | NT | NT | NT |
| | Pass** | Fail** | | | | | | |
| 2′-F-cytidine | Fail/ | Fail/ | +** | NT | NT | NT | + | NT |
| | Pass** | Pass** | | | | | | |
| 2′-F-uridine | Fail/ | Pass/ | +** | + | +/− | + | − | NT |
| | Pass** | Pass** | | | | | | |
| 2′-OH-ara- | Fail | Fail | NT | NT | NT | NT | NT | NT |
| guanosine | | | | | | | | |
| 2′-OH-ara- | Not | Not | NT | NT | NT | NT | NT | NT |
| adenosine | Done | Done | | | | | | |
| 2′-OH-ara- | Fail | Fail | NT | NT | NT | NT | NT | NT |
| cytidine | | | | | | | | |
| 2′-OH-ara- | Fail | Fail | NT | NT | NT | NT | NT | NT |
| uridine | | | | | | | | |
| 5-Br-Uridine | Pass | Pass | + | + | + | + | + | |
| 5-(2- | Pass | Pass | − | − | +/− | − | | |
| carbomethoxy | | | | | | | | |
| vinyl) Uridine | | | | | | | | |
| 5-[3-(1-E- | Pass | Pass | − | + | + | − | | |
| Propenylamino) | | | | | | | | |
| Uridine | | | | | | | | |
| (aka Chem 5) | | | | | | | | |
| N6-(19- | | | | | | | | |
| Amino- | Fail | Fail | NT | NT | NT | NT | NT | NT |
| pentaoxanona- | | | | | | | | |
| decyl) A | | | | | | | | |
| 2- | | | | | | | | |
| Dimethylamino | Fail | Fail | NT | NT | NT | NT | NT | NT |
| guanosine | | | | | | | | |
| 6-Aza-cytidine | Fail | Fail | NT | NT | NT | NT | NT | NT |
| a-Thio-cytidine | Pass | Pass | + | + | +/− | +++ | NT | NT |
| Pseudo- | NT | NT | NT | NT | NT | NT | NT | NT |
| isocytidine | | | | | | | | |
| 5-Iodo-uridine | NT | NT | NT | NT | NT | NT | NT | NT |
| a-Thio-uridine | NT | NT | NT | NT | NT | NT | NT | NT |
| 6-Aza-uridine | NT | NT | NT | NT | NT | NT | NT | NT |
| Deoxy- | NT | NT | NT | NT | NT | NT | NT | NT |
| thymidine | | | | | | | | |
| a-Thio | NT | NT | NT | NT | NT | NT | NT | NT |
| guanosine | | | | | | | | |
| 8-Oxo- | NT | NT | NT | NT | NT | NT | NT | NT |
| guanosine | | | | | | | | |
| O6-Methyl- | NT | NT | NT | NT | NT | NT | NT | NT |
| guanosine | | | | | | | | |
| 7-Deaza- | NT | NT | NT | NT | NT | NT | NT | NT |
| guanosine | | | | | | | | |
| 6-Chloro- | NT | NT | NT | NT | NT | NT | NT | NT |
| purine | | | | | | | | |
| a-Thio- | NT | NT | NT | NT | NT | NT | NT | NT |
| adenosine | | | | | | | | |
| 7-Deaza- | NT | NT | NT | NT | NT | NT | NT | NT |
| adenosine | | | | | | | | |
| 5-iodo- | NT | NT | NT | NT | NT | NT | NT | NT |
| cytidine | | | | | | | | |

[1402] In Table 128, the protein production of HeLa is judged by “+,” “+−” and “−”; when referring to G-CSF PBMC “++++” means greater than 6,000 pg/ml G-CSF, “+++” means greater than 3,000 pg/ml G-CSF, “C++” means greater than 1,500 pg/ml G-CSF, “+” means greater than 300 pg/ml G-CSF, “+/−” means 150-300 pg/ml G-CSF and the background was about 110 pg/ml; when referring to cytokine PBMC “++++” means greater than 1,000 pg/ml interferon-alpha (IFN-alpha), “+++” means greater than 600 pg/ml IFN-alpha, “++” means greater than 300 pg/ml IFN-alpha, “+” means greater than 100 pg/ml IFN-alpha, “−” means less than 100 pg/ml and the background was about 70 pg/ml; “WT” refers to the wild type T7 polymerase, “MT” refers to mutant T7 polymerase (Durascribe® T7 Transcription kit (Cat. No. DS010925) (Epicentre®, Madison, WI) and “NT” means not tested.

TABLE 128
Combination Chemistry

| | | | | | | Protein | Protein | | In |
|---|---|---|---|---|---|---|---|---|---|
| | | | | IVT | Protein | (G- | (C- | Cytokines | Vivo |
| Cytidine | Uridine | | IVT | (G- | (Luc; | CSF; | CSF; | (G-CSF; | Protein |
| analog | analog | Purine | Luc | CSF) | HeLa) | HeLa) | PBMC) | PBMC) | (Luc) |
| N4- | pseudo- | A, G | Pass | Pass | + | + | NT | NT | + |
| acetyl- | uridine | | WT | WT | | | | | |
| cytidine | | | | | | | | | |
| N4- | N1- | A, G | Pass | Pass | + | + | NT | NT | + |
| acetyl- | methyl- | | WT | WT | | | | | |
| cytidine | pseudo- | | | | | | | | |
| | uridine | | | | | | | | |
| 5- | 5- | A, G | Pass | Pass | + | + | NT | NT | + |
| methyl | methoxy | | WT | WT | | | | | |
| cytidine | uridine | | | | | | | | |
| 5- | 5- | A, G | Pass | Pass | Not | + | NT | NT | + |
| methyl- | bromo- | | WT | WT | Done | | | | |
| cytidine | uridine | | | | | | | | |
| 5- | 5- | A, G | Pass | Pass | + | + | NT | NT | + |
| methyl- | methyl- | | WT | WT | | | | | |
| cytidine | uridine | | | | | | | | |
| 5- | 50% 2- | A, G | Pass | Pass | + | NT | NT | NT | + |
| methyl- | thio- | | WT | WT | | | | | |
| cytidine | uridine; | | | | | | | | |
| | 50% | | | | | | | | |
| | uridine | | | | | | | | |
| 5- | 100% 2- | A, G | Pass | Pass | − | + | NT | NT | |
| methyl- | thio- | | WT | WT | | | | | |
| cytidine | uridine | | | | | | | | |
| 5- | pseudo- | A, G | Pass | Pass | + | + | ++ | + | + |
| methyl- | uridine | | WT | WT | | | | | |
| cytidine | | | | | | | | | |
| 5- | N1- | A, G | Pass | Pass | + | + | ++++ | − | + |
| methyl- | methyl- | | WT | WT | | | | | |
| cytidine | pseudo- | | | | | | | | |
| | uridine | | | | | | | | |
| N4- | 2- | A, G | Not | Pass | Not | + | NT | NT | NT |
| acetyl- | thio- | | Done | WT | Done | | | | |
| cytidine | uridine | | | | | | | | |
| N4- | 5- | A, G | Not | Pass | Not | + | NT | NT | NT |
| acetyl- | bromo- | | Done | WT | Done | | | | |
| cytidine | uridine | | | | | | | | |
| N4- | 2 | A, G | Pass | Pass | − | + | NT | NT | NT |
| acetyl- | Fluoro | | | | | | | | |
| cytidine | uridine | | | | | | | | |
| | triphos- | | | | | | | | |
| | phate | | | | | | | | |
| 5- | 2 | A, G | Pass | Pass | − | + | NT | NT | NT |
| methyl- | Fluoro | | | | | | | | |
| cytidine | uridine | | | | | | | | |
| | triphos- | | | | | | | | |
| | phate | | | | | | | | |
| 2 | pseudo- | A, G | Pass | Pass | − | + | NT | NT | NT |
| Fluoro- | uridine | | | | | | | | |
| cytosine | | | | | | | | | |
| triphos- | | | | | | | | | |
| phate | | | | | | | | | |
| 2 | N1- | A, G | Pass | Pass | − | +/− | NT | NT | NT |
| Fluoro- | methyl- | | | | | | | | |
| cytosine | pseudo- | | | | | | | | |
| triphos- | uridine | | | | | | | | |
| phate | | | | | | | | | |
| 2 | 2- | A, G | Pass | Pass | − | − | NT | NT | NT |
| Fluoro- | thio- | | | | | | | | |
| cytosine | uridine | | | | | | | | |
| triphos- | | | | | | | | | |
| phate | | | | | | | | | |
| 2 | 5- | A, G | Pass | Pass | − | +/− | NT | NT | NT |
| Fluoro- | bromo- | | | | | | | | |
| cytosine | uridine | | | | | | | | |
| triphos- | | | | | | | | | |
| phate | | | | | | | | | |
| 2 | 2 | A, G | Pass | Pass | − | +/− | NT | NT | NT |
| Fluoro- | Fluoro- | | | | | | | | |
| cytosine | uridine | | | | | | | | |
| triphos- | triphos- | | | | | | | | |
| phate | phate | | | | | | | | |
| 5- | uridine | A, 2 | Pass | Pass | − | − | NT | NT | NT |
| methyl- | | Fluoro | | | | | | | |
| cytidine | | GTP | | | | | | | |
| 5- | N1- | A, 2 | Pass | Pass | − | − | NT | NT | NT |
| methyl- | pseudo- | Fluoro | | | | | | | |
| cytidine | uridine | GTP | | | | | | | |
| 5- | N1- | A, 2 | Pass | Pass | − | +/− | NT | NT | NT |
| methyl- | methyl- | Fluoro | | | | | | | |
| cytidine | pseudo- | GTP | | | | | | | |
| | uridine | | | | | | | | |
| 2 | pseudo- | A, 2 | Pass | Pass | − | +/− | NT | NT | NT |
| Fluoro- | uridine | Fluoro | | | | | | | |
| cytosine | | GTP | | | | | | | |
| triphos- | | | | | | | | | |
| phate | | | | | | | | | |
| 2 | N1- | A, 2 | Pass | Pass | − | − | NT | NT | NT |
| Fluoro- | methyl- | Fluoro | | | | | | | |
| cytosine | pseudo- | GTP | | | | | | | |
| triphos- | uridine | | | | | | | | |
| phate | | | | | | | | | |

### Example 79. 2′Fluoro Chemistries in PBMC

[1403] The ability of G-CSF modified mRNA (mRNA sequence shown in SEQ ID NO: 33897; polyA tail of approximately 160 nucleotides not shown in sequence; 5′cap, Cap1) to trigger innate an immune response was determined by measuring interferon-alpha (IFN-alpha) and tumor necrosis factor-alpha (TNF-alpha) production. Use of in vitro PBMC cultures is an accepted way to measure the immunostimulatory potential of oligonucleotides (Robbins et al., Oligonucleotides 2009 19:89-102) and transfection methods are described herein. Shown in Table 129 are the average from 2 or 3 separate PBMC donors of the interferon-alpha (IFN-alpha) and tumor necrosis factor alpha (TNF-alpha) production over time as measured by specific ELISA. Controls of R848, P(I)P(C), LPS and Lipofectamine 2000 (L2000) were also analyzed.

With regards to innate immune recognition, while both modified mRNA chemistries largely prevented IFN-alpha and TNF-alpha production relative to positive controls (R848, P(I)P(C)), 2′fluoro compounds reduce IFN-alpha and TNF-alpha production even lower than other combinations and N4-acetylcytidine combinations raised the cytokine profile.

TABLE 129
IFN-alpha and TNF-alpha

| | IFN-alpha: 3 | TNF-alpha: 2 |
|---|---|---|
| | Donor Aver- | Donor Aver- |
| | age (pg/ml) | age (pg/ml) |
| L2000 | 1 | 361 |
| P(I)P(C) | 482 | 544 |
| R848 | 45 | 8,235 |
| LPS | 0 | 6,889 |
| N4-acetylcytidine/pseudouridine | 694 | 528 |
| N4-acetylcytidine/N1-methyl- | 307 | 283 |
| pseudouridine | | |
| 5-methylcytidine/5-methoxyuridine | 0 | 411 |
| 5-methylcytidine/5-bromouridine | 0 | 270 |
| 5-methylcytidine/5-methyluridine | 456 | 428 |
| 5-methylcytidine/2-thiouridine | 274 | 277 |
| N4-acetylcytidine/2-thiouridine | 0 | 285 |
| N4-acetylcytidine/5-bromouridine | 44 | 403 |
| 5-methylcytidine/pseudouridine | 73 | 332 |
| 5-methylcytidine/N1-methyl- | 31 | 280 |
| pseudouridine | | |
| N4-acetylcytidine/2′fluorouridine | 35 | 32 |
| triphosphate | | |
| 5-methylcytodine/2′fluorouridine | 24 | 0 |
| triphosphate | | |
| 2′fluorocytidine triphosphate/N1- | 0 | 11 |
| methyl-pseudouridine | | |
| 2′fluorocytidine triphosphate/ | 0 | 0 |
| 2-thiouridine | | |
| 2′fluorocytidine/triphosphate5- | 12 | 2 |
| bromouridine | | |
| 2′fluorocytidine triphosphate/ | 11 | 0 |
| 2′fluorouridine triphosphate | | |
| 2′fluorocytidine triphosphate/ | 14 | 23 |
| 5-methylcytidine | | |
| 2′fluorocytidine triphosphate/ | 6 | 21 |
| 5-methylcytidine/pseudouridine | | |
| 2′fluorocytidine triphosphate/ | 3 | 15 |
| 5-methylcytidine/N1-methyl- | | |
| pseudouridine | | |
| 2′fluorocytidine triphosphate/ | 0 | 4 |
| pseudouridine | | |
| 2′fluorocytidine triphosphate/ | 6 | 20 |
| N1-methyl-pseudouridine | | |
| 5-methylcytidine/pseudouridine | 82 | 18 |
| 5-methylcytidine/N1-methyl- | 35 | 3 |
| pseudouridine | | |

### Example 80. Modified mRNA with a Tobacco Etch Virus 5′UTR

[1404] A 5′ untranslated region (UTR) may be provided as a flanking region. Multiple 5′ UTRs may be included in the flanking region and may be the same or of different sequences. Any portion of the flanking regions, including none, may be codon optimized and any may independently contain one or more different structural or chemical modifications, before and/or after codon optimization.

[1405] The 5′ UTR may comprise the 5′UTR from the tobacco etch virus (TEV). Variants of 5′ UTRs may be utilized wherein one or more nucleotides are added or removed to the termini, including A, T, C or G.

### Example 81. Expression of PLGA Formulated mRNA

### A. Synthesis and Characterization of Luciferase PLGA Microspheres

[1406] Luciferase mRNA (mRNA sequence shown in SEQ TD NO: 33907; polyA tail of approximately 140 nucleotides not shown in sequence; 5′cap, Cap1) fully modified with 5-methylcytosine and N1-methyl pseudouridine, modified with 2500 of uridine replaced with 2-thiouridine and 250% of cytosine replaced with 5-methylcytosine, fully modified with N1-methyl pseudouridine, or fully modified with pseudouridine was reconstituted in 1×TE buffer and then formulated in PLGA microspheres. PLGA microspheres were synthesized using the water/oil/water double emulsification methods known in the art using PLGA-ester cap (Lactel, Cat #B6010-2, inherent viscosity 0.55-0.75, 50:50 LA:GA), polyvinylalcohol (PVA) (Sigma, Cat #348406-25G, MW 13-23k) dichloromethane and water. Briefly, 0.4 ml of mRNA in TE buffer at 4 mg/ml (W1) was added to 2 ml of PLGA dissolved in dichloromethane (DCM) (O1) at a concentration of 200 mg/ml of PLGA. The W1/O1 emulsion was homogenized (IKA Ultra-Turrax Homogenizer, T18) for 30 seconds at speed 5 (˜19,000 rpm). The W1/O1 emulsion was then added to 250 ml 1% PVA (W2) and homogenized for 1 minute at speed 5 (˜19,000 rpm). Formulations were left to stir for 3 hours, then passed through a 100 μm nylon mesh strainer (Fisherbrand Cell Strainer, Cat #22-363-549) to remove larger aggregates, and finally washed by centrifugation (10 min, 9,250 rpm, 4° C.). The supernatant was discarded and the PLGA pellets were resuspended in 5-10 ml of water, which was repeated 2×. After washing and resuspension with water, 100-200 μl of a PLGA microspheres sample was used to measure particle size of the formulations by laser diffraction (Malvern Mastersizer2000). The washed formulations were frozen in liquid nitrogen and then lyophilized for 2-3 days.

[1407] After lyophilization, ˜10 mg of PLGA MS were weighed out in 2 ml eppendorf tubes and deformulated by adding 1 ml of DCM and letting the samples shake for 2-6 hrs. The mRNA was extracted from the deformulated PLGA micropsheres by adding 0.5 ml of water and shaking the sample overnight. Unformulated luciferase mRNA in TE buffer (unformulated control) was spiked into DCM and went through the deformulation process (deformulation control) to be used as controls in the transfection assay. The encapsulation efficiency, weight percent loading and particle size are shown in Table 130. Encapsulation efficiency was calculated as mg of mRNA from deformulation of PLGA microspheres divided by the initial amount of mRNA added to the formulation. Weight percent loading in the formulation was calculated as mg of mRNA from deformulation of PLGA microspheres divided by the initial amount of PLGA added to the formulation.

TABLE 130
PLGA Characteristics

| | | | Theoretical | | Particle |
|---|---|---|---|---|---|
| | Sample | Encapsulation | mRNA | Actual mRNA | Size |
| Chemical Modifications | ID | Efficiency (%) | Loading (wt %) | Loading (wt %) | (D50, um) |
| Fully modified with 5- | 43-66A | 45.8 | 0.4 | 0.18 | 33.4 |
| methylcytosine and N1- | 43-66B | 29.6 | | 0.12 | 27.7 |
| methyl pseudouridine | 43-66C | 25.5 | | 0.10 | 27.1 |
| 25% of uridine replaced | 43-67A | 34.6 | 0.4 | 0.14 | 29.9 |
| with 2-thiouridine and | 43-67B | 22.8 | | 0.09 | 30.2 |
| 25% of cytosine replaced | 43-67C | 23.9 | | 0.10 | 25.1 |
| with 5-methylcytosine | | | | | |
| Fully modified with N1- | 43-69A | 55.8 | 0.4 | 0.22 | 40.5 |
| methyl pseudouridine | 43-69B | 31.2 | | 0.12 | 41.1 |
| | 43-69C | 24.9 | | 0.10 | 46.1 |
| Fully modified with | 43-68-1 | 49.3 | 0.4 | 0.20 | 34.8 |
| pseudouridine | 43-68-2 | 37.4 | | 0.15 | 35.9 |
| | 43-68-3 | 45.0 | | 0.18 | 36.5 |

B. Protein Expression of Modified mRNA Encapsulated in PLGA Microspheres

[1408] The day before transfection, 20,000 HeLa cells (ATCC no. CCL-2; Manassas, VA) were harvested by treatment with Trypsin-EDTA solution (LifeTechnologies, Grand Island, NY) and seeded in a total volume of 100 ul EMEM medium (supplemented with 10% FCS and 1× Glutamax) per well in a 96-well cell culture plate (Corning, Manassas, VA). The cells were grown at 37° C. in a 5% CO2 atmosphere overnight. The next day, 83 ng of the deformulated luciferase mRNA PLGA microsphere samples, deformulated luciferase mRNA control (Deform control), or unformulated luciferase mRNA control (Unfomul control) was diluted in a 10 ul final volume of OPTI-MEM (LifeTechnologies, Grand Island, NY). Lipofectamine 2000 (LifeTechnologies, Grand Island, NY) was used as a transfection reagent and 0.2 ul was diluted in a 10 ul final volume of OPTI-MEM. After 5 min of incubation at room temperature, both solutions were combined and incubated an additional 15 min at room temperature. Then 20 ul of the combined solution was added to 100 ul of cell culture medium containing the HeLa cells. The plates were then incubated as described before.

[1409] After an 18 to 22 hour incubation, cells expressing luciferase were lysed with 100 ul Passive Lysis Buffer (Promega, Madison, WI) according to manufacturer instructions. Aliquots of the lysates were transferred to white opaque polystyrene 96-well plates (Corning, Manassas, VA) and combined with 100 ul complete luciferase assay solution (Promega, Madison, WI). The background signal of the plates without reagent was about 200 relative light units per well. The plate reader was a BioTek Synergy H1 (BioTek, Winooski, VT).

[1410] Cells were harvested and the bioluminescence (in relative light units, RLU) for each sample is shown in Table 131. Transfection of these samples confirmed that the varied chemistries of luciferase mRNA is still able to express luciferase protein after PLGA microsphere formulation.

TABLE 131
Chemical Modifications

| Chemical | | Biolum. |
|---|---|---|
| Modifications | Sample ID | (RLU) |
| Fully modified with | Deform contol | 164266.5 |
| 5-methylcytosine | Unformul control | 113714 |
| and N1-methyl- | 43-66A | 25174 |
| pseudouridine | 43-66B | 25359 |
| | 43-66C | 20060 |
| 25% of uridine | Deform contol | 90816.5 |
| replaced with 2- | Unformul control | 129806 |
| thiouridine and 25% | 43-67A | 38329.5 |
| of cytosine replaced | 43-67B | 8471.5 |
| with 5- | 43-67C | 10991.5 |
| methylcytosine | | |
| Fully modified with | Deform contol | 928093.5 |
| N1-methyl- | Unformul control | 1512273.5 |
| pseudouridine | 43-69A | 1240299.5 |
| | 43-69B | 748667.5 |
| | 43-69C | 1193314 |
| Fully modified with | Deform contol | 154168 |
| pseudouridine | Unformul control | 151581 |
| | 43-68-1 | 120974.5 |
| | 43-68-2 | 107669 |
| | 43-68-3 | 97226 |

### Example 82. In Vitro Studies of Factor IX

### A. Serum-Free Media

[1411] Human Factor IX mRNA (mRNA sequence shown in SEQ ID NO: 33901; polyA tail of approximately 160 nucleotides not shown in sequence; 5′cap, Cap1; fully modified with 5-methylcytosine and pseudouridine) was transfected in serum-free media. The cell culture supernatant was collected and subjected to trypsin digestion before undergoing 2-dimensional HPLC separation of the peptides. Matrix-assisted laser desorption/ionization was used to detect the peptides. 8 peptides were detected and 7 of the detected peptides are unique to Factor IX. These results indicate that the mRNA transfected in the serum-free media was able to express full-length Factor IX protein.

### B. Human Embryonic Kidney (HEK) 293A Cells

[1412] 250 ng of codon optimized Human Factor IX mRNA (mRNA sequence shown in SEQ ID NO: 33901; fully modified with 5-methylcytosine and pseudouridine; polyA tail of approximately 160 nucleotides not shown in sequence; 5′cap, Cap1) was transfected into HEK 293A cells (150, 000 cells/well) using Lipofectamine 2000 in DMEM in presence of 10% FBS. The transfection complexes were removed 3 hours after transfection. Cells were harvested at 3, 6, 9, 12, 24, 48 and 72 hours after transfection. Total RNA was isolated and used for cDNA synthesis. The cDNA was subjected to analysis by quantitative Real-Time PCR using codon optimized Factor IX specific primer set. Human hypoxanthine phosphoribosyltransfersase 1 (HPRT) level was used for normalization. The data is plotted as a percent of detectable mRNA considering the mRNA level as 100% at the 3 hour time point. The half-life of Factor IX modified mRNA fully modified with 5-methylcytosine and pseudouridine in human embryonic kidney 293 (HEK293) cells is about 8-10 hours.

### Example 83. Saline Formulation: Subcutaneous Administration

[1413] Human G-CSF modified mRNA (mRNA sequence shown in SEQ ID NO: 33897; polyA tail of approximately 160 nucleotides not shown in sequence; 5′cap, Cap1; fully modified with 5-methylcytosine and pseudouridine) and human EPO modified mRNA (mRNA sequence shown in SEQ ID NO: 33900; polyA tail of approximately 160 nucleotides not shown in sequence; 5′cap, Cap1; fully modified with 5-methylcytosine and pseudouridine), were formulated in saline and delivered to mice via intramuscular (IM) injection at a dose of 100 ug.

[1414] Controls included Luciferase (mRNA sequence shown in SEQ ID NO: 33907; polyA tail of approximately 160 nucleotides not shown in sequence; 5′cap, Cap1; fully modified with 5-methylcytosine and pseudouridine)) or the formulation buffer (F.Buffer). The mice were bled at 13 hours after the injection to determine the concentration of the human polypeptide in serum in pg/mL. (G-CSF groups measured human G-CSF in mouse serum and EPO groups measured human EPO in mouse serum). The data are shown in Table 132.

[1415] mRNA degrades rapidly in serum in the absence of formulation suggesting the best method to deliver mRNA to last longer in the system is by formulating the mRNA. As shown in Table 132, mRNA can be delivered subcutaneously using only a buffer formulation.

TABLE 132
Dosing Regimen

| | | Dose | | Average |
|---|---|---|---|---|
| | | Vol. | Dosing | Protein Product |
| Group | Treatment | (μl/mouse) | Vehicle | pg/mL, serum |
| G-CSF | G-CSF | 100 | F. buffer | 45 |
| G-CSF | Luciferase | 100 | F. buffer | 0 |
| G-CSF | F. buffer | 100 | F. buffer | 2.2 |
| EPO | EPO | 100 | F. buffer | 72.03 |
| EPO | Luciferase | 100 | F. buffer | 26.7 |
| EPO | F. buffer | 100 | F. buffer | 13.05 |

### Example 84. Intravitreal Delivery

[1416] mCherry modified mRNA (mRNA sequence shown in SEQ ID NO: 33898; polyA tail of approximately 160 nucleotides not shown in sequence; 5′cap, Cap1; fully modified with 5-methylcytosine and pseudouridine) and luciferase modified mRNA (mRNA sequence shown in SEQ ID NO: 33907; polyA tail of approximately 160 nucleotides not shown in sequence; 5′cap, Cap1; fully modified with 5-methylcytosine and pseudouridine) formulated in saline was delivered intravitreally in rats as described in Table 133. The sample was compared against a control of saline only delivered intravitreally.

TABLE 133
Dosing Chart

| | Dose Level | Dose | Treatment | |
|---|---|---|---|---|
| | (μg modified | volume | Right Eye | Left Eye |
| Group No. | RNA/eye) | (μL/eye) | (OD) | (OS) |
| Control | 0 | 5 | Delivery | Delivery |
| | | | buffer only | buffer only |
| Modified RNA in | 10 | 5 | mCherry | Luciferase |
| delivery buffer | | | | |

[1417] The formulation will be administered to the left or right eye of each animal on day 1 while the animal is anesthetized. On the day prior to administration gentamicin ophthalmic ointment or solution was applied to both eyes twice. The gentamicin ophthalmic ointment or solution was also applied immediately following the injection and on the day following the injection. Prior to dosing, mydriatic drops (1% tropicamide and/or 2.5% phenylephrine) are applied to each eye.

[1418] 18 hours post dosing the eyes receiving the dose of mCherry and delivery buffer are enucleated and each eye was separately placed in a tube containing 10 mL 4% paraformaldehyde at room temperature for overnight tissue fixation. The following day, eyes will be separately transferred to tubes containing 10 mL of 30% sucurose and stored at 21° C. until they were processed and sectioned. The slides prepared from different sections were evaluated under F-microscopy. Positive expression was seen in the slides prepared with the eyes administered mCherry modified mRNA and the control showed no expression.

### Example 85. In Vivo Cytokine Expression Study

[1419] Mice were injected intramuscularly with 200 μg of G-CSF modified mRNA (mRNA sequence shown in SEQ ID NO: 33897; polyA tail of approximately 160 nucleotides not shown in sequence) which was unmodified with a 5′cap, Cap1 (unmodified), fully modified with 5-methylcytosine and pseudouridine and a 5′cap, Cap1 (Gen1) or fully modified with 5-methylcytosine and N1-methylpseudouridine and a 5′cap, Cap1 (Gen2 cap) or no cap (Gen2 uncapped). Controls of R-848, 5% sucrose and untreated mice were also analyzed. After 8 hours serum was collected from the mice and analyzed for interferon-alpha (IFN-alpha) expression. The results are shown in Table 134.

TABLE 134
IFN-alpha Expression

| Formulation | IFN-alpha (pg/ml) |
|---|---|
| G-CSF unmodified | 67.012 |
| G-CSF Gen1 | 8.867 |
| G-CSF Gen2 cap | 0 |
| G-CSF Gen2 uncapped | 0 |
| R-848 | 40.971 |
| 5% sucrose | 1.493 |
| Untreated | 0 |

### Example 86. In Vitro Expression of VEGF Modified mRNA

[1420] HEK293 cells were transfected with modified mRNA (mmRNA) VEGF-A (mRNA sequence shown in SEQ ID NO: 33910; polyA tail of approximately 160 nucleotides not shown in sequence; 5′cap, Cap1; fully modified with 5-methylcytosine and pseudouridine) which had been complexed with Lipofectamine2000 from Invitrogen (Carlsbad, CA) at the concentration shown in Table 135. The protein expression was detected by ELISA and the protein (pg/ml) is shown in Table 135.

TABLE 135
Protein Expression

| | Amount Transfected | | | | | | | |
|---|---|---|---|---|---|---|---|---|
| | 10 ng | 2.5 ng | 625 pg | 156 pg | 39 pg | 10 pg | 2 pg | 610 fg |
| Protein | 10495 | 10038 | 2321.23 | 189.6 | 0 | 0 | 0 | 0 |
| (pg/ml) | | | | | | | | |

### Example 87. In Vitro Screening in HeLa Cells of GFP

[1421] The day before transfection, 20,000 HeLa cells (ATCC no. CCL-2; Manassas, VA) were harvested by treatment with Trypsin-EDTA solution (LifeTechnologies, Grand Island, NY) and seeded in a total volume of 100 ul EMEM medium (supplemented with 10% FCS and 1× Glutamax) per well in a 96-well cell culture plate (Corning, Manassas, VA). The cells were grown at 37° C. in 5% CO₂ atmosphere overnight. Next day, 37.5 ng or 75 ng of Green Fluroescent protein (GFP) modified RNA (mRNA sequence shown in SEQ ID NO: 33909; polyA tail of approximately 160 nucleotides not shown in sequence; 5′cap, Cap1) with the chemical modification described in Table 136, were diluted in 10 ul final volume of OPTI-MEM (LifeTechnologies, Grand Island, NY). Lipofectamine 2000 (LifeTechnologies, Grand Island, NY) was used as transfection reagent and 0.2 ul were diluted in 10 ul final volume of OPTI-MEM. After 5 minutes of incubation at room temperature, both solutions were combined and incubated an additional 15 minute at room temperature. Then the 20 ul combined solution was added to the 100 ul cell culture medium containing the HeLa cells and incubated at room temperature.

[1422] After an 18 to 22 hour incubation cells expressing luciferase were lysed with 100 ul of Passive Lysis Buffer (Promega, Madison, WI) according to manufacturer instructions. Aliquots of the lysates were transferred to white opaque polystyrene 96-well plates (Corning, Manassas, VA) and combined with 100 ul complete luciferase assay solution (Promega, Madison, WI). The median fluorescence intensity (MFI) was determined for each chemistry and is shown in Table 136.

[1423] These results demonstrate that GFP fully modified with N1-methylpseudouridine and 5-methylcytosine produces more protein in HeLa cells compared to the other chemistry. Additionally the higher dose of GFP administered to the cells resulted in the highest MFI value.

TABLE 136
Mean Fluorescence Intensity

| | 37.5 ng | 75 ng |
|---|---|---|
| Chemistry | MFI | MFI |
| No modifications | 97400 | 89500 |
| 5-methylcytosine/pseudouridine | 324000 | 715000 |
| 5-methylcytosine/N1-methyl-pseudouridine | 643000 | 1990000 |

### Example 88. Homogenization

[1424] Different luciferase mRNA solutions (as described in Table 137 where “X” refers to the solution containing that component) (mRNA sequence shown in SEQ ID NO: 33907; polyA tail of approximately 160 nucleotides not shown in sequence; 5′cap, Cap1; fully modified with 5-methylcytosine and pseudouridine) were evaluated to test the percent yield of the different solutions, the integrity of the mRNA by bioanalyzer, and the protein expression of the mRNA by in vitro transfection. The mRNA solutions were prepared in water, 1×TE buffer at 4 mg/ml as indicated in Table 137, and added to either dichloromethane (DCM) or DCM containing 200 mg/ml of poly(lactic-co-glycolic acid) (PLGA) (Lactel, Cat #B6010-2, inherent viscosity 0.55-0.75, 50:50 LA:GA) to achieve a final mRNA concentration of 0.8 mg/ml. The solutions requiring homogenization were homogenized for 30 seconds at speed 5 (approximately 19,000 rpm) (IKA Ultra-Turrax Homogenizer, T18). The mRNA samples in water, dicloromethane and poly(lactic-co-glycolic acid) (PLGA) were not recoverable (NR). All samples, except the NR samples, maintained integrity of the mRNA as determined by bioanalyzer (Bio-rad Experion).

[1425] The day before transfection, 20,000 HeLa cells (ATCC no. CCL-2; Manassas, VA) were harvested by treatment with Trypsin-EDTA solution (LifeTechnologies, Grand Island, NY) and seeded in a total volume of 100 ul EMEM medium (supplemented with 10% FCS and 1× Glutamax) per well in a 96-well cell culture plate (Corning, Manassas, VA). The cells were grown at 37° C. in a 5% CO2 atmosphere overnight. The next day, 250 ng of luciferase mRNA from the recoverable samples was diluted in a 10 ul final volume of OPTI-MEM (LifeTechnologies, Grand Island, NY). Lipofectamine 2000 (LifeTechnologies, Grand Island, NY) was used as a transfection reagent and 0.2 ul was diluted in a 10 ul final volume of OPTI-MEM. After 5 minutes of incubation at room temperature, both solutions were combined and incubated an additional 15 minutes at room temperature. Then 20 ul of the combined solution was added to 100 ul of cell culture medium containing the HeLa cells. The plates were then incubated as described before. Controls luciferase mRNA (luciferase mRNA formulated in saline) (Control) and untreated cells (Untreat.) were also evaluated. Cells were harvested and the bioluminescence average (in photons/second) (biolum. (p/s)) for each signal is also shown in Table 137. The recoverable samples all showed activity of luciferase mRNA when analyzed.

[1426] After an 18 to 22 hour incubation, cells expressing luciferase were lysed with 100 ul Passive Lysis Buffer (Promega, Madison, WI) according to manufacturer instructions. Aliquots of the lysates were transferred to white opaque polystyrene 96-well plates (Corning, Manassas, VA) and combined with 100 ul complete luciferase assay solution (Promega, Madison, WI). The background signal of the plates without reagent was about 200 relative light units per well. The plate reader was a BioTek Synergy H1 (BioTek, Winooski, VT).

[1427] Cells were harvested and the bioluminescence average (in relative light units, RLU) (biolum. (RLU)) for each signal is also shown in Table 137. The recoverable samples all showed activity of luciferase mRNA when analyzed.

TABLE 137
Solutions

| Solution | | 1 × TE | | DCM/ | | Yield | Biolum. |
|---|---|---|---|---|---|---|---|
| No. | Water | Buffer | DCM | PLGA | Homogenizer | (%) | (RLU) |
| 1 | X | | | | | 96 | 5423780 |
| 2 | | X | | | X | 95 | 4911950 |
| 3 | X | | | | X | 92 | 2367230 |
| 4 | | X | | | X | 90 | 4349410 |
| 5 | X | | X | | X | 66 | 4145340 |
| 6 | | X | X | | X | 71 | 3834440 |
| 7 | X | | | X | X | NR | n/a |
| 8 | | X | | X | X | 24 | 3182080 |
| 9 | X | | | X | | NR | n/a |
| 10 | | X | | X | | 79 | 3276800 |
| 11 | X | | X | | | 79 | 5563550 |
| 12 | | X | X | | | 79 | 4919100 |
| Control | | | | | | | 2158060 |
| Untreat. | | | | | | | 3530 |

### Example 89. TE Buffer and Water Evaluation

[1428] Luciferase mRNA (mRNA sequence shown in SEQ ID NO: 33907; polyA tail of approximately 160 nucleotides not shown in sequence; 5′cap, Cap1; fully modified with 5-methylcytosine and pseudouridine) was reconstituted in water or TE buffer as outlined in Table 138 and then formulated in PLGA microspheres. PLGA microspheres were synthesized using the water/oil/water double emulsification methods known in the art using PLGA (Lactel, Cat #B6010-2, inherent viscosity 0.55-0.75, 50:50 LA:GA), polyvinylalcohol (PVA) (Sigma, Cat #348406-25G, MW 13-23k) dichloromethane and water. Briefly, 0.2 to 0.6 ml of mRNA in water or TE buffer at a concentration of 2 to 6 mg/ml (W1) was added to 2 ml of PLGA dissolved in dichloromethane (DCM) (O1) at a concentration of 100 mg/ml of PLGA. The W1/O1 emulsion was homogenized (IKA Ultra-Turrax Homogenizer, T18) for 30 seconds at speed 5 (˜19,000 rpm). The W1/O1 emulsion was then added to 250 ml 1% PVA (W2) and homogenized for 1 minute at speed 5 (˜19,000 rpm). Formulations were left to stir for 3 hours, then passed through a 100 μm nylon mesh strainer (Fisherbrand Cell Strainer, Cat #22-363-549) to remove larger aggregates, and finally washed by centrifugation (10 min, 9,250 rpm, 4° C.). The supernatant was discarded and the PLGA pellets were resuspended in 5-10 ml of water, which was repeated 2×. The washed formulations were frozen in liquid nitrogen and then lyophilized for 2-3 days. After lyophilization, −10 mg of PLGA MS were weighed out in 2 ml eppendorf tubes and deformulated by adding 1 ml of DCM and letting the samples shake for 2-6 hrs. mRNA was extracted from the deformulated PLGA micropsheres by adding 0.5 ml of water and shaking the sample overnight. Unformulated luciferase mRNA in water or TE buffer (deformulation controls) was spiked into DCM and went through the deformulation process to be used as controls in the transfection assay.

[1429] The day before transfection, 20,000 HeLa cells (ATCC no. CCL-2; Manassas, VA) were harvested by treatment with Trypsin-EDTA solution (LifeTechnologies, Grand Island, NY) and seeded in a total volume of 100 ul EMEM medium (supplemented with 10% FCS and 1× Glutamax) per well in a 96-well cell culture plate (Corning, Manassas, VA). The cells were grown at 37° C. in a 5% CO2 atmosphere overnight. The next day, 100 ng of the deformulated luciferase mRNA samples was diluted in a 10 ul final volume of OPTI-MEM (LifeTechnologies, Grand Island, NY). Lipofectamine 2000 (LifeTechnologies, Grand Island, NY) was used as a transfection reagent and 0.2 ul was diluted in a 10 ul final volume of OPTI-MEM. After 5 minutes of incubation at room temperature, both solutions were combined and incubated an additional 15 minutes at room temperature. Then 20 ul of the combined solution was added to 100 ul of cell culture medium containing the HeLa cells. The plates were then incubated as described before.

[1430] After 18 to 22 hour incubation, cells expressing luciferase were lysed with 100 ul Passive Lysis Buffer (Promega, Madison, WI) according to manufacturer instructions. Aliquots of the lysates were transferred to white opaque polystyrene 96-well plates (Corning, Manassas, VA) and combined with 100 ul complete luciferase assay solution (Promega, Madison, WI). The background signal of the plates without reagent was about 200 relative light units per well. The plate reader was a BioTek Synergy H1 (BioTek, Winooski, VT). To determine the activity of the luciferase mRNA from each formulation, the relative light units (RLU) for each formulation was divided by the RLU of the appropriate mRNA deformulation control (mRNA in water or TE buffer). Table 138 shows the activity of the luciferase mRNA. The activity of the luciferase mRNA in the PLGA microsphere formulations (Form.) was substantially improved by formulating in TE buffer versus water.

TABLE 138
Formulations

| | | | | Theoretical | Actual | | |
|---|---|---|---|---|---|---|---|
| | mRNA | | Total | mRNA | mRNA | | Activity (% |
| | conc. | W1 Solvent | mRNA | Loading | Loading | | of deform. |
| Form. | (mg/ml) | volume (ul) | (ug) | (wt %) | (wt %) | W1 Solvent | control) |
| PLGA A | 4 | 400 | 1600 | 0.80 | 0.14 | Water | 12.5% |
| PLGA B | 4 | 200 | 800 | 0.40 | 0.13 | Water | 1.3% |
| PLGA C | 4 | 600 | 2400 | 1.20 | 0.13 | Water | 12.1% |
| PLGA D | 2 | 400 | 800 | 0.40 | 0.07 | Water | 1.3% |
| PLGA E | 6 | 400 | 2400 | 1.20 | 0.18 | TE Buffer | 38.9% |
| PLGA F | 4 | 400 | 1600 | 0.80 | 0.16 | TE Buffer | 39.7% |
| PLGA G | 4 | 400 | 1600 | 0.80 | 0.10 | TE Buffer | 26.6% |

### Example 90. Chemical Modifications on mRNA

[1431] The day before transfection, 20,000 HeLa cells (ATCC no. CCL-2; Manassas, VA) were harvested by treatment with Trypsin-EDTA solution (Life Technologies, Grand Island, NY) and seeded in a total volume of 100 ul EMEM medium (supplemented with 10% FCS and 1× Glutamax) per well in a 96-well cell culture plate (Corning, Manassas, VA). The cells were grown at 37° C. in 5% CO₂ atmosphere overnight. The next day, 83 ng of Luciferase modified RNA (mRNA sequence shown SEQ ID NO: 33907; polyA tail of approximately 140 nucleotides not shown in sequence; 5′cap, Cap1) with the chemical modification described in Table 139, were diluted in 10 ul final volume of OPTI-MEM (LifeTechnologies, Grand Island, NY). Lipofectamine 2000 (LifeTechnologies, Grand Island, NY) was used as transfection reagent and 0.2 ul were diluted in 10 ul final volume of OPTI-MEM. After 5 minutes of incubation at room temperature, both solutions were combined and incubated an additional 15 minute at room temperature. Then the 20 ul combined solution was added to the 100 ul cell culture medium containing the HeLa cells and incubated at room temperature.

[1432] After 18 to 22 hours of incubation cells expressing luciferase were lysed with 100 ul of Passive Lysis Buffer (Promega, Madison, WI) according to manufacturer instructions. Aliquots of the lysates were transferred to white opaque polystyrene 96-well plates (Corning, Manassas, VA) and combined with 100 ul complete luciferase assay solution (Promega, Madison, WI). The lysate volumes were adjusted or diluted until no more than 2 mio relative light units (RLU) per well were detected for the strongest signal producing samples and the RLUs for each chemistry tested are shown in Table 139. The plate reader was a BioTek Synergy H1 (BioTek, Winooski, VT). The background signal of the plates without reagent was about 200 relative light units per well.

TABLE 139
Chemical Modifications

| Sample | RLU |
|---|---|
| Untreated | 336 |
| Unmodified Luciferase | 33980 |
| 5-methylcytosine and pseudouridine | 1601234 |
| 5-methylcytosine and N1-methyl-pseudouridine | 421189 |
| 25% cytosines replaced with 5-methylcytosine | 222114 |
| and 25% of uridines replaced with 2-thiouridine | |
| N1-methyl-pseudouridine | 3068261 |
| Pseudouridine | 140234 |
| N4-Acetylcytidine | 1073251 |
| 5-methoxyuridine | 219657 |
| 5-Bromouridine | 6787 |
| N4-Acetylcytidineand N1-methyl-pseudouridine | 976219 |
| 5-methylcytosine and 5-methoxyuridine | 66621 |
| 5-methylcytosine and 2′fluorouridine | 11333 |

### Example 91. Intramuscular and Subcutaneous Administration of Modified mRNA

[1433] Luciferase modified mRNA (mRNA sequence shown in SEQ ID NO: 33907; polyA tail of approximately 140 nucleotides not shown in sequence; 5′cap, Cap1) fully modified with 5-methylcytosine and pseudouridine (5mC/pU), fully modified with 5-methylcytosine and N1-methyl-pseudouridine (5mC/N1mpU), fully modified with pseudouridine (pU), fully modified with N1-methyl-pseudouridine (N1mpU) or modified where 25% of the cytosines replaced with 5-methylcytosine and 25% of the uridines replaced with 2-thiouridine (5mC/s2U) formulated in PBS (pH 7.4) was administered to Balb-C mice intramuscularly or subcutaneously at a dose of 2.5 mg/kg. The mice were imaged at 2 hours, 8 hours, 24 hours, 48 hours, 72 hours, 96 hours, 120 hours and 144 hours for intramuscular delivery and 2 hours, 8 hours, 24 hours, 48 hours, 72 hours, 96 hours and 120 hours for subcutaneous delivery. Twenty minutes prior to imaging, mice were injected intraperitoneally with a D-luciferin solution at 150 mg/kg. Animals were then anesthetized and images were acquired with an IVIS Lumina II imaging system (Perkin Elmer). Bioluminescence was measured as total flux (photons/second) of the entire mouse. The average total flux (photons/second) for intramuscular administration is shown in Table 140 and the average total flux (photons/second) for subcutaneous administration is shown in Table 141. The background signal was 3.79E+05 (p/s). The peak expression for intramuscular administration was seen between 24 and 48 hours for all chemistry and expression was still detected at 144 hours. For subcutaneous delivery the peak expression was seen at 2-8 hours and expression was detected at 72 hours.

TABLE 140
Intramuscular Administration

| | | 5 mC/ | 5 mC/ | | |
|---|---|---|---|---|---|
| | 5 mC/pU | N1mpU | s2U | pU | N1mpU |
| | Flux (p/s) | Flux (p/s) | Flux (p/s) | Flux (p/s) | Flux (p/s) |
| 2 hours | 1.98E+07 | 4.65E+06 | 4.68E+06 | 2.33E+06 | 3.66E+07 |
| 8 hours | 1.42E+07 | 3.64E+06 | 3.78E+06 | 8.07E+06 | 7.21E+07 |
| 24 hours | 2.92E+07 | 1.22E+07 | 3.35E+07 | 1.01E+07 | 1.75E+08 |
| 48 hours | 2.64E+07 | 1.01E+07 | 5.06E+07 | 7.46E+06 | 3.42E+08 |
| 72 hours | 2.18E+07 | 8.59E+06 | 3.42E+07 | 4.08E+06 | 5.83E+07 |
| 96 hours | 2.75E+07 | 2.70E+06 | 2.38E+07 | 4.35E+06 | 7.15E+07 |
| 120 hours | 2.19E+07 | 1.60E+06 | 1.54E+07 | 1.25E+06 | 3.87E+07 |
| 144 hours | 9.17E+06 | 2.19E+06 | 1.14E+07 | 1.86E+06 | 5.04E+07 |

TABLE 141
Subcutaneous Administration

| | | 5 mC/ | 5 mC/ | | |
|---|---|---|---|---|---|
| | 5 mC/pU | N1mpU | s2U | pU | N1mpU |
| | Flux (p/s) | Flux (p/s) | Flux (p/s) | Flux (p/s) | Flux (p/s) |
| 2 hours | 5.26E+06 | 4.54E+06 | 9.34E+06 | 2.43E+06 | 2.80E+07 |
| 8 hours | 2.32E+06 | 8.75E+05 | 8.15E+06 | 2.12E+06 | 3.09E+07 |
| 24 hours | 2.67E+06 | 5.49E+06 | 3.80E+06 | 2.24E+06 | 1.48E+07 |
| 48 hours | 1.22E+06 | 1.77E+06 | 3.07E+06 | 1.58E+06 | 1.24E+07 |
| 72 hours | 1.12E+06 | 8.00E+05 | 8.53E+05 | 4.80E+05 | 2.29E+06 |
| 96 hours | 5.16E+05 | 5.33E+05 | 4.30E+05 | 4.30E+05 | 6.62E+05 |
| 120 hours | 3.80E+05 | 4.09E+05 | 3.21E+05 | 6.82E+05 | 5.05E+05 |

### Example 92. Osmotic Pump Study

[1434] Prior to implantation, an osmotic pump (ALZET® Osmotic Pump 2001D, DURECT Corp. Cupertino, CA) is loaded with the 0.2 ml of 1×PBS (pH 7.4) (PBS loaded pump) or 0.2 ml of luciferase modified mRNA (mRNA sequence shown in SEQ ID NO: 33907; polyA tail of approximately 140 nucleotides not shown in sequence; 5′cap, Cap1; fully modified with 5-methylcytosine and N1-methylpseudouridine) at 1 mg/ml in 1×PBS (pH 7.4) (Luciferase loaded pump) and incubated overnight in 1×PBS (pH 7.4) at 37° C.

[1435] Balb-C mice (n=3) are implanted subcutaneously with either the PBS loaded pump or the luciferase loaded pump and imaged at 2 hours, 8 hours and 24 hours. As a control a PBS loaded pump is implanted subcutaneously and the mice are injected subcutaneously with luciferase modified mRNA in 1×PBS (PBS loaded pump; SC Luciferase) or an osmotic pump is not implanted and the mice are injected subcutaneously with luciferase modified mRNA in 1×PBS (SC Luciferase). The luciferase formulations are outlined in Table 142.

TABLE 142
Luciferase Formulations

| | | Conc | Inj. Vol. | Amt | Dose |
|---|---|---|---|---|---|
| Group | Vehicle | (mg/ml) | (ul) | (ug) | (mg/kg) |
| PBS loaded pump; SC | PBS | 1.00 | 50 | 50 | 2.5 |
| Luciferase | | | | | |
| Luciferase loaded pump | PBS | 1.00 | — | 200 | 10.0 |
| PBS loaded pump | PBS | — | — | — | — |
| SC Luciferase | PBS | 1.00 | 50 | 50 | 2.5 |

### Example 93. External Osmotic Pump Study

[1436] An external osmotic pump (ALZET® Osmotic Pump 2001D, DURECT Corp. Cupertino, CA) is loaded with the 0.2 ml of 1×PBS (pH 7.4) (PBS loaded pump) or 0.2 ml of luciferase modified mRNA (mRNA sequence shown in SEQ ID NO: 33907; polyA tail of approximately 140 nucleotides not shown in sequence; 5′cap, Cap1; fully modified with 5-methylcytosine and N1-methylpseudouridine) at 1 mg/ml in 1×PBS (pH 7.4) (luciferase loaded pump) and incubated overnight in 1×PBS (pH 7.4) at 37° C.

[1437] Using a catheter connected to the external PBS loaded pump or the luciferase loaded pump Balb-C mice (n=3) are administered the formulation. The mice are imaged at 2 hours, 8 hours and 24 hours. As a control an external PBS loaded pump is used and the mice are injected subcutaneously with luciferase modified mRNA in 1×PBS (PBS loaded pump; SC Luciferase) or the external pump is not used and the mice are only injected subcutaneously with luciferase modified mRNA in 1×PBS (SC Luciferase). Twenty minutes prior to imaging, mice are injected intraperitoneally with a D-luciferin solution at 150 mg/kg. Animals are then anesthetized and images are acquired with an IVIS Lumina II imaging system (Perkin Elmer). Bioluminescence is measured as total flux (photons/second) of the entire mouse. The luciferase formulations are outlined in Table 143 and the average total flux (photons/second).

TABLE 143
Luciferase Formulations

| | | Conc | Inj. Vol. | Amt | Dose |
|---|---|---|---|---|---|
| Group | Vehicle | (mg/ml) | (ul) | (ug) | (mg/kg) |
| PBS loaded pump; SC | PBS | 1.00 | 50 | 50 | 2.5 |
| Luciferase | | | | | |
| Luciferase loaded pump | PBS | 1.00 | — | 200 | 10.0 |
| PBS loaded pump | PBS | — | — | — | — |
| SC Luciferase | PBS | 1.00 | 50 | 50 | 2.5 |

### Example 94. Fibrin Sealant Study

[1438] Fibrin sealant, such as Tisseel (Baxter Healthcare Corp., Deerfield, IL), is composed of fibrinogen and thrombin in a dual-barreled syringe. Upon mixing, fibrinogen is converted to fibrin to form a fibrin clot in about 10 to 30 seconds. This clot can mimic the natural clotting mechanism of the body. Additionally a fibrin hydrogel is a three dimensional structure that can potentially be used in sustained release delivery. Currently, fibrin sealant is approved for application in hemostasis and sealing to replace conventional surgical techniques such as suture, ligature and cautery.

[1439] The thrombin and fibrinogen components were loaded separately into a dual barreled syringe. Balb-C mice (n=3) were injected subcutaneously with 50 ul of fibrinogen, 50 ul of thrombin and they were also injected at the same site with modified luciferase mRNA (mRNA sequence shown in SEQ ID NO: 33907; polyA tail of approximately 140 nucleotides not shown in sequence; 5′cap, Cap1; fully modified with 5-methylcytosine and N1-methylpseudouridine) (Tisseel+Luciferase), 50 ul of fibrinogen and 50 ul thrombin (Tisseel) or modified luciferase mRNA (Luciferase). The injection of fibrinogen and thrombin was done simultaneously using the dual-barreled syringe. The SC injection of luciferase was done 15 minutes after the fibrinogen/thrombin injection to allow the fibrin hydrogel to polymerize (Tisseel+Luciferase group). A control group of untreated mice were also evaluated. The mice were imaged at 5 hours and 24 hours. Twenty minutes prior to imaging, mice were injected intraperitoneally with a D-luciferin solution at 150 mg/kg. Animals were then anesthetized and images were acquired with an IVIS Lumina II imaging system (Perkin Elmer). Bioluminescence was measured as total flux (photons/second) of the entire mouse. The luciferase formulations are outlined in Table 144 and the average total flux (photons/second) is shown in Table 145. The fibrin sealant was found to not interfere with imaging and the injection of luciferase and Tisseel showed expression of luciferase.

TABLE 144
Luciferase Formulations

| | | Conc | Inj. Vol. | Amt | Dose |
|---|---|---|---|---|---|
| Group | Vehicle | (mg/ml) | (ul) | (ug) | (mg/kg) |
| Tisseel + Luciferase | PBS | 1.00 | 50 | 50 | 2.5 |
| Tisseel | — | — | — | — | — |
| Luciferase | PBS | 1.00 | 50 | 50 | 2.5 |
| Untreated | — | — | — | — | — |

TABLE 145
Total Flux

| | 5 Hours | 24 Hours |
|---|---|---|
| Group | Flux (p/s) | Flux (p/s) |
| Tisseel + Luciferase | 4.59E+05 | 3.39E+05 |
| Tisseel | 1.99E+06 | 1.06E+06 |
| Luciferase | 9.94E+05 | 7.44E+05 |
| Untreated | 3.90E+05 | 3.79E+05 |

### Example 95. Fibrin Containing mRNA Sealant Study

A. Modified mRNA and Calcium Chloride

[1440] Prior to reconstitution, luciferase mRNA (mRNA sequence shown in SEQ ID NO: 33907; polyA tail of approximately 140 nucleotides not shown in sequence; 5′cap, Cap1) fully modified with 5-methylcytosine and N1-methyl-pseudouridine or fully modified with N1-methylpseudouridine is added to calcium chloride. The calcium chloride is then used to reconstitute thrombin. Fibrinogen is reconstituted with fibrinolysis inhibitor solution per the manufacturer's instructions. The reconstituted thrombin containing modified mRNA and fibrinogen is loaded into a dual barreled syringe. Mice are injected subcutaneously with 50 ul of fibrinogen and 50 ul of thrombin containing modified mRNA or they were injected with 50 ul of PBS containing an equivalent dose of modified luciferase mRNA. A control group of untreated mice is also evaluated. The mice are imaged at predetermined intervals to determine the average total flux (photons/second).

B. Lipid Nanoparticle Formulated Modified mRNA and Calcium Chloride

[1441] Prior to reconstitution, luciferase mRNA (mRNA sequence shown in SEQ ID NO: 33907; polyA tail of approximately 140 nucleotides not shown in sequence; 5′cap, Cap1) fully modified with 5-methylcytosine and N1-methyl-pseudouridine or fully modified with N1-methylpseudouridine is formulated in a lipid nanoparticle is added to calcium chloride. The calcium chloride is then used to reconstitute thrombin. Fibrinogen is reconstituted with fibrinolysis inhibitor solution per the manufacturer's instructions. The reconstituted thrombin containing modified mRNA and fibrinogen is loaded into a dual barreled syringe. Mice are injected subcutaneously with 50 ul of fibrinogen and 50 ul of thrombin containing modified mRNA or they were injected with 50 ul of PBS containing an equivalent dose of modified luciferase mRNA. A control group of untreated mice is also evaluated. The mice are imaged at predetermined intervals to determine the average total flux (photons/second).

C. Modified mRNA and Fibrinogen

[1442] Prior to reconstitution, luciferase mRNA (mRNA sequence shown in SEQ ID NO: 33907; polyA tail of approximately 140 nucleotides not shown in sequence; 5′cap, Cap1) fully modified with 5-methylcytosine and N1-methyl-pseudouridine or fully modified with N1-methylpseudouridine is added to the fibrinolysis inhibitor solution. The fibrinolysis inhibitor solution is then used to reconstitute fibrinogen. Thrombin is reconstituted with the calcium chloride solution per the manufacturer's instructions. The reconstituted fibrinogen containing modified mRNA and thrombin is loaded into a dual barreled syringe. Mice are injected subcutaneously with 50 ul of thrombin and 50 ul of fibrinogen containing modified mRNA or they were injected with 50 ul of PBS containing an equivalent dose of modified luciferase mRNA. A control group of untreated mice is also evaluated. The mice are imaged at predetermined intervals to determine the average total flux (photons/second).

D. Lipid Nanoparticle Formulated Modified mRNA and Fibrinogen

[1443] Prior to reconstitution, luciferase mRNA (mRNA sequence shown in SEQ ID NO: 33907; polyA tail of approximately 140 nucleotides not shown in sequence; 5′cap, Cap1) fully modified with 5-methylcytosine and N1-methyl-pseudouridine or fully modified with N1-methylpseudouridine is formulated in a lipid nanoparticle is added to the fibrinolysis inhibitor solution. The fibrinolysis inhibitor solution is then used to reconstitute fibrinogen. Thrombin is reconstituted with the calcium chloride solution per the manufacturer's instructions. The reconstituted fibrinogen containing modified mRNA and thrombin is loaded into a dual barreled syringe. Mice are injected subcutaneously with 50 ul of thrombin and 50 ul of fibrinogen containing modified mRNA or they were injected with 50 ul of PBS containing an equivalent dose of modified luciferase mRNA. A control group of untreated mice is also evaluated. The mice are imaged at predetermined intervals to determine the average total flux (photons/second).

E. Modified mRNA and Thrombin

[1444] Prior to reconstitution, luciferase mRNA (mRNA sequence shown in SEQ ID NO: 33907; polyA tail of approximately 140 nucleotides not shown in sequence; 5′cap, Cap1) fully modified with 5-methylcytosine and N1-methyl-pseudouridine or fully modified with N1-methylpseudouridine is added to the reconstituted thrombin after it is reconstituted with the calcium chloride per the manufacturer's instructions. The fibrinolysis inhibitor solution is then used to reconstitute fibrinogen per the manufacturer's instructions. The reconstituted fibrinogen and thrombin containing modified mRNA is loaded into a dual barreled syringe. Mice are injected subcutaneously with 50 ul of thrombin containing modified mRNA and 50 ul of fibrinogen or they were injected with 50 ul of PBS containing an equivalent dose of modified luciferase mRNA. A control group of untreated mice is also evaluated. The mice are imaged at predetermined intervals to determine the average total flux (photons/second).

F. Lipid Nanoparticle Formulated Modified mRNA and Thrombin

[1445] Prior to reconstitution, luciferase mRNA (mRNA sequence shown in SEQ ID NO: 33907; polyA tail of approximately 140 nucleotides not shown in sequence; 5′cap, Cap1) fully modified with 5-methylcytosine and N1-methylpseudouridine or fully modified with N1-methyl-pseudouridine is formulated in a lipid nanoparticle is added to the reconstituted thrombin after it is reconstituted with the calcium chloride per the manufacturer's instructions. The fibrinolysis inhibitor solution is then used to reconstitute fibrinogen per the manufacturer's instructions. The reconstituted fibrinogen and thrombin containing modified mRNA is loaded into a dual barreled syringe. Mice are injected subcutaneously with 50 ul of thrombin containing modified mRNA and 50 ul of fibrinogen or they were injected with 50 ul of PBS containing an equivalent dose of modified luciferase mRNA. A control group of untreated mice is also evaluated. The mice are imaged at predetermined intervals to determine the average total flux (photons/second).

### Example 96. Cationic Lipid Formulation of 5-Methylcytosine and N1-Methyl-Pseudouridine Modified mRNA

[1446] Luciferase mRNA (mRNA sequence shown in SEQ ID NO: 33907; polyA tail of approximately 140 nucleotides not shown in sequence; 5′cap, Cap1) fully modified with 5-methylcytosine and N1-methyl-pseudouridine was formulated in the cationic lipids described in Table 146. The formulations were administered intravenously (I.V.), intramuscularly (I.M.) or subcutaneously (S.C.) to Balb-C mice at a dose of 0.05 mg/kg.

TABLE 146
Cationic Lipid Formulations

| Formulation | NPA-126-1 | NPA-127-1 | NPA-128-1 | NPA-129-1 | 111612-B |
|---|---|---|---|---|---|
| Lipid | DLin-MC3- | DLin-KC2- | C12-200 | DLinDMA | DODMA |
| | DMA | DMA | | | |
| Lipid/mRNA | 20:1 | 20:1 | 20:1 | 20:1 | 20:1 |
| ratio (wt/wt) | | | | | |
| Mean Size | 122 nm | 114 nm | 153 nm | 137 nm | 223.2 nm |
| | PDI: 0.13 | PDI: 0.10 | PDI: 0.17 | PDI: 0.09 | PDI: 0.142 |
| Zeta at pH 7.4 | −1.4 mV | −0.5 mV | −1.4 mV | 2.0 mV | −3.09 mV |
| Encaps. | 95% | 77% | 69% | 80% | 64% |
| (RiboGr) | | | | | |

[1447] Twenty minutes prior to imaging, mice were injected intraperitoneally with a D-luciferin solution at 150 mg/kg. Animals were then anesthetized and images were acquired with an IVIS Lumina II imaging system (Perkin Elmer). Bioluminescence was measured as total flux (photons/second) of the entire mouse. The mice were imaged at 2 hours, 8 hours and 24 hours after dosing and the average total flux (photons/second) was measured for each route of administration and cationic lipid formulation. The background flux was about 4.17E+05 p/s. The results of the imaging are shown in Table 147. In Table 147, “NT” means not tested.

TABLE 147
Flux

| | | DLin- | DLin- | | | |
|---|---|---|---|---|---|---|
| | | MC3- | KC2- | | | |
| | Time | DMA | DMA | C12-200 | DLinDMA | DODMA |
| Route | Point | Flux (p/s) | Flux (p/s) | Flux (p/s) | Flux (p/s) | Flux (p/s) |
| I.V. | 2 hrs | 1.92E+08 | 2.91E+08 | 1.08E+08 | 2.53E+07 | 8.40E+06 |
| I.V. | 8 hrs | 1.47E+08 | 2.13E+08 | 3.72E+07 | 3.82E+07 | 5.62E+06 |
| I.V. | 24 hrs | 1.32E+07 | 2.41E+07 | 5.35E+06 | 4.20E+06 | 8.97E+05 |
| I.M. | 2 hrs | 8.29E+06 | 2.37E+07 | 1.80E+07 | 1.51E+06 | NT |
| I.M. | 8 hrs | 5.83E+07 | 2.12E+08 | 2.60E+07 | 1.99E+07 | NT |
| I.M. | 24 hrs | 4.30E+06 | 2.64E+07 | 3.01E+06 | 9.46E+05 | NT |
| S.C. | 2 hrs | 1.90E+07 | 5.16E+07 | 8.91E+07 | 4.66E+06 | 9.61E+06 |
| S.C. | 8 hrs | 7.74E+07 | 2.00E+08 | 4.58E+07 | 9.67E+07 | 1.90E+07 |
| S.C. | 24 hrs | 7.49E+07 | 2.47E+07 | 6.96E+06 | 6.50E+06 | 1.28E+06 |

### Example 97. Lipid Nanoparticle Intravenous Study

[1448] Luciferase mRNA (mRNA sequence shown in SEQ ID NO: 33907; polyA tail of approximately 160 nucleotides not shown in sequence; 5′cap, Cap1; fully modified with 5-methylcytosine and pseudouridine) was formulated in a lipid nanoparticle containing 50% DLin-MC3-DMA OR DLin-KC2-DMA as described in Table 148, 38.5% cholesterol, 10% DSPC and 1.5% PEG. The formulation was administered intravenously (I.V.) to Balb-C mice at a dose of 0.5 mg/kg, 0.05 mg/kg, 0.005 mg/kg or 0.0005 mg/kg. Twenty minutes prior to imaging, mice were injected intraperitoneally with a D-luciferin solution at 150 mg/kg. Animals were then anesthetized and images were acquired with an IVIS Lumina II imaging system (Perkin Elmer). Bioluminescence was measured as total flux (photons/second) of the entire mouse.

TABLE 148
Formulations

| Formulation | NPA-098-1 | | NPA-100-1 | |
|---|---|---|---|---|
| Lipid | DLin-KC2-DMA | | DLin-MC3-DMA | |
| Lipid/mRNA | 20:1 | | 20:1 | |
| ratio (wt/wt) | | | | |
| Mean Size | 135 | nm | 152 | nm |
| | PDI: 0.08 | | PDI: 0.08 | |
| Zeta at pH 7.4 | −0.6 | mV | −1.2 | mV |

| | | |
|---|---|---|
| Encaps. (RiboGr) | 91% | 94% |

[1449] For DLin-KC2-DMA the mice were imaged at 2 hours, 8 hours, 24 hours, 72 hours, 96 hours and 168 hours after dosing and the average total flux (photons/second) was measured for each route of administration and cationic lipid formulation. The background flux was about 3.66E+05 p/s. The results of the imaging are shown in Table 149. Organs were imaged at 8 hours and the average total flux (photons/second) was measured for the liver, spleen, lung and kidney. A control for each organ was also analyzed. The results are shown in Table 150. The peak signal for all dose levels was at 8 hours after administration. Also, distribution to the various organs (liver, spleen, lung, and kidney) may be able to be controlled by increasing or decreasing the LNP dose.

TABLE 149
Flux

| | | 0.5 mg/kg | 0.05 mg/kg | 0.005 mg/kg | 0.0005 mg/kg |
|---|---|---|---|---|---|
| Time Point | | Flux (p/s) | Flux (p/s) | Flux (p/s) | Flux (p/s) |
| 2 | hrs | 3.54E+08 | 1.75E+07 | 2.30E+06 | 4.09E+05 |
| 8 | hrs | 1.67E+09 | 1.71E+08 | 9.81E+06 | 7.84E+05 |
| 24 | hrs | 2.05E+08 | 2.67E+07 | 2.49E+06 | 5.51E+05 |
| 72 | hrs | 8.17E+07 | 1.43E+07 | 1.01E+06 | 3.75E+05 |
| 96 | hrs | 4.10E+07 | 9.15E+06 | 9.58E+05 | 4.29E+05 |
| 168 | hrs | 3.42E+07 | 9.15E+06 | 1.47E+06 | 5.29E+05 |

TABLE 150
Organ Flux

| | | Liver | Spleen | Lung | Kidney |
|---|---|---|---|---|---|
| | | Flux (p/s) | Flux (p/s) | Flux (p/s) | Flux (p/s) |
| 0.5 | mg/kg | 1.42E+08 | 4.86E+07 | 1.90E+05 | 3.20E+05 |
| 0.05 | mg/kg | 7.45E+06 | 4.62E+05 | 6.86E+04 | 9.11E+04 |
| 0.005 | mg/kg | 3.32E+05 | 2.97E+04 | 1.42E+04 | 1.15E+04 |
| 0.0005 | mg/kg | 2.34E+04 | 1.08E+04 | 1.87E+04 | 9.78E+03 |

| | | | | |
|---|---|---|---|---|
| Untreated | 1.88E+04 | 1.02E+04 | 1.41E+04 | 9.20E+03 |

[1450] For DLin-MC3-DMA the mice were imaged at 2 hours, 8 hours, 24 hours, 48 hours, 72 hours and 144 hours after dosing and the average total flux (photons/second) was measured for each route of administration and cationic lipid formulation. The background flux was about 4.51E+05 p/s. The results of the imaging are shown in Table 151. Organs were imaged at 8 hours and the average total flux (photons/second) was measured for the liver, spleen, lung and kidney. A control for each organ was also analyzed. The results are shown in Table 152. The peak signal for all dose levels was at 8 hours after administration. Also, distribution to the various organs (liver, spleen, lung, and kidney) may be able to be controlled by increasing or decreasing the LNP dose.

TABLE 151
Flux

| | | 0.5 mg/kg | 0.05 mg/kg | 0.005 mg/kg | 0.0005 mg/kg |
|---|---|---|---|---|---|
| Time Point | | Flux (p/s) | Flux (p/s) | Flux (p/s) | Flux (p/s) |
| 2 | hrs | 1.23E+08 | 7.76E+06 | 7.66E+05 | 4.88E+05 |
| 8 | hrs | 1.05E+09 | 6.79E+07 | 2.75E+06 | 5.61E+05 |
| 24 | hrs | 4.44E+07 | 1.00E+07 | 1.06E+06 | 5.71E+05 |
| 48 | hrs | 2.12E+07 | 4.27E+06 | 7.42E+05 | 4.84E+05 |
| 72 | hrs | 1.34E+07 | 5.84E+06 | 6.90E+05 | 4.38E+05 |
| 144 | hrs | 4.26E+06 | 2.25E+06 | 4.58E+05 | 3.99E+05 |

TABLE 152
Organ Flux

| | | Liver | Spleen | Lung | Kidney |
|---|---|---|---|---|---|
| | | Flux (p/s) | Flux (p/s) | Flux (p/s) | Flux (p/s) |
| 0.5 | mg/kg | 1.19E+08 | 9.66E+07 | 1.19E+06 | 1.85E+05 |
| 0.05 | mg/kg | 1.10E+07 | 1.79E+06 | 7.23E+04 | 5.82E+04 |
| 0.005 | mg/kg | 3.58E+05 | 6.04E+04 | 1.33E+04 | 1.33E+04 |
| 0.0005 | mg/kg | 2.25E+04 | 1.88E+04 | 2.05E+04 | 1.65E+04 |

| | | | | |
|---|---|---|---|---|
| Untreated | 1.91E+04 | 1.66E+04 | 2.63E+04 | 2.14E+04 |

### Example 98. Lipid Nanoparticle Subcutaneous Study

[1451] Luciferase mRNA (mRNA sequence shown in SEQ ID NO: 33907; polyA tail of approximately 160 nucleotides not shown in sequence; 5′cap, Cap1; fully modified with 5-methylcytosine and pseudouridine) was formulated in a lipid nanoparticle containing 50% DLin-KC2-DMA as described in Table 153, 385% cholesterol, 10% DSPC and 1.5% PEG. The formulation was administered subcutaneously (S.C.) to Balb-C mice at a dose of 0.5 mg/kg, 0.05 mg/kg or 0.005 mg/kg.

TABLE 153
DLin-KC2-DMA Formulation

| Formulation | NPA-098-1 | |
|---|---|---|
| Lipid | DLin-KC2-DMA | |
| Lipid/mRNA ratio (wt/wt) | 20:1 | |
| Mean Size | 135 | nm |
| | PDI: 0.08 | |
| Zeta at pH 7.4 | −0.6 | mV |

| | |
|---|---|
| Encaps. (RiboGr) | 91% |

[1452] Twenty minutes prior to imaging, mice were injected intraperitoneally with a D-luciferin solution at 150 mg/kg. Animals were then anesthetized and images were acquired with an IVIS Lumina II imaging system (Perkin Elmer). Bioluminescence was measured as total flux (photons/second) of the entire mouse. The mice were imaged at 2 hours, 8 hours, 24 hours, 48 hours, 72 hours and 144 hours after dosing and the average total flux (photons/second) was measured for each route of administration and cationic lipid formulation. The lower limit of detection was about 3E+05 p/s. The results of the imaging are shown in Table 154. Organs were imaged at 8 hours and the average total flux (photons/second) was measured for the liver, spleen, lung and kidney. A control for each organ was also analyzed. The results are shown in Table 155. The peak signal for all dose levels was at 8 hours after administration. Also, distribution to the various organs (liver, spleen, lung, and kidney) may be able to be controlled by increasing or decreasing the LNP dose. At high doses, the LNP formulations migrates outside of the subcutaneous injection site, as high levels of luciferase expression are detected in the liver, spleen, lung, and kidney.

TABLE 154
Flux

| | | 0.5 mg/kg | 0.05 mg/kg | 0.005 mg/kg |
|---|---|---|---|---|
| Time Point | | Flux (p/s) | Flux (p/s) | Flux (p/s) |
| 2 | hrs | 3.18E+07 | 7.46E+06 | 8.94E+05 |
| 8 | hrs | 5.15E+08 | 2.18E+08 | 1.34E+07 |
| 24 | hrs | 1.56E+08 | 5.30E+07 | 7.16E+06 |
| 48 | hrs | 5.22E+07 | 8.75E+06 | 9.06E+05 |
| 72 | hrs | 8.87E+06 | 1.50E+06 | 2.98E+05 |
| 144 | hrs | 4.55E+05 | 3.51E+05 | 2.87E+05 |

TABLE 155
Organ Flux

| | | Liver | Spleen | Lung | Kidney |
|---|---|---|---|---|---|
| | | Flux (p/s) | Flux (p/s) | Flux (p/s) | Flux (p/s) |
| 0.5 | mg/kg | 1.01E+07 | 7.43E+05 | 9.75E+04 | 1.75E+05 |
| 0.05 | mg/kg | 1.61E+05 | 3.94E+04 | 4.04E+04 | 3.29E+04 |
| 0.005 | mg/kg | 2.84E+04 | 2.94E+04 | 2.42E+04 | 9.79E+04 |

| | | | | |
|---|---|---|---|---|
| Untreated | 1.88E+04 | 1.02E+04 | 1.41E+04 | 9.20E+03 |

### Example 99. Cationic Lipid Nanoparticle Subcutaneous Study

[1453] Luciferase mRNA (mRNA sequence shown in SEQ ID NO: 33907; polyA tail of approximately 160 nucleotides not shown in sequence; 5′cap, Cap1; fully modified with 5-methylcytosine and pseudouridine) is formulated in a lipid nanoparticle containing 50% DLin-MC3-DMA, 38.5% cholesterol, 10% DSPC and 1.5% PEG. The formulation is administered subcutaneously (S.C.) to Balb-C mice at a dose of 0.5 mg/kg, 0.05 mg/kg or 0.005 mg/kg.

[1454] The mice are imaged at 2 hours, 8 hours, 24 hours, 48 hours, 72 hours and 144 hours after dosing and the average total flux (photons/second) was measured for each route of administration and cationic lipid formulation. Organs are imaged at 8 hours and the average total flux (photons/second) is measured for the liver, spleen, lung and kidney. A control for each organ is also analyzed.

### Example 100. Luciferase Lipoplex Study

[1455] Lipoplexed luciferase mRNA (mRNA sequence shown in SEQ ID NO: 33907; polyA tail of approximately 140 nucleotides not shown in sequence; 5′cap, Cap1) fully modified with 5-methylcytosine and pseudouridine (5mC/pU), fully modified with 5-methylcytosine and N1-methyl-pseudouridine (5mC/NlmpU) or modified where 25% of the cytosines replaced with 5-methylcytosine and 25% of the uridines replaced with 2-thiouridine (5mC/s2U). The formulation was administered intravenously (I.V.), intramuscularly (I.M.) or subcutaneously (S.C.) to Balb-C mice at a dose of 0.10 mg/kg.

[1456] Twenty minutes prior to imaging, mice were injected intraperitoneally with a D-luciferin solution at 150 mg/kg. Animals were then anesthetized and images were acquired with an IVIS Lumina II imaging system (Perkin Elmer). Bioluminescence was measured as total flux (photons/second) of the entire mouse. The mice were imaged at 8 hours, 24 hours and 48 hours after dosing and the average total flux (photons/second) was measured for each route of administration and chemical modification. The background signal was about 3.91E+05 p/s. The results of the imaging are shown in Table 156. Organs were imaged at 6 hours and the average total flux (photons/second) was measured for the liver, spleen, lung and kidney. A control for each organ was also analyzed. The results are shown in Table 157.

TABLE 156
Flux

| | | | 5mC/pU | 5mC/N1mpU | 5mC/s2U |
|---|---|---|---|---|---|
| Route | Time Point | | Flux (p/s) | Flux (p/s) | Flux (p/s) |
| I.V. | 8 | hrs | 5.76E+06 | 1.78E+06 | 1.88E+06 |
| I.V. | 24 | hrs | 1.02E+06 | 7.13E+05 | 5.28E+05 |
| I.V. | 48 | hrs | 4.53E+05 | 3.76E+05 | 4.14E+05 |
| I.M. | 8 | hrs | 1.90E+06 | 2.53E+06 | 1.29E+06 |
| I.M. | 24 | hrs | 9.33E+05 | 7.84E+05 | 6.48E+05 |
| I.M. | 48 | hrs | 8.51E+05 | 6.59E+05 | 5.49E+05 |
| S.C. | 8 | hrs | 2.85E+06 | 6.48E+06 | 1.14E+06 |
| S.C. | 24 | hrs | 6.66E+05 | 7.15E+06 | 3.93E+05 |
| S.C. | 48 | hrs | 3.24E+05 | 3.20E+06 | 5.45E+05 |

TABLE 157
Organ Flux

| | | Liver Flux | Spleen Flux | Lung Flux | Kidney Flux | Inj. Site Flux |
|---|---|---|---|---|---|---|
| Route | Chemistry | (p/s) | (p/s) | (p/s) | (p/s) | (p/s) |
| I.V. | 5 mC/pU | 5.26E+05 | 2.04E+07 | 4.28E+06 | 1.77E+04 | n/a |
| I.V. | 5 mC/N1mpU | 1.48E+05 | 5.00E+06 | 1.93E+06 | 1.77E+04 | n/a |
| I.V. | 5 mC/s2U | 2.14E+04 | 3.29E+06 | 5.48E+05 | 2.16E+04 | n/a |
| I.M. | 5 mC/pU | 2.46E+04 | 1.38E+04 | 1.50E+04 | 1.44E+04 | 1.15E+06 |
| I.M. | 5 mC/N1mpU | 1.72E+04 | 1.76E+04 | 1.99E+04 | 1.56E+04 | 1.20E+06 |
| I.M. | 5 mC/s2U | 1.28E+04 | 1.36E+04 | 1.33E+04 | 1.07E+04 | 7.60E+05 |
| S.C. | 5 mC/pU | 1.55E+04 | 1.67E+04 | 1.45E+04 | 1.69E+04 | 4.46E+04 |
| S.C. | 5 mC/N1mpU | 1.20E+04 | 1.46E+04 | 1.38E+04 | 1.14E+04 | 8.29E+04 |
| S.C. | 5 mC/s2U | 1.22E+04 | 1.31E+04 | 1.45E+04 | 1.08E+04 | 5.62E+04 |
| | Untreated | 2.59E+04 | 1.34E+04 | 1.26E+04 | 1.22E+04 | n/a |

### Example 101. Cationic Lipid Formulation of Modified mRNA

[1457] Luciferase mRNA (mRNA sequence shown in SEQ ID NO: 33907; polyA tail of approximately 140 nucleotides not shown in sequence; 5′cap, Cap1) modified where 25% of the cytosines replaced with 5-methylcytosine and 25% of the uridines replaced with 2-thiouridine (5mC/s2U) was formulated in the cationic lipids described in Table 158. The formulations were administered intravenously (I.V.), intramuscularly (I.M.) or subcutaneously (S.C.) to Balb-C mice at a dose of 0.05 mg/kg.

TABLE 158
Cationic Lipid Formulations

| Formulation | NPA-130-1 | | NPA-131-1 | | NPA-132-1 | | NPA-133-1 | | 111612-C | |
|---|---|---|---|---|---|---|---|---|---|---|
| Lipid | DLin-MC3- | | DLin-KC2- | | C12-200 | | DLinDMA | | DODMA | |
| | DMA | | DMA | | | | | | | |
| Lipid/mRNA | 20:1 | | 20:1 | | 20:1 | | 20:1 | | 20:1 | |
| ratio (wt/wt) | | | | | | | | | | |
| Mean Size | 120 | nm | 105 | nm | 122 | nm | 105 | nm | 221.3 | nm |
| | PDI: 0.10 | | PDI: 0.11 | | PDI: 0.13 | | PDI: 0.14 | | PDI: 0.063 | |
| Zeta at pH 7.4 | 0.2 | mV | −0.6 | mV | −0.5 | mV | −0.3 | mV | −3.10 | mV |

| | | | | | |
|---|---|---|---|---|---|
| Encaps. | 100% | 100% | 93% | 93% | 60% |
| (RiboGr) | | | | | |

[1458] Twenty minutes prior to imaging, mice were injected intraperitoneally with a D-luciferin solution at 150 mg/kg. Animals were then anesthetized and images were acquired with an IVIS Lumina II imaging system (Perkin Elmer). Bioluminescence was measured as total flux (photons/second) of the entire mouse. The mice were imaged at 2 hours, 8 hours and 24 hours after dosing and the average total flux (photons/second) was measured for each route of administration and cationic lipid formulation. The background flux was about 3.31E+05 p/s. The results of the imaging are shown in Table 159. In Table 159, “NT” means not tested. Untreated mice showed an average flux of 3.14E+05 at 2 hours, 3.33E+05 at 8 hours and 3.46E+05 at 24 hours. Peak expression was seen for all three routes tested at 8 hours. DLin-KC2-DMA has better expression than DLin-MC3-DMA and DODMA showed expression for all routes evaluated.

TABLE 159
Flux

| | | DLin- | DLin- | | | |
|---|---|---|---|---|---|---|
| | | MC3- | KC2- | | | |
| | Time | DMA | DMA | C12-200 | DLinDMA | DODMA |
| Route | Point | Flux (p/s) | Flux (p/s) | Flux (p/s) | Flux (p/s) | Flux (p/s) |
| I.V. | 2 hrs | 9.88E+06 | 6.98E+07 | 9.18E+06 | 3.98E+06 | 5.79E+06 |
| I.V. | 8 hrs | 1.21E+07 | 1.23E+08 | 1.02E+07 | 5.98E+06 | 6.14E+06 |
| I.V. | 24 hrs | 2.02E+06 | 1.05E+07 | 1.25E+06 | 1.35E+06 | 5.72E+05 |
| I.M. | 2 hrs | 6.72E+05 | 3.66E+06 | 3.25E+06 | 7.34E+05 | 4.42E+05 |
| I.M. | 8 hrs | 7.78E+06 | 2.85E+07 | 4.29E+06 | 2.22E+06 | 1.38E+05 |
| I.M. | 24 hrs | 4.22E+05 | 8.79E+05 | 5.95E+05 | 8.48E+05 | 4.80E+05 |
| S.C. | 2 hrs | 2.37E+06 | 4.77E+06 | 4.44E+06 | 1.07E+06 | 1.05E+06 |
| S.C. | 8 hrs | 3.65E+07 | 1.17E+08 | 3.71E+06 | 9.33E+06 | 2.57E+06 |
| S.C. | 24 hrs | 4.47E+06 | 1.28E+07 | 6.39E+05 | 8.89E+05 | 4.27E+05 |

### Example 102. Formulation of 5-Methylcytosine and N1-Methyl-pseudouridine Modified mRNA

[1459] Luciferase mRNA (mRNA sequence shown in SEQ ID NO: 33907; polyA tail of approximately 140 nucleotides not shown in sequence; 5′cap, Cap1) fully modified with 5-methylcytosine and N1-methyl-pseudouridine was formulated in PBS (pH of 7.4). The formulations were administered intramuscularly (I.M.) or subcutaneously (S.C.) to Balb-C mice at a dose of 2.5 mg/kg.

[1460] Twenty minutes prior to imaging, mice were injected intraperitoneally with a D-luciferin solution at 150 mg/kg. Animals were then anesthetized and images were acquired with an IVIS Lumina II imaging system (Perkin Elmer). Bioluminescence was measured as total flux (photons/second) of the entire mouse. The mice were imaged at 5 minutes, 30 minutes, 60 minutes and 120 minutes after dosing and the average total flux (photons/second) was measured for each route of administration and cationic lipid formulation. The background flux was about 3.78E+05 p/s. The results of the imaging are shown in Table 160. Expression of luciferase was already seen at 30 minutes with both routes of delivery. Peak expression from subcutaneous administration appears between 30 to 60 minutes. Intramuscular expression was still increasing at 120 minutes.

TABLE 160
Flux

| | | |
|---|---|---|
| | | PBS (pH 7.4) |
| Route | Time Point | Flux (p/s) |

| | | | |
|---|---|---|---|
| I.M. | 5 | min | 4.38E+05 |
| I.M. | 30 | min | 1.09E+06 |
| I.M. | 60 | min | 1.18E+06 |
| I.M. | 120 | min | 2.86E+06 |
| S.C. | 5 | min | 4.19E+05 |
| S.C. | 30 | min | 6.38E+06 |
| S.C. | 60 | min | 5.61E+06 |
| S.C. | 120 | min | 2.66E+06 |

### Example 103. Intramuscular and Subcutaneous Administration of Chemically Modified mRNA

[1461] Luciferase modified mRNA (mRNA sequence shown in SEQ ID NO: 33907; polyA tail of approximately 140 nucleotides not shown in sequence; 5′cap, Cap1) fully modified with N4-acetylcytidine, fully modified with 5-methoxyuridine, fully modified with N4-acetylcytidine and N1-methyl-pseudouridine or fully modified 5-methylcytosine and 5-methoxyuridine formulated in PBS (pH 7.4) was administered to Balb-C mice intramuscularly or subcutaneously at a dose of 2.5 mg/kg. Twenty minutes prior to imaging, mice were injected intraperitoneally with a D-luciferin solution at 150 mg/kg. Animals were then anesthetized and images were acquired with an IVIS Lumina II imaging system (Perkin Elmer). Bioluminescence was measured as total flux (photons/second) of the entire mouse. The mice were imaged at 2 hours, 8 hours and 24 hours. The average total flux (photons/second) for intramuscular administration is shown in Table 161 and the average total flux (photons/second) for subcutaneous administration is shown in Table 162. The background signal was 3.84E+05 (p/s). The peak expression for intramuscular administration was seen between 24 and 48 hours for all chemistry and expression was still detected at 120 hours. For subcutaneous delivery the peak expression was seen at 2-8 hours and expression was detected at 72 hours.

TABLE 161
Intramuscular Administration

| | 2 hours | 8 hours | 24 hours |
|---|---|---|---|
| | Flux (p/s) | Flux (p/s) | Flux (p/s) |
| N4-acetylcytidine | 1.32E+07 | 2.15E+07 | 4.01E+07 |
| 5-methoxyuridine | 4.93E+06 | 1.80E+07 | 4.53E+07 |
| N4-acetylcytidine/ | 2.02E+07 | 1.93E+07 | 1.63E+08 |
| N1-methylpseudouridine | | | |
| 5-methylcytosine/5- | 6.79E+06 | 4.55E+07 | 3.44E+07 |
| methoxyuridine | | | |

TABLE 162
Subcutaneous Administration

| | 2 hours | 8 hours | 24 hours |
|---|---|---|---|
| | Flux (p/s) | Flux (p/s) | Flux (p/s) |
| N4-acetylcytidine | 3.07E+07 | 1.23E+07 | 1.28E+07 |
| 5-methoxyuridine | 7.10E+06 | 9.38E+06 | 1.32E+07 |
| N4-acetylcytidine/ | 7.12E+06 | 3.07E+06 | 1.03E+07 |
| N1-methylpseudouridine | | | |
| 5-methylcytosine/5- | 7.15E+06 | 1.25E+07 | 1.11E+07 |
| methoxyuridine | | | |

### Example 104. In Vivo Study

[1462] Luciferase modified mRNA containing at least one chemical modification is formulated as a lipid nanoparticle (LNP) using the syringe pump method and characterized by particle size, zeta potential, and encapsulation.

[1463] As outlined in Table 163, the luciferase LNP formulation is administered to Balb-C mice intramuscularly (I.M.), intravenously (I.V.) and subcutaneously (S.C.). As a control luciferase modified RNA formulated in PBS is administered intravenously to mice.

TABLE 163
Luciferase Formulations

| | | | | | Amount of | |
|---|---|---|---|---|---|---|
| | | | Concentration | Injection | modified RNA | Dose |
| Formulation | Vehicle | Route | (mg/ml) | Volume (ul) | (ug) | (mg/kg) |
| Luc-LNP | PBS | S.C. | 0.2000 | 50 | 10 | 0.5000 |
| Luc-LNP | PBS | S.C. | 0.0200 | 50 | 1 | 0.0500 |
| Luc-LNP | PBS | S.C. | 0.0020 | 50 | 0.1 | 0.0050 |
| Luc-LNP | PBS | S.C. | 0.0002 | 50 | 0.01 | 0.0005 |
| Luc-LNP | PBS | I.V. | 0.2000 | 50 | 10 | 0.5000 |
| Luc-LNP | PBS | I.V. | 0.0200 | 50 | 1 | 0.0500 |
| Luc-LNP | PBS | I.V. | 0.0020 | 50 | 0.1 | 0.0050 |
| Luc-LNP | PBS | I.V. | 0.0002 | 50 | 0.01 | 0.0005 |
| Luc-LNP | PBS | I.M. | 0.2000 | 50 | 10 | 0.5000 |
| Luc-LNP | PBS | I.M. | 0.0200 | 50 | 1 | 0.0500 |
| Luc-LNP | PBS | I.M. | 0.0020 | 50 | 0.1 | 0.0050 |
| Luc-LNP | PBS | I.M. | 0.0002 | 50 | 0.01 | 0.0005 |
| Luc-PBS | PBS | I.V. | 0.20 | 50 | 10 | 0.50 |

[1464] The mice are imaged at 2, 8, 24, 48, 120 and 192 hours to determine the bioluminescence (measured as total flux (photons/second) of the entire mouse). At 8 hours or 192 hours the liver, spleen, kidney and injection site for subcutaneous and intramuscular administration are imaged to determine the bioluminescence.

### Example 105. Cationic Lipid Formulation Studies of Chemically Modified mRNA

[1465] Luciferase mRNA (mRNA sequence shown in SEQ ID NO: 33907; polyA tail of approximately 140 nucleotides not shown in sequence; 5′cap, Cap1) fully modified with 5-methylcytosine and pseudouridine (5mC/pU), pseudouridine (pU) or N1-methyl-pseudouridine (N1mpU) was formulated in the cationic lipids described in Table 164. The formulations were administered intravenously (I.V.), intramuscularly (I.M.) or subcutaneously (S.C.) to Balb-C mice at a dose of 0.05 mg/kg.

TABLE 164
Cationic Lipid Formulations

| Formulation | NPA-137-1 | | NPA-134-1 | | NPA-135-1 | | NPA-136-1 | | 111612-A | |
|---|---|---|---|---|---|---|---|---|---|---|
| Lipid | DLin-MC3- | | DLin-MC3- | | DLin-KC2- | | C12-200 | | DODMA | |
| | DMA | | DMA | | DMA | | | | | |
| Lipid/mRNA | 20:1 | | 20:1 | | 20:1 | | 20:1 | | 20:1 | |
| ratio (wt/wt) | | | | | | | | | | |
| Mean Size | 111 | nm | 104 | nm | 95 | nm | 143 | nm | 223.2 | nm |
| | PDI: 0.15 | | PDI: 0.13 | | PDI: 0.11 | | PDI: 0.12 | | PDI: 0.142 | |
| Zeta at pH 7.4 | −4.1 | mV | −1.9 | mV | −1.0 | mV | 0.2 | mV | −3.09 | mV |

| | | | | | |
|---|---|---|---|---|---|
| Encaps. | 97% | 100% | 100% | 78% | 64% |
| (RiboGr) | | | | | |
| Chemistry | pU | N1mpU | N1mpU | N1mpU | 5mC/pU |

[1466] Twenty minutes prior to imaging, mice were injected intraperitoneally with a D-luciferin solution at 150 mg/kg. Animals were then anesthetized and images were acquired with an IVIS Lumina II imaging system (Perkin Elmer). Bioluminescence was measured as total flux (photons/second) of the entire mouse. The mice were imaged at 2 hours, 8 hours and 24 hours after dosing and the average total flux (photons/second) was measured for each route of administration and cationic lipid formulation. The background flux was about 4.11E+05 p/s. The results of the imaging are shown in Table 165. Peak expression was seen for all three routes tested at 8 hours.

TABLE 165
Flux

| | | DLin- | DLin- | DLin- | | |
|---|---|---|---|---|---|---|
| | | MC3- | MC3- | KC2- | | |
| | | DMA | DMA | DMA | C12-200 | DODMA |
| | Time | (pU) | (N1mpU) | (N1mpU) | (N1mpU) | (5 mC/pU) |
| Route | Point | Flux (p/s) | Flux (p/s) | Flux (p/s) | Flux (p/s) | Flux (p/s) |
| I.V. | 2 hrs | 3.21E+08 | 1.24E+09 | 1.01E+09 | 9.00E+08 | 3.90E+07 |
| I.V. | 8 hrs | 1.60E+09 | 3.22E+09 | 2.38E+09 | 1.11E+09 | 1.17E+07 |
| I.V. | 24 hrs | 1.41E+08 | 3.68E+08 | 3.93E+08 | 8.06E+07 | 1.11E+07 |
| I.M. | 2 hrs | 2.09E+07 | 3.29E+07 | 8.32E+07 | 9.43E+07 | 4.66E+06 |
| I.M. | 8 hrs | 2.16E+08 | 6.14E+08 | 1.00E+09 | 8.77E+07 | 7.05E+06 |
| I.M. | 24 hrs | 1.23E+07 | 1.40E+08 | 5.09E+08 | 1.36E+07 | 1.14E+06 |
| S.C. | 2 hrs | 2.32E+07 | 3.60E+07 | 2.14E+08 | 1.01E+08 | 3.11E+07 |
| S.C. | 8 hrs | 5.55E+08 | 9.80E+08 | 4.93E+09 | 1.01E+09 | 8.04E+07 |
| S.C. | 24 hrs | 1.81E+08 | 2.74E+08 | 2.12E+09 | 4.74E+07 | 1.34E+07 |

### Example 106. Studies of Chemical Modified mRNA

[1467] Luciferase mRNA (mRNA sequence shown in SEQ ID NO: 33907; polyA tail of approximately 140 nucleotides not shown in sequence; 5′cap, Cap1) fully modified with N4-acetylcytidine (N4-acetyl), fully modified with 5-methoxyuridine (5meth), fully modified with N4-acetylcytidine and N1-methyl-pseudouridine (N4-acetyl/N1mpU) or fully modified with 5-methylcytosine and 5-methoxyuridine (5mC/5-meth) was formulated in DLin-MC3-DMA as described in Table 166.

[1468] The formulations were administered intravenously (I.V.), intramuscularly (I.M.) or subcutaneously (S.C.) to Balb-C mice at a dose of 0.05 mg/kg.

TABLE 166
Cationic Lipid Formulations

| Formulation | NPA-141-1 | | NPA-142-1 | | NPA-143-1 | | NPA-144-1 | |
|---|---|---|---|---|---|---|---|---|
| Lipid | DLin-MC3- | | DLin-MC3- | | DLin-MC3- | | DLin-MC3- | |
| | DMA | | DMA | | DMA | | DMA | |
| Lipid/mRNA | 20:1 | | 20:1 | | 20:1 | | 20:1 | |
| ratio (wt/wt) | | | | | | | | |
| Mean Size | 138 | nm | 116 | nm | 144 | nm | 131 | nm |
| | PDI: 0.16 | | PDI: 0.15 | | PDI: 0.15 | | PDI: 0.15 | |
| Zeta at pH 7.4 | −2.8 | mV | −2.8 | mV | −4.3 | mV | −5.0 | mV |

| | | | | |
|---|---|---|---|---|
| Encaps. | 97% | 100% | 75% | 72% |
| (RiboGr) | | | | |
| Chemistry | N4-acetyl | 5meth | N4-acetyl/ | 5mC/5-meth |
| | | | N1mpU | |

[1469] Twenty minutes prior to imaging, mice were injected intraperitoneally with a D-luciferin solution at 150 mg/kg. Animals were then anesthetized and images were acquired with an IVIS Lumina II imaging system (Perkin Elmer). Bioluminescence was measured as total flux (photons/second) of the entire mouse. The mice were imaged at 2 hours, 6 hours and 24 hours after dosing and the average total flux (photons/second) was measured for each route of administration and cationic lipid formulation. The background flux was about 2.70E+05 p/s. The results of the imaging are shown in Table 167.

TABLE 167
Flux

| | | | | N4-acetyl/ | 5 mC/ |
|---|---|---|---|---|---|
| | Time | N4-acetyl | 5meth | N1mpU | 5-meth |
| Route | Point | Flux (p/s) | Flux (p/s) | Flux (p/s) | Flux (p/s) |
| I.V. | 2 hrs | 9.17E+07 | 3.19E+06 | 4.21E+07 | 1.88E+06 |
| I.V. | 6 hrs | 7.70E+08 | 9.28E+06 | 2.34E+08 | 7.75E+06 |
| I.V. | 24 hrs | 6.84E+07 | 1.04E+06 | 3.55E+07 | 3.21E+06 |
| I.M. | 2 hrs | 8.59E+06 | 7.86E+05 | 5.30E+06 | 5.11E+05 |
| I.M. | 6 hrs | 1.27E+08 | 8.88E+06 | 3.82E+07 | 3.17E+06 |
| I.M. | 24 hrs | 4.46E+07 | 1.38E+06 | 2.00E+07 | 1.39E+06 |
| S.C. | 2 hrs | 1.83E+07 | 9.67E+05 | 4.45E+06 | 1.01E+06 |
| S.C. | 6 hrs | 2.89E+08 | 1.78E+07 | 8.91E+07 | 1.29E+07 |
| S.C. | 24 hrs | 6.09E+07 | 6.40E+06 | 2.08E+08 | 6.63E+06 |

### Example 107. Lipid Nanoparticle Containing A Plurality of Modified mRNAs

[1470] EPO mRNA (mRNA sequence shown in SEQ ID NO: 33900; polyA tail of approximately 140 nucleotides not shown in sequence; 5′cap, Cap1; fully modified with 5-methylcytosine and N1-methyl-pseudouridine), G-CSF mRNA (mRNA sequence shown in SEQ ID NO: 33897; polyA tail of approximately 140 nucleotides not shown in sequence; 5′cap, Cap1; fully modified with 5-methylcytosine and N1-methyl-pseudouridine) and Factor IX mRNA (mRNA sequence shown in SEQ ID NO: 33901; polyA tail of approximately 140 nucleotides not shown in sequence; 5′cap, Cap1; fully modified with 5-methylcytosine and N1-methylpseudouridine), is formulated in DLin-MC3-DMA as described in Table 168. The formulations are administered intravenously (I.V.), intramuscularly (I.M.) or subcutaneously (S.C.) to Balb-C mice at a dose of 0.05 mg/kg. Control LNP formulations containing only one mRNA are also administered at an equivalent dose.

TABLE 168
DLin-MC3-DMA Formulation

| Formulation | NPA-157-1 |
|---|---|
| Lipid | DLin-MC3-DMA |
| Lipid/mRN Aratio (wt/wt) | 20:1 |
| Mean Size | 89 nm |
| | PDI: 0.08 |
| Zeta at pH 7.4 | 1.1 mV |
| Encaps. (RiboGr) | 97% |

[1471] Serum is collected from the mice at 8 hours, 24 hours, 72 hours and/or 7 days after administration of the formulation. The serum is analyzed by ELISA to determine the protein expression of EPO, G-CSF, and Factor IX.

### Example 108. Cationic Lipid Formulation Studies of of 5-Methylcytosine and N1-Methyl-Pseudouridine Modified mRNA

[1472] EPO mRNA (mRNA sequence shown in SEQ ID NO: 33900; polyA tail of approximately 140 nucleotides not shown in sequence; 5′cap, Cap1; fully modified with 5-methylcytosine and N1-methyl-pseudouridine) or G-CSF mRNA (mRNA sequence shown in SEQ ID NO: 33897; polyA tail of approximately 140 nucleotides not shown in sequence; 5′cap, Cap1; fully modified with 5-methylcytosine and N1-methylpseudouridine) is formulated in DLin-MC3-DMA and DLin-KC2-DMA as described in Table 169. The formulations are administered intravenously (IV), intramuscularly (I.M.) or subcutaneously (S.C.) to Balb-C mice at a dose of 0.05 mg/kg.

TABLE 169
DLin-MC3-DMA and DLin-KC2-DMA Formulations

| Formulation | NPA-147-1 | | NPA-148-1 | | NPA-150-1 | | NPA-151-1 | |
|---|---|---|---|---|---|---|---|---|
| mRNA | EPO | | EPO | | G-CSF | | G-CSF | |
| Lipid | DLin-MC3- | | DLin-KC2- | | DLin-MC3- | | DLin-KC2- | |
| | DMA | | DMA | | DMA | | DMA | |
| Lipid/mRNA | 20:1 | | 20:1 | | 20:1 | | 20:1 | |
| ratio (wt/wt) | | | | | | | | |
| Mean Size | 117 | nm | 82 | nm | 119 | nm | 88 | nm |
| | PDI: 0.14 | | PDI: 0.08 | | PDI: 0.13 | | PDI: 0.08 | |
| Zeta at pH 7.4 | −1.7 | mV | 0.6 | mV | 3.6 | mV | 2.2 | mV |

| | | | | |
|---|---|---|---|---|
| Encaps. | 100% | 96% | 100% | 100% |
| (RiboGr) | | | | |

[1473] Serum is collected from the mice at 8 hours, 24 hours, 72 hours and/or 7 days after administration of the formulation. The serum is analyzed by ELISA to determine the protein expression of EPO and G-CSF.

### Example 109. In Vitro VEGF PBMC Study

[1474] 500 ng of VEGF mRNA (mRNA sequence shown in SEQ ID NO: 33910 polyA tail of approximately 160 nucleotides not shown in sequence; 5′cap, Cap1) fully modified with 5-methylcytosine and pseudouridine (VEGF 5mC/pU), fully modified with 5-methylcytosine and N1-methyl-pseudouridine (VEGF 5mC/N1mpU) or unmodified (VEGF unmod) was transfected with 0.4 uL of Lipofectamine 2000 into peripheral blood mononuclear cells (PBMC) from three normal blood donors (D1, D2, and D3). Cells were also untreated for each donor as a control. The supernatant was harvested and run by ELISA 22 hours after transfection to determine the protein expression and cytokine induction. The expression of VEGF and IFN-alpha induction is shown in Table 170.

TABLE 170
Protein and Cytokine levels

| | VEGF Expression | | | IFN-alpha Induction | | |
|---|---|---|---|---|---|---|
| | (pg/ml) | | | (pg/ml) | | |
| | D1 | D2 | D3 | D1 | D2 | D3 |
| VEGF unmod | 2 | 0 | 0 | 5400 | 3537 | 4946 |
| VEGF 5 mC/pU | 424 | 871 | 429 | 145 | 294 | 106 |
| VEGF 5 mC/N1mpU | 5088 | 10331 | 6183 | 205 | 165 | 6 |

### Example 110. In Vitro Expression of Modified mRNA

[1475] HEK293 cells were transfected with VEGF-A modified mRNA (mRNA sequence shown in SEQ ID NO: 33910; polyA tail of approximately 160 nucleotides not shown in sequence; 5′cap, Cap1; fully modified with 5-methylcytosine and pseudouridine) or EPO modified mRNA (mRNA sequence shown in SEQ ID NO: 33900; polyA tail of approximately 160 nucleotides not shown in sequence; 5′cap, Cap1; fully modified with 5-methylcytosine and pseudouridine), HeLa cells were forward transfected with Transforming growth factor beta (TGF-beta) modified mRNA (mRNA sequence shown in SEQ ID NO: 33911; poly A tail of approximately 160 nucleotides not shown in sequence; 5′cap, Cap1; fully modified with 5-methylcytosine and pseudouridine) and HepG2 cells were transfected with bactericidal/permeability-increasing protein (rBPI-21) modified mRNA (mRNA sequence shown in SEQ ID NO: 33912; poly A tail of approximately 160 nucleotides not shown in sequence; 5′cap, Cap1; fully modified with 5-methylcytosine and pseudouridine) which had been complexed with Lipofectamine2000 from Invitrogen (Carlsbad, CA) at the concentrations shown in Table 171, 172 and 173 using the procedures described herein. The protein expression was detected by ELISA and the protein (pg/ml) is also shown in Table 171, 172 and 173. In Table 171, “>” means greater than. For TGF-beta a control of untreated cells and a mock transfection of Lipofectamine2000 was also tested.

TABLE 171
EPO Protein Expression

| | Amount Transfected | | | | | | | |
|---|---|---|---|---|---|---|---|---|
| | 5 ng | 1 ng | 200 pg | 40 pg | 8 pg | 1.6 pg | 320 fg | 64 fg |
| Protein | >2000 | 609.486 | 114.676 | 0 | 0 | 0 | 0 | 0 |
| (pg/ml) | | | | | | | | |

TABLE 172
TGF-beta Protein Expression

| | Amount Transfected | | | | |
|---|---|---|---|---|---|
| | 750 ng | 250 ng | 83 ng | Mock | Untreated |
| Protein | 5058 | 4325 | 3210 | 2 | 0 |
| (pg/ml) | | | | | |

TABLE 173
rBPI-21 Protein Expression

| | Amount Transfected | | | | | | | |
|---|---|---|---|---|---|---|---|---|
| | 2 | 400 | 80 | 16 | 3.2 | 640 | 128 | 26 |
| | ug | ng | ng | ng | ng | pg | pg | pg |
| Protein | 20.683 | 9.269 | 4.768 | 0 | 0 | 0 | 0 | 0 |
| (pg/ml) | | | | | | | | |

### Example 111. Bicistronic Modified mRNA

[1476] Human embryonic kidney epithelial (HEK293) were seeded on 96-well plates (Greiner Bio-one GmbH, Frickenhausen, Germany) HEK293 were seeded at a density of 30,000 in 100 μl cell culture medium (DMEM, 10% FCS, adding 2 mM L-Glutamine, 1 mM Sodiumpyruvate and 1× non-essential amino acids (Biochrom AG, Berlin, Germany) and 1.2 mg/ml Sodiumbicarbonate (Sigma-Aldrich, Munich, Germany)) 75 ng of the bi-cistronic modified mRNA (mCherry-2A-GFP) (SEQ ID NO: 33913; polyA tail of approximately 160 nucleotides not shown in sequence; 5′cap, Cap1; fully modified with 5-methylcytosine and pseudouridine), mCherry modified mRNA (mRNA SEQ ID NO: 33898; polyA tail of approximately 160 nucleotides not shown in sequence; 5′cap, Cap1; fully modified with 5-methylcytosine and pseudouridine) or green fluorescent protein (GFP) modified mRNA (mRNA sequence shown in SEQ ID NO: 33909; polyA tail of approximately 160 nucleotides not shown in sequence; 5′cap, Cap1; fully modified with 5-methylcytosine and pseudouridine) were added after seeding the cells and incubated. A control of untreated cells was also evaluated. mCherry-2A-GFP refers to a modified mRNA sequence comprising the coding region of mCherry, the 2A peptide and the coding region of GFP.

[1477] Cells were harvested by transferring the culture media supernatants to a 96-well Pro-Bind U-bottom plate (Beckton Dickinson GmbH, Heidelberg, Germany). Cells were trypsinized with 12 volume Trypsin/EDTA (Biochrom AG, Berlin, Germany), pooled with respective supernatants and fixed by adding one volume PBS/2% FCS (both Biochrom AG, Berlin, Germany)/0.5% formaldehyde (Merck, Darmstadt, Germany). Samples then were submitted to a flow cytometer measurement with a 532 nm excitation laser and the 610/20 filter for PE-Texas Red in a LSRII cytometer (Beckton Dickinson GmbH, Heidelberg, Germany). The mean fluorescence intensity (MFI) of all events is shown in Table 174. Cells transfected with the bi-cistronic modified mRNA were able to express both mCherry and GFP.

TABLE 174
MFI of Modified mRNA

| | mCherry | GFP |
|---|---|---|
| Modified mRNA | MFI | MFI |
| mCherry | 17746 | 427 |
| GFP | 427 | 20019 |
| mCherry-2A-GFP | 5742 | 6783 |
| Untreated | 427 | 219 |

### Example 112. Cationic Lipid Formulation Studies of of 5-Methylcytosine and N1-Methylpseudouridine Modified mRNA to Produce an Antibody

[1478] Herceptin heavy chain (HC) modified mRNA (mRNA sequence shown in SEQ ID NO: 33914; polyA tail of approximately 140 nucleotides not shown in sequence; 5′cap, Cap1; fully modified with 5-methylcytosine and N1-methylpseudouridine) and Herceptin light chain (LC) modified mRNA (mRNA sequence shown in SEQ ID NO: 33915; polyA tail of approximately 140 nucleotides not shown in sequence; 5′cap, Cap1; fully modified with 5-methylcytosine and N1-methylpseudouridine) are formulated in DLin-MC3-DMA and DLin-KC2-DMA as described in Table 175. The formulations are administered intravenously (IV) to Balb-C mice at a dose of 0.500, 0.050, and 0.005 mg/kg.

TABLE 175
DLin-MC3-DMA and DLin-KC2-DMA Formulations

| Formulation | NPA-158-1 | | NPA-159-1 | |
|---|---|---|---|---|
| Herceptin HC:LC | 2:1 | | 2:1 | |
| Ratio (wt/wt) | | | | |
| Lipid | DLin-MC3- | | DLin-KC2- | |
| | DMA | | DMA | |
| Lipid/Total mRNA | 20:1 | | 20:1 | |
| ratio (wt/wt) | | | | |
| Mean Size | 129 | nm | 100 | nm |
| | PDI: 0.14 | | PDI: 0.10 | |
| Zeta at pH 7.4 | 0.9 | mV | 1.9 | mV |

| | | |
|---|---|---|
| Encaps. (RiboGr) | 100% | 100% |

[1479] Serum was collected from the mice at 8 hours, 24 hours, 72 hours and/or 7 days after administration of the formulation. The serum was analyzed by ELISA to determine the protein expression of Herceptin.

### Example 113. Directed SAR of Pseudouridine and N1-Methyl-Pseudouridine

[1480] With the recent focus on the pyrimidine nucleoside pseudouridine, a series of structure-activity studies were designed to investigate mRNA containing modifications to pseudouridine or N1-methyl-pseudourdine.

[1481] The study was designed to explore the effect of chain length, increased lipophilicity, presence of ring structures, and alteration of hydrophobic or hydrophilic interactions when modifications were made at the N1 position, C6 position, the 2-position, the 4-position and on the phosphate backbone. Stability is also investigated.

[1482] To this end, modifications involving alkylation, cycloalkylation, alkyl-cycloalkylation, arylation, alkyl-arylation, alkylation moieties with amino groups, alkylation moieties with carboxylic acid groups, and alkylation moieties containing amino acid charged moieties are investigated. The degree of alkylation is generally C₁-C₆. Examples of the chemistry modifications include those listed in Table 176 and Table 177.

TABLE 176
Pseudouridine and N1-methyl-pseudouridine SAR

| | Compound | Naturally |
|---|---|---|
| Chemistry Modification | # | occuring |
| N1-Modifications | | |
| N1-Ethyl-pseudo-UTP | 1 | N |
| N1-Propyl-pseudo-UTP | 2 | N |
| N1-iso-propyl-pseudo-UTP | 3 | N |
| N1-(2,2,2-Trifluoroethyl)-pseudo-UTP | 4 | N |
| N1-Cyclopropyl-pseudo-UTP | 5 | N |
| N1-Cyclopropylmethyl-pseudo-UTP | 6 | N |
| N1-Phenyl-pseudo-UTP | 7 | N |
| N1-Benzyl-pseudo-UTP | 8 | N |
| N1-Aminomethyl-pseudo-UTP | 9 | N |
| P seudo-UTP-N1-2-ethanoic acid | 10 | N |
| N 1-(3-Amino-3-carboxypropyl)pseudo-UTP | 11 | N |
| N1-Methyl-3-(3-amino-3-carboxypropyl) | 12 | Y |
| pseudo-UTP | | |
| C-6 Modifications | | |
| 6-Methyl-pseudo-UTP | 13 | N |
| 6-Trifluoromethyl-pseudo-UTP | 14 | N |
| 6-Methoxy-pseudo-UTP | 15 | N |
| 6-Phenyl-pseudo-UTP | 16 | N |
| 6-Iodo-pseudo-UTP | 17 | N |
| 6-Bromo-pseudo-UTP | 18 | N |
| 6-Chloro-pseudo-UTP | 19 | N |
| 6-Fluoro-pseudo-UTP | 20 | N |
| 2-or 4-position Modifications | | |
| 4-Thio-pseudo-UTP | 21 | N |
| 2-Thio-pseudo-UTP | 22 | N |
| Phosphate backbone Modifications | | |
| Alpha-thio-pseudo-UTP | 23 | N |
| N1-Me-alpha-thio-pseudo-UTP | 24 | N |

TABLE 177
Pseudouridine and N1-methyl-pseudouridine SAR

| | Compound | Naturally |
|---|---|---|
| Chemistry Modification | # | occuring |
| N1-Methyl-pseudo-UTP | 1 | Y |
| N1-Butyl-pseudo-UTP | 2 | N |
| N1-tert-Butyl-pseudo-UTP | 3 | N |
| N1-Pentyl-pseudo-UTP | 4 | N |
| N1-Hexyl-pseudo-UTP | 5 | N |
| N1-Trifluoromethyl-pseudo-UTP | 6 | Y |
| N1-Cyclobutyl-pseudo-UTP | 7 | N |
| N1-Cyclopentyl-pseudo-UTP | 8 | N |
| N1-Cyclohexyl-pseudo-UTP | 9 | N |
| N1-Cycloheptyl-pseudo-UTP | 10 | N |
| N1-Cyclooctyl-pseudo-UTP | 11 | N |
| N1-Cyclobutylmethyl-pseudo-UTP | 12 | N |
| N1-Cyclopentylmethyl-pseudo-UTP | 13 | N |
| N1-Cyclohexylmethyl-pseudo-UTP | 14 | N |
| N1-Cycloheptylmethyl-pseudo-UTP | 15 | N |
| N1-Cyclooctylmethyl-pseudo-UTP | 16 | N |
| N1-p-tolyl-pseudo-UTP | 17 | N |
| N1-(2,4,6-Trimethyl-phenyl)pseudo-UTP | 18 | N |
| N1-(4-Methoxy-phenyl)pseudo-UTP | 19 | N |
| N1-(4-Amino-phenyl)pseudo-UTP | 20 | N |
| N1(4-Nitro-phenyl)pseudo-UTP | 21 | N |
| Pseudo-UTP-N1-p-benzoic acid | 22 | N |
| N1-(4-Methyl-benzyl)pseudo-UTP | 24 | N |
| N1-(2,4,6-Trimethyl-benzyl)pseudo-UTP | 23 | N |
| N1-(4-Methoxy-benzyl)pseudo-UTP | 25 | N |
| N1-(4-Amino-benzyl)pseudo-UTP | 26 | N |
| N1-(4-Nitro-benzyl)pseudo-UTP | 27 | N |
| Pseudo-UTP-N1-methyl-p-benzoic acid | 28 | N |
| N1-(2-Amino-ethyl)pseudo-UTP | 29 | N |
| N1-(3-Amino-propyl)pseudo-UTP | 30 | N |
| N1-(4-Amino-butyl)pseudo-UTP | 31 | N |
| N1-(5-Amino-pentyl)pseudo-UTP | 32 | N |
| N1-(6-Amino-hexyl)pseudo-UTP | 33 | N |
| Pseudo-UTP-N1-3-propionic acid | 34 | N |
| Pseudo-UTP-N1-4-butanoic acid | 35 | N |
| Pseudo-UTP-N1-5-pentanoic acid | 36 | N |
| Pseudo-UTP-N1-6-hexanoic acid | 37 | N |
| Pseudo-UTP-N1-7-heptanoic acid | 38 | N |
| N1-(2-Amino-2-carboxyethyl)pseudo-UTP | 39 | N |
| N1-(4-Amino-4-carboxybutyl)pseudo-UTP | 40 | N |
| N3-Alkyl-pseudo-UTP | 41 | N |
| 6-Ethyl-pseudo-UTP | 42 | N |
| 6-Propyl-pseudo-UTP | 43 | N |
| 6-iso-Propyl-pseudo-UTP | 44 | N |
| 6-Butyl-pseudo-UTP | 45 | N |
| 6-tert-Butyl-pseudo-UTP | 46 | N |
| 6-(2,2,2-Trifluoroethyl)-pseudo-UTP | 47 | N |
| 6-Ethoxy-pseudo-UTP | 48 | N |
| 6-Trifluoromethoxy-pseudo-UTP | 49 | N |
| 6-Phenyl-pseudo-UTP | 50 | N |
| 6-(Substituted-Phenyl)-pseudo-UTP | 51 | N |
| 6-Cyano-pseudo-UTP | 52 | N |
| 6-Azido-pseudo-UTP | 53 | N |
| 6-Amino-pseudo-UTP | 54 | N |
| 6-Ethylcarboxylate-pseudo-UTP | 54b | N |
| 6-Hydroxy-pseudo-UTP | 55 | N |
| 6-Methylamino-pseudo-UTP | 55b | N |
| 6-Dimethylamino-pseudo-UTP | 57 | N |
| 6-Hydroxyamino-pseudo-UTP | 59 | N |
| 6-Formyl-pseudo-UTP | 60 | N |
| 6-(4-Morpholino)-pseudo-UTP | 61 | N |
| 6-(4-Thiomorpholino)-pseudo-UTP | 62 | N |
| N1-Me-4-thio-pseudo-UTP | 63 | N |
| N1-Me-2-thio-pseudo-UTP | 64 | N |
| 1,6-Dimethyl-pseudo-UTP | 65 | N |
| 1-Methyl-6-trifluoromethyl-pseudo-UTP | 66 | N |
| 1-Methyl-6-ethyl-pseudo-UTP | 67 | N |
| 1-Methyl-6-propyl-pseudo-UTP | 68 | N |
| 1-Methyl-6-iso-propyl-pseudo-UTP | 69 | N |
| 1-Methyl-6-butyl-pseudo-UTP | 70 | N |
| 1-Methyl-6-tert-butyl-pseudo-UTP | 71 | N |
| 1-Methyl-6-(2,2,2-Trifluoroethyl)pseudo-UTP | 72 | N |
| 1-Methyl-6-iodo-pseudo-UTP | 73 | N |
| 1-Methyl-6-bromo-pseudo-UTP | 74 | N |
| 1-Methyl-6-chloro-pseudo-UTP | 75 | N |
| 1-Methyl-6-fluoro-pseudo-UTP | 76 | N |
| 1-Methyl-6-methoxy-pseudo-UTP | 77 | N |
| 1-Methyl-6-ethoxy-pseudo-UTP | 78 | N |
| 1-Methyl-6-trifluoromethoxy-pseudo-UTP | 79 | N |
| 1-Methyl-6-phenyl-pseudo-UTP | 80 | N |
| 1-Methyl-6-(substituted phenyl)pseudo-UTP | 81 | N |
| 1-Methyl-6-cyano-pseudo-UTP | 82 | N |
| 1-Methyl-6-azido-pseudo-UTP | 83 | N |
| 1-Methyl-6-amino-pseudo-UTP | 84 | N |
| 1-Methyl-6-ethylcarboxylate-pseudo-UTP | 85 | N |
| 1-Methyl-6-hydroxy-pseudo-UTP | 86 | N |
| 1-Methyl-6-methylamino-pseudo-UTP | 87 | N |
| 1-Methyl-6-dimethylamino-pseudo-UTP | 88 | N |
| 1-Methyl-6-hydroxyamino-pseudo-UTP | 89 | N |
| 1-Methyl-6-formyl-pseudo-UTP | 90 | N |
| 1-Methyl-6-(4-morpholino)-pseudo-UTP | 91 | N |
| 1-Methyl-6-(4-thiomorpholino)-pseudo-UTP | 92 | N |
| 1-Alkyl-6-vinyl-pseudo-UTP | 93 | N |
| 1-Alkyl-6-allyl-pseudo-UTP | 94 | N |
| 1-Alkyl-6-homoallyl-pseudo-UTP | 95 | N |
| 1-Alkyl-6-ethynyl-pseudo-UTP | 96 | N |
| 1-Alkyl-6-(2-propynyl)-pseudo-UTP | 97 | N |
| 1-Alkyl-6-(1-propynyl)-pseudo-UTP | 98 | N |

### Example 114. Incorporation of Naturally and Non-Naturally Occurring Nucleosides

[1483] Naturally and non-naturally occurring nucleosides are incorporated into mRNA encoding a polypeptide of interest. Examples of these are given in Tables 178 and 179. Certain commercially available nucleoside triphosphates (NTPs) are investigated in the polynucleotides of the invention. A selection of these are given in Table 179. The resultant mRNA are then examined for their ability to produce protein, induce cytokines, and/or produce a therapeutic outcome.

TABLE 178
Naturally and non-naturally occurring nucleosides

| | Compound | Naturally |
|---|---|---|
| Chemistry Modification | # | occuring |
| N4-Methyl-Cytosine | 1 | Y |
| N4,N4-Dimethyl-2′-OMe-Cytosine | 2 | Y |
| 5-Oxyacetic acid-methyl ester-Uridine | 3 | Y |
| N3-Methyl-pseudo-Uridine | 4 | Y |
| 5-Hydroxymethyl-Cytosine | 5 | Y |
| 5-Trifluoromethyl-Cytosine | 6 | N |
| 5-Trifluoromethyl-Uridine | 7 | N |
| 5-Methyl-amino-methyl-Uridine | 8 | Y |
| 5-Carboxy-methyl-amino-methyl-Uridine | 9 | Y |
| 5-Carboxymethylaminomethyl-2′-OMe-Uridine | 10 | Y |
| 5-Carboxymethylaminomethyl-2-thio-Uridine | 11 | Y |
| 5-Methylaminomethyl-2-thio-Uridine | 12 | Y |
| 5-Methoxy-carbonyl-methyl-Uridine | 13 | Y |
| 5-Methoxy-carbonyl-methyl-2′-OMe-Uridine | 14 | Y |
| 5-Oxyacetic acid-Uridine | 15 | Y |
| 3-(3-Amino-3-carboxypropyl)-Uridine | 16 | Y |
| 5-(carboxyhydroxymethyl)uridine methyl ester | 17 | Y |
| 5-(carboxyhydroxymethyl)uridine | 18 | Y |

TABLE 179
Non-naturally occurring nucleoside triphosphates

| | Compound | Naturally |
|---|---|---|
| Chemistry Modification | # | occuring |
| N1-Me-GTP | 1 | N |
| 2′-OMe-2-Amino-ATP | 2 | N |
| 2′-OMe-pseudo-UTP | 3 | Y |
| 2′-OMe-6-Me-UTP | 4 | N |
| 2′-Azido-2′-deoxy-ATP | 5 | N |
| 2′-Azido-2′-deoxy-GTP | 6 | N |
| 2′-Azido-2′-deoxy-UTP | 7 | N |
| 2′-Azido-2′-deoxy-CTP | 8 | N |
| 2′-Amino-2′-deoxy-ATP | 9 | N |
| 2′-Amino-2′-deoxy-GTP | 10 | N |
| 2′-Amino-2′-deoxy-UTP | 11 | N |
| 2′-Amino-2′-deoxy-CTP | 12 | N |
| 2-Amino-ATP | 13 | N |
| 8-Aza-ATP | 14 | N |
| Xanthosine-5′-TP | 15 | N |
| 5-Bromo-CTP | 16 | N |
| 2′-F-5-Methyl-2′-deoxy-UTP | 17 | N |
| 5-Aminoallyl-CTP | 18 | N |
| 2-Amino-riboside-TP | 19 | N |

### Example 115. Incorporation of Modifications to the Nucleobase and Carbohydrate (Sugar)

[1484] Naturally and non-naturally occurring nucleosides are incorporated into mRNA encoding a polypeptide of interest. Commercially available nucleosides and NTPs having modifications to both the nucleobase and carbohydrate (sugar) are examined for their ability to be incorporated into mRNA and to produce protein, induce cytokines, and/or produce a therapeutic outcome. Examples of these nucleosides are given in Tables 180 and 181.

TABLE 180
Combination modifications

| | Compound |
|---|---|
| Chemistry Modification | # |
| 5-iodo-2′-fluoro-deoxyuridine | 1 |
| 5-iodo-cytidine | 6 |
| 2′-bromo-deoxyuridine | 7 |
| 8-bromo-adenosine | 8 |
| 8-bromo-guanosine | 9 |
| 2,2′-anhydro-cytidine hydrochloride | 10 |
| 2,2′-anhydro-uridine | 11 |
| 2′-Azido-deoxyuridine | 12 |
| 2-amino-adenosine | 13 |
| N4-Benzoyl-cytidine | 14 |
| N4-Amino-cytidine | 15 |
| 2′-O-Methyl-N4-Acetyl-cytidine | 16 |
| 2′Fluoro-N4-Acetyl-cytidine | 17 |
| 2′Fluor-N4-Bz-cytidine | 18 |
| 2′O-methyl-N4-Bz-cytidine | 19 |
| 2′O-methyl-N6-Bz-deoxyadenosine | 20 |
| 2′Fluoro-N6-Bz-deoxyadenosine | 21 |
| N2-isobutyl-guanosine | 22 |
| 2′Fluro-N2-isobutyl-guanosine | 23 |
| 2′O-methyl-N2-isobutyl-guanosine | 24 |

TABLE 181
Naturally occuring combinations

| | Compound | Naturally |
|---|---|---|
| Name | # | occurring |
| 5-Methoxycarbonylmethyl-2-thiouridine TP | 1 | Y |
| 5-Methylaminomethyl-2-thiouridine TP | 2 | Y |
| 5-Crbamoylmethyluridine TP | 3 | Y |
| 5-Carbamoylmethyl-2′-O-methyluridine TP | 4 | Y |
| 1-Methyl-3-(3-amino-3-carboxypropyl) | 5 | Y |
| pseudouridine TP | | |
| 5-Methylaminomethyl-2-selenouridine TP | 6 | Y |
| 5-Carboxymethyluridine TP | 7 | Y |
| 5-Methyldihydrouridine TP | 8 | Y |
| lysidine TP | 9 | Y |
| 5-Taurinomethyluridine TP | 10 | Y |
| 5-Taurinomethyl-2-thiouridine TP | 11 | Y |
| 5-(iso-Pentenylaminomethyl)uridine TP | 12 | Y |
| 5-(iso-Pentenylaminomethyl)-2-thiouridine TP | 13 | Y |
| 5-(iso-Pentenylaminomethyl)-2′-O-methyl- | 14 | Y |
| uridine TP | | |
| N4-Acetyl-2′-O-methylcytidine TP | 15 | Y |
| N4,2′-O-Dimethylcytidine TP | 16 | Y |
| 5-Formyl-2′-O-methylcytidine TP | 17 | Y |
| 2′-O-Methylpseudouridine TP | 18 | Y |
| 2-Thio-2′-O-methyluridine TP | 19 | Y |
| 3,2′-O-Dimethyluridine TP | 20 | Y |

[1485] In the tables “UTP” stands for uridine triphosphate, “GTP” stands for guanosine triphosphate, “ATP” stands for adenosine triphosphate, “CTP” stands for cytosine triphosphate, “TP” stands for triphosphate and “Bz” stands for benzyl.

### Example 116. Dose Response and Injection Site Selection and Timing

[1486] To determine the dose response trends, impact of injection site and impact of injection timing, studies are performed following the protocol outlined in Example 35. In these studies, varied doses of 1 ug, 5 ug, 10 ug, 25 ug, 50 ug, and values in between are used to determine dose response outcomes. Split dosing for a 100 ug total dose includes three or six doses of 1.6 ug, 4.2 ug, 8.3 ug, 16.6 ug, or values and total doses equal to administration of the total dose selected.

[1487] Injection sites are chosen from the limbs or any body surface presenting enough area suitable for injection. This may also include a selection of injection depth to target the dermis (Intradermal), epidermis (Epidermal), subcutaneous tissue (SC) or muscle (IM). Injection angle will vary based on targeted delivery site with injections targeting the intradermal site to be 10-15 degree angles from the plane of the surface of the skin, between 20-45 degrees from the plane of the surface of the skin for subcutaneous injections and angles of between 60-90 degrees for injections substantially into the muscle.

### Example 117. Intranasal Lung Delivery of 1-Methylpseudouridine or 5-Methylcytosine and 1-Methylpseudouridine Modified Luciferase mRNA Formulated in Cationic Lipid Nanoparticle

[1488] Luciferase modified mRNA (mRNA sequence shown in SEQ ID NO: 33907; polyA tail of approximately 140 nucleotides not shown in sequence; 5′cap, Cap1) fully modified with 1-methylpseudouridine (Luc-G5-LNP-KC2) or fully modified with 1-methylpseudouridine and 5-methylcytosine (Luc-G2-LNP-KC2) were formulated in the cationic Lipid Nanoparticle (LNP-KC2). The formulations were administered intranasally (I.N.) to Balb-C mice at a dose of 0.3 mg/kg. Twenty minutes prior to imaging, mice were injected intraperitoneally with a D-luciferin solution at 150 mg/kg. Animals were then anesthetized and images were acquired with an IVIS Lumina II imaging system (Perkin Elmer). Bioluminescence was measured as total flux (photons/second) of the entire mouse. The mice were imaged at 2 hours, 8 hours, 48, and 72 hours after dosing and the average total flux (photons/second) was measured. The background flux was about 6.3+05 p/s. The results of the imaging of Luc-G5-LNP-KC2 or Luc-G5-LNP-KC2 vs. Vehicle are shown in the Table 182, “NT” means not tested.

TABLE 182
Luciferase expression after intranasal dosing

| | | Luc-G5- | Luc-G2- | Vehicle |
|---|---|---|---|---|
| | Time | LNP-KC2 | LNP-KC2 | (PBS) |
| Route | Point | Flux (p/s) | Flux (p/s) | Flux (p/s) |
| I.N. | 2 hrs | 1.53E+06 | 5.81E+05 | 3.87E+05 |
| I.N. | 8 hrs | 1.09E+07 | 9.35E+05 | 5.57E+05 |
| I.N. | 24 hrs | 5.93E+06 | 5.33E+05 | 4.89E+05 |
| I.N. | 28 hrs | 1.22E+06 | 7.63E+05 | 8.81E+05 |
| I.N. | 72 hrs | 8.43E+05 | NT | 8.17E+05 |

### Example 118. Intranasal Lung Delivery of 1-Methylpseudouridine or 5-Methylcytosine and 1-Methylpseudouridine Modified Luciferase mRNA Lipoplexed in Lipofectamine 2000

[1489] Luciferase modified mRNA (mRNA sequence shown in SEQ ID NO: 33907; polyA tail of approximately 140 nucleotides not shown in sequence; 5′cap, Cap1) fully modified with 1-methylpseudouridine (Luc-G5-Lipoplex) or fully modified with 1-methylpseudouridine and 5-methylcytosine (Luc-G2-Lipoplex) were lipoplexed in two steps, first step was the dilution of 16.6 ul from 3 mg/ml of G5 or G2 modified luciferase mRNA in 108.5 ul DMEM and the second step was the dilution of 100 ul LF2000 in 25 ul DMEM then both mixed together gently to make 250 ul total mixer which incubated 5-10 min at RT to form a Lipid-mRNA complex before injection. The lipoplex from both Luciferase mRNA fully modified with 1-methylpseudouridine or 1-methylpseudouridine and 5-methylcytosine were administered intranasally (I.N.) to Balb-C mice at a dose of 0.5 mg/kg.

[1490] Twenty minutes prior to imaging, mice were injected intraperitoneally with a D-luciferin solution at 150 mg/kg. Animals were then anesthetized and images were acquired with an IVIS Lumina II imaging system (Perkin Elmer). Bioluminescence was measured as total flux (photons/second) of the entire mouse. The mice were imaged at 2 hours, 8 hours and 24 hours after dosing and the average total flux (photons/second) was measured. The background signal was about 4.8+05 p/s. The background flux was about 6.3+05 p/s. The results of the imaging of Luc-G5-Lipoplex or Luc-G2-Lipoplex vs. Vehicle are shown in the Table 183.

TABLE 183
Luciferase expression after intranasal dosing

| | | Luc-G5- | Luc-G2- | Vehicle |
|---|---|---|---|---|
| | Time | Lipoplex | Lipoplex | (PBS) |
| Route | Point | Flux (p/s) | Flux (p/s) | Flux (p/s) |
| I.N. | 2 hrs | 8.37E+05 | 9.58E+05 | 3.87E+05 |
| I.N. | 8 hrs | 8.42E+05 | 7.11E+05 | 5.57E+05 |
| I.N. | 24 hrs | 5.74E+05 | 5.53E+05 | 4.89E+05 |

### Example 119. Intranasal Lung Delivery of 1-Methylpseudouridine or 5-Methylcytosine and 1-Methylpseudouridine Modified Luciferase mRNA Formulated in PBS

[1491] Luciferase modified mRNA (mRNA sequence shown in SEQ ID NO: 33907; polyA tail of approximately 140 nucleotides not shown in sequence; 5′cap, Cap1) fully modified with 1-methylpseudouridine (Luc-G5-Buffer(PBS)) or fully modified with 1-methylpseudouridine and 5-methylcytosine (Luc-G2-Buffer(PBS)) formulated in PBS (pH 7.4) were administered intranasally (I.N.) to Balb-C mice at a dose of 7.5 mg/kg.

[1492] Twenty minutes prior to imaging, mice were injected intraperitoneally with a D-luciferin solution at 150 mg/kg. Animals were then anesthetized and images were acquired with an IVIS Lumina II imaging system (Perkin Elmer). Bioluminescence was measured as total flux (photons/second) of the entire mouse. The mice were imaged at 2 hours, 8 hours and 24 hours after dosing and the average total flux (photons/second) was measured. The background flux was about 4.8+05 p/s. The background flux was about 6.3+05 p/s. The results of the imaging of Luc-G5-in Buffer vs. Vehicle are shown in the Table 184.

TABLE 184
Luciferase expression after intranasal dosing

| | | Luc-G5-in | Luc-G2-in | Vehicle |
|---|---|---|---|---|
| | Time | Buffer (PBS) | Buffer (PBS) | (PBS) |
| Route | Point | Flux [p/s] | Flux [p/s] | Flux (p/s) |
| I.N. | 2 hrs | 4.50E+05 | 9.58E+05 | 3.87E+05 |
| I.N. | 8 hrs | 7.12E+05 | 7.11E+05 | 5.57E+05 |
| I.N. | 24 hrs | 4.47E+05 | 5.53E+05 | 4.89E+05 |

[1493] It is to be understood that the words which have been used are words of description rather than limitation, and that changes may be made within the purview of the appended claims without departing from the true scope and spirit of the invention in its broader aspects.

[1494] While the present invention has been described at some length and with some particularity with respect to the several described embodiments, it is not intended that it should be limited to any such particulars or embodiments or any particular embodiment, but it is to be construed with references to the appended claims so as to provide the broadest possible interpretation of such claims in view of the prior art and, therefore, to effectively encompass the intended scope of the invention.

[1495] All publications, patent applications, patents, and other references mentioned herein are incorporated by reference in their entirety. In case of conflict, the present specification, including definitions, will control. In addition, section headings, the materials, methods, and examples are illustrative only and not intended to be limiting.

1. A pharmaceutical composition comprising:
a plurality of lipid nanoparticles comprising a cationic lipid, a non-cationic lipid, a cholesterol, and a PEG lipid, wherein the plurality of lipid nanoparticles has a mean particle size of between 80 nm and 150 nm; and
wherein the lipid nanoparticles comprise an mRNA encoding an oncology-related polypeptide,
wherein the mRNA comprises:
(i) a 5′-cap structure;
(ii) a 5′-UTR;
(iii) an open reading frame encoding the oncology-related polypeptide and consisting of nucleotides including uracil, cytosine, adenine, and guanine;
(iv) a 3′-UTR; and
(v) a poly-A region of least 100 nucleotides in length.

2. The pharmaceutical composition of claim 1, wherein the cationic lipid is a biodegradable cationic lipid.

3. The pharmaceutical composition of claim 2, wherein the biodegradable cationic lipid comprises an ester linkage.

4. The pharmaceutical composition of claim 3, wherein the biodegradable cationic lipid comprises DLin-DMA with an internal ester, DLin-DMA with a terminal ester, DLin-MC3-DMA with an internal ester, or DLin-MC3-DMA with a terminal ester.

5. The pharmaceutical composition of claim 1, wherein the non-cationic lipid is a phospholipid.

6. The pharmaceutical composition of claim 1, wherein the 5′-cap structure is cap0, cap1, ARCA, inosine, N1-methyl-guanosine, 2′-fluoro-guanosine, 7-deaza-guanosine, 8-oxo-guanosine, 2-amino-guanosine, LNA-guanosine, or 2-azido-guanosine.

7. The pharmaceutical composition of claim 6, wherein the 5′-cap structure is cap0, cap1, or ARCA.

8. The pharmaceutical composition of claim 1, wherein the mRNA comprises at least two stop codons.

The application's sequence listing, which the Patent Office published only in electronic form, follows.

SEQUENCE LISTING (33915 sequences)

SEQ ID NO: 1 - DNA, 47 bp, Homo sapiens
  source 1..47: mol_type = genomic DNA
gggaaataagagagaaaagaagagtaagaagaaatataagagccacc

SEQ ID NO: 2 - DNA, 47 bp, Homo sapiens
  source 1..47: mol_type = genomic DNA
gggagatcagagagaaaagaagagtaagaagaaatataagagccacc

SEQ ID NO: 3 - DNA, 145 bp, Homo sapiens
  source 1..145: mol_type = genomic DNA
ggaataaaagtctcaacacaacatatacaaaacaaacgaatctcaagcaatcaagcattctacttctattgcagcaatttaaatcatttcttttaaagcaaaagcaattttctgaaaattttcaccatttacgaacgatagcaac

SEQ ID NO: 4 - RNA, 42 nt, Homo sapiens
  source 1..42: mol_type = genomic RNA; mol_type = genomic RNA
gggagacaagcttggcattccggtactgttggtaaagccacc

SEQ ID NO: 5 - DNA, 371 bp, Homo sapiens
  source 1..371: mol_type = genomic DNA
gcgcctgcccacctgccaccgactgctggaacccagccagtgggagggcctggcccaccagagtcctgctccctcactcctcgccccgccccctgtcccagagtcccacctgggggctctctccacccttctcagagttccagtttcaaccagagttccaaccaatgggctccatcctctggattctggccaatgaaatatctccctggcagggtcctcttcttttcccagagctccaccccaaccaggagctctagttaatggagagctcccagcacactcggagcttgtgctttgtctccacgcaaagcgataaataaaagcattggtggcctttggtctttgaataaagcctgagtaggaagtctaga

SEQ ID NO: 6 - DNA, 568 bp, Homo sapiens
  source 1..568: mol_type = genomic DNA
gcccctgccgctcccacccccacccatctgggccccgggttcaagagagagcggggtctgatctcgtgtagccatatagagtttgcttctgagtgtctgctttgtttagtagaggtgggcaggaggagctgaggggctggggctggggtgttgaagttggctttgcatgcccagcgatgcgcctccctgtgggatgtcatcaccctgggaaccgggagtggcccttggctcactgtgttctgcatggtttggatctgaattaattgtcctttcttctaaatcccaaccgaacttcttccaacctccaaactggctgtaaccccaaatccaagccattaactacacctgacagtagcaattgtctgattaatcactggccccttgaagacagcagaatgtccctttgcaatgaggaggagatctgggctgggcgggccagctggggaagcatttgactatctggaacttgtgtgtgcctcctcaggtatggcagtgactcacctggttttaataaaacaacctgcaacatctcatggtctttgaataaagcctgagtaggaagtctaga

SEQ ID NO: 7 - DNA, 289 bp, Homo sapiens
  source 1..289: mol_type = genomic DNA
acacactccacctccagcacgcgacttctcaggacgacgaatcttctcaatgggggggcggctgagctccagccaccccgcagtcactttctttgtaacaacttccgttgctgccatcgtaaactgacacagtgtttataacgtgtacatacattaacttattacctcattttgttatttttcgaaacaaagccctgtggaagaaaatggaaaacttgaagaagcattaaagtcattctgttaagctgcgtaaatggtctttgaataaagcctgagtaggaagtctaga

SEQ ID NO: 8 - DNA, 379 bp, Homo sapiens
  source 1..379: mol_type = genomic DNA
catcacatttaaaagcatctcagcctaccatgagaataagagaaagaaaatgaagatcaaaagcttattcatctgtttttctttttcgttggtgtaaagccaacaccctgtctaaaaaacataaatttctttaatcattttgcctcttttctctgtgcttcaattaataaaaaatggaaagaatctaatagagtggtacagcactgttatttttcaaagatgtgttgctatcctgaaaattctgtaggttctgtggaagttccagtgttctctcttattccacttcggtagaggatttctagtttcttgtgggctaattaaataaatcattaatactcttctaatggtctttgaataaagcctgagtaggaagtctaga

SEQ ID NO: 9 - DNA, 118 bp, Mus sp.
  source 1..118: mol_type = genomic DNA
gctgccttctgcggggcttgccttctggccatgcccttcttctctcccttgcacctgtacctcttggtctttgaataaagcctgagtaggaaggcggccgctcgagcatgcatctaga

SEQ ID NO: 10 - DNA, 908 bp, Homo sapiens
  source 1..908: mol_type = genomic DNA
gccaagccctccccatcccatgtatttatctctatttaatatttatgtctatttaagcctcatatttaaagacagggaagagcagaacggagccccaggcctctgtgtccttccctgcatttctgagtttcattctcctgcctgtagcagtgagaaaaagctcctgtcctcccatcccctggactgggaggtagataggtaaataccaagtatttattactatgactgctccccagccctggctctgcaatgggcactgggatgagccgctgtgagcccctggtcctgagggtccccacctgggacccttgagagtatcaggtctcccacgtgggagacaagaaatccctgtttaatatttaaacagcagtgttccccatctgggtccttgcacccctcactctggcctcagccgactgcacagcggcccctgcatccccttggctgtgaggcccctggacaagcagaggtggccagagctgggaggcatggccctggggtcccacgaatttgctggggaatctcgtttttcttcttaagacttttgggacatggtttgactcccgaacatcaccgacgcgtctcctgtttttctgggtggcctcgggacacctgccctgcccccacgagggtcaggactgtgactctttttagggccaggcaggtgcctggacatttgccttgctggacggggactggggatgtgggagggagcagacaggaggaatcatgtcaggcctgtgtgtgaaaggaagctccactgtcaccctccacctcttcaccccccactcaccagtgtcccctccactgtcacattgtaactgaacttcaggataataaagtgtttgcctccatggtctttgaataaagcctgagtaggaaggcggccgctcgagcatgcatctaga

SEQ ID NO: 11 - DNA, 835 bp, Homo sapiens
  source 1..835: mol_type = genomic DNA
actcaatctaaattaaaaaagaaagaaatttgaaaaaactttctctttgccatttcttcttcttcttttttaactgaaagctgaatccttccatttcttctgcacatctacttgcttaaattgtgggcaaaagagaaaaagaaggattgatcagagcattgtgcaatacagtttcattaactccttcccccgctcccccaaaaatttgaatttttttttcaacactcttacacctgttatggaaaatgtcaacctttgtaagaaaaccaaaataaaaattgaaaaataaaaaccataaacatttgcaccacttgtggcttttgaatatcttccacagagggaagtttaaaacccaaacttccaaaggtttaaactacctcaaaacactttcccatgagtgtgatccacattgttaggtgctgacctagacagagatgaactgaggtccttgttttgttttgttcataatacaaaggtgctaattaatagtatttcagatacttgaagaatgttgatggtgctagaagaatttgagaagaaatactcctgtattgagttgtatcgtgtggtgtattttttaaaaaatttgatttagcattcatattttccatcttattcccaattaaaagtatgcagattatttgcccaaatcttcttcagattcagcatttgttctttgccagtctcattttcatcttcttccatggttccacagaagctttgtttcttgggcaagcagaaaaattaaattgtacctattttgtatatgtgagatgtttaaataaattgtgaaaaaaatgaaataaagcatgtttggttttccaaaagaacatat

SEQ ID NO: 12 - DNA, 297 bp, Homo sapiens
  source 1..297: mol_type = genomic DNA
cgccgccgcccgggccccgcagtcgagggtcgtgagcccaccccgtccatggtgctaagcgggcccgggtcccacacggccagcaccgctgctcactcggacgacgccctgggcctgcacctctccagctcctcccacggggtccccgtagccccggcccccgcccagccccaggtctccccaggccctccgcaggctgcccggcctccctccccctgcagccatcccaaggctcctgacctacctggcccctgagctctggagcaagccctgacccaataaaggctttgaacccat

SEQ ID NO: 13 - DNA, 602 bp, Homo sapiens
  source 1..602: mol_type = genomic DNA
ggggctagagccctctccgcacagcgtggagacggggcaaggaggggggttattaggattggtggttttgttttgctttgtttaaagccgtgggaaaatggcacaactttacctctgtgggagatgcaacactgagagccaaggggtgggagttgggataatttttatataaaagaagtttttccactttgaattgctaaaagtggcatttttcctatgtgcagtcactcctctcatttctaaaatagggacgtggccaggcacggtggctcatgcctgtaatcccagcactttgggaggccgaggcaggcggctcacgaggtcaggagatcgagactatcctggctaacacggtaaaaccctgtctctactaaaagtacaaaaaattagctgggcgtggtggtgggcacctgtagtcccagctactcgggaggctgaggcaggagaaaggcatgaatccaagaggcagagcttgcagtgagctgagatcacgccattgcactccagcctgggcaacagtgttaagactctgtctcaaatataaataaataaataaataaataaataaataaataaaaataaagcgagatgttgccctcaaa

SEQ ID NO: 14 - DNA, 785 bp, Homo sapiens
  source 1..785: mol_type = genomic DNA
ggccctgccccgtcggactgcccccagaaagcctcctgccccctgccagtgaagtccttcagtgagcccctccccagccagcccttccctggccccgccggatgtataaatgtaaaaatgaaggaattacattttatatgtgagcgagcaagccggcaagcgagcacagtattatttctccatcccctccctgcctgctccttggcacccccatgctgccttcagggagacaggcagggagggcttggggctgcacctcctaccctcccaccagaacgcaccccactgggagagctggtggtgcagccttcccctccctgtataagacactttgccaaggctctcccctctcgccccatccctgcttgcccgctcccacagcttcctgagggctaattctgggaagggagagttctttgctgcccctgtctggaagacgtggctctgggtgaggtaggcgggaaaggatggagtgttttagttcttgggggaggccaccccaaaccccagccccaactccaggggcacctatgagatggccatgctcaacccccctcccagacaggccctccctgtctccagggcccccaccgaggttcccagggctggagacttcctctggtaaacattcctccagcctcccctcccctggggacgccaaggaggtgggccacacccaggaagggaaagcgggcagccccgttttggggacgtgaacgttttaataatttttgctgaattcctttacaactaaataacacagatattgttataaataaaattgt

SEQ ID NO: 15 - DNA, 3001 bp, Homo sapiens
  source 1..3001: mol_type = genomic DNA
atattaaggatcaagctgttagctaataatgccacctctgcagttttgggaacaggcaaataaagtatcagtatacatggtgatgtacatctgtagcaaagctcttggagaaaatgaagactgaagaaagcaaagcaaaaactgtatagagagatttttcaaaagcagtaatccctcaattttaaaaaaggattgaaaattctaaatgtctttctgtgcatattttttgtgttaggaatcaaaagtattttataaaaggagaaagaacagcctcattttagatgtagtcctgttggattttttatgcctcctcagtaaccagaaatgttttaaaaaactaagtgtttaggatttcaagacaacattatacatggctctgaaatatctgacacaatgtaaacattgcaggcacctgcattttatgttttttttttcaacaaatgtgactaatttgaaacttttatgaacttctgagctgtccccttgcaattcaaccgcagtttgaattaatcatatcaaatcagttttaattttttaaattgtacttcagagtctatatttcaagggcacattttctcactactattttaatacattaaaggactaaataatctttcagagatgctggaaacaaatcatttgctttatatgtttcattagaataccaatgaaacatacaacttgaaaattagtaatagtatttttgaagatcccatttctaattggagatctctttaatttcgatcaacttataatgtgtagtactatattaagtgcacttgagtggaattcaacatttgactaataaaatgagttcatcatgttggcaagtgatgtggcaattatctctggtgacaaaagagtaaaatcaaatatttctgcctgttacaaatatcaaggaagacctgctactatgaaatagatgacattaatctgtcttcactgtttataatacggatggattttttttcaaatcagtgtgtgttttgaggtcttatgtaattgatgacatttgagagaaatggtggctttttttagctacctctttgttcatttaagcaccagtaaagatcatgtctttttatagaagtgtagattttctttgtgactttgctatcgtgcctaaagctctaaatataggtgaatgtgtgatgaatactcagattatttgtctctctatataattagtttggtactaagtttctcaaaaaattattaacacatgaaagacaatctctaaaccagaaaaagaagtagtacaaattttgttactgtaatgctcgcgtttagtgagtttaaaacacacagtatcttttggttttataatcagtttctattttgctgtgcctgagattaagatctgtgtatgtgtgtgtgtgtgtgtgtgcgtttgtgtgttaaagcagaaaagacttttttaaaagttttaagtgataaatgcaatttgttaattgatcttagatcactagtaaactcagggctgaattataccatgtatattctattagaagaaagtaaacaccatctttattcctgccctttttcttctctcaaagtagttgtagttatatctagaaagaagcaattttgatttcttgaaaaggtagttcctgcactcagtttaaactaaaaataatcatacttggattttatttatttttgtcatagtaaaaattttaatttatatatatttttatttagtattatcttattctttgctatttgccaatcctttgtcatcaattgtgttaaatgaattgaaaattcatgccctgttcattttattttactttattggttaggatatttaaaggatttttgtatatataatttcttaaattaatattccaaaaggttagtggacttagattataaattatggcaaaaatctaaaaacaacaaaaatgatttttatacattctatttcattattcctctttttccaataagtcatacaattggtagatatgacttattttatttttgtattattcactatatctttatgatatttaagtataaataattaaaaaaatttattgtaccttatagtctgtcaccaaaaaaaaaaaattatctgtaggtagtgaaatgctaatgttgatttgtctttaagggcttgttaactatcctttattttctcatttgtcttaaattaggagtttgtgtttaaattactcatctaagcaaaaaatgtatataaatcccattactgggtatatacccaaaggattataaatcatgctgctataaagacacatgcacacgtatgtttattgcagcactattcacaatagcaaagacttggaaccaacccaaatgtccatcaatgatagacttgattaagaaaatgtgcacatatacaccatggaatactatgcagccataaaaaaggatgagttcatgtcctttgtagggacatggataaagctggaaaccatcattctgagcaaactattgcaaggacagaaaaccaaacactgcatgttctcactcataggtgggaattgaacaatgagaacacttggacacaaggtggggaacaccacacaccagggcctgtcatggggtggggggagtggggagggatagcattaggagatatacctaatgtaaatgatgagttaatgggtgcagcacaccaacatggcacatgtatacatatgtagcaaacctgcacgttgtgcacatgtaccctagaacttaaagtataattaaaaaaaaaaagaaaacagaagctatttataaagaagttatttgctgaaataaatgtgatctttcccattaaaaaaataaagaaattttggggtaaaaaaacacaatatattgtattcttgaaaaattctaagagagtggatgtgaagtgttctcaccacaaaagtgataactaattgaggtaatgcacatattaattagaaagattttgtcattccacaatgtatatatacttaaaaatatgttatacacaataaatacatacattaaaaaataagtaaatgta

SEQ ID NO: 16 - DNA, 1037 bp, Homo sapiens
  source 1..1037: mol_type = genomic DNA
cccaccctgcacgccggcaccaaaccctgtcctcccacccctccccactcatcactaaacagagtaaaatgtgatgcgaattttcccgaccaacctgattcgctagattttttttaaggaaaagcttggaaagccaggacacaacgctgctgcctgctttgtgcagggtcctccggggctcagccctgagttggcatcacctgcgcagggccctctggggctcagccctgagctagtgtcacctgcacagggccctctgaggctcagccctgagctggcgtcacctgtgcagggccctctggggctcagccctgagctggcctcacctgggttccccaccccgggctctcctgccctgccctcctgcccgccctccctcctgcctgcgcagctccttccctaggcacctctgtgctgcatcccaccagcctgagcaagacgccctctcggggcctgtgccgcactagcctccctctcctctgtccccatagctggtttttcccaccaatcctcacctaacagttactttacaattaaactcaaagcaagctcttctcctcagcttggggcagccattggcctctgtctcgttttgggaaaccaaggtcaggaggccgttgcagacataaatctcggcgactcggccccgtctcctgagggtcctgctggtgaccggcctggaccttggccctacagccctggaggccgctgctgaccagcactgaccccgacctcagagagtactcgcaggggcgctggctgcactcaagaccctcgagattaacggtgctaaccccgtctgctcctccctcccgcagagactggggcctggactggacatgagagccccttggtgccacagagggctgtgtcttactagaaacaacgcaaacctctccttcctcagaatagtgatgtgttcgacgttttatcaaaggccccctttctatgttcatgttagttttgctccttctgtgtttttttctgaaccatatccatgttgctgacttttccaaataaaggttttcactcctctc

SEQ ID NO: 17 - DNA, 577 bp, Homo sapiens
  source 1..577: mol_type = genomic DNA
agaggcctgcctccagggctggactgaggcctgagcgctcctgccgcagagctggccgcgccaaataatgtctctgtgagactcgagaactttcatttttttccaggctggttcggatttggggtggattttggttttgttcccctcctccactctcccccaccccctccccgcccttttttttttttttttttaaactggtattttatctttgattctccttcagccctcacccctggttctcatctttcttgatcaacatcttttcttgcctctgtccccttctctcatctcttagctcccctccaacctggggggcagtggtgtggagaagccacaggcctgagatttcatctgctctccttcctggagcccagaggagggcagcagaagggggtggtgtctccaaccccccagcactgaggaagaacggggctcttctcatttcacccctccctttctcccctgcccccaggactgggccacttctgggtggggcagtgggtcccagattggctcacactgagaatgtaagaactacaaacaaaatttctattaaattaaattttgtgtctcc

SEQ ID NO: 18 - DNA, 2212 bp, Homo sapiens
  source 1..2212: mol_type = genomic DNA
ctccctccatcccaacctggctccctcccacccaaccaactttccccccaacccggaaacagacaagcaacccaaactgaaccccctcaaaagccaaaaaatgggagacaatttcacatggactttggaaaatatttttttcctttgcattcatctctcaaacttagtttttatctttgaccaaccgaacatgaccaaaaaccaaaagtgcattcaaccttaccaaaaaaaaaaaaaaaaaaagaataaataaataactttttaaaaaaggaagcttggtccacttgcttgaagacccatgcgggggtaagtccctttctgcccgttgggcttatgaaaccccaatgctgccctttctgctcctttctccacaccccccttggggcctcccctccactccttcccaaatctgtctccccagaagacacaggaaacaatgtattgtctgcccagcaatcaaaggcaatgctcaaacacccaagtggcccccaccctcagcccgctcctgcccgcccagcacccccaggccctgggggacctggggttctcagactgccaaagaagccttgccatctggcgctcccatggctcttgcaacatctccccttcgtttttgagggggtcatgccgggggagccaccagcccctcactgggttcggaggagagtcaggaagggccacgacaaagcagaaacatcggatttggggaacgcgtgtcaatcccttgtgccgcagggctgggcgggagagactgttctgttccttgtgtaactgtgttgctgaaagactacctcgttcttgtcttgatgtgtcaccggggcaactgcctgggggcggggatgggggcagggtggaagcggctccccattttataccaaaggtgctacatctatgtgatgggtggggtggggagggaatcactggtgctatagaaattgagatgcccccccaggccagcaaatgttcctttttgttcaaagtctatttttattccttgatatttttctttttttttttttttttttgtggatggggacttgtgaatttttctaaaggtgctatttaacatgggaggagagcgtgtgcggctccagcccagcccgctgctcactttccaccctctctccacctgcctctggcttctcaggcctctgctctccgacctctctcctctgaaaccctcctccacagctgcagcccatcctcccggctccctcctagtctgtcctgcgtcctctgtccccgggtttcagagacaacttcccaaagcacaaagcagtttttccccctaggggtgggaggaagcaaaagactctgtacctattttgtatgtgtataataatttgagatgtttttaattattttgattgctggaataaagcatgtggaaatgacccaaacataatccgcagtggcctcctaatttccttctttggagttgggggaggggtagacatggggaaggggctttggggtgatgggcttgccttccattcctgccctttccctccccactattctcttctagatccctccataaccccactcccctttctctcacccttcttataccgcaaacctttctacttcctctttcattttctattcttgcaatttccttgcaccttttccaaatcctcttctcccctgcaataccatacaggcaatccacgtgcacaacacacacacacactcttcacatctggggttgtccaaacctcatacccactccccttcaagcccatccactctccaccccctggatgccctgcacttggtggcggtgggatgctcatggatactgggagggtgaggggagtggaacccgtgaggaggacctgggggcctctccttgaactgacatgaagggtcatctggcctctgctcccttctcacccacgctgacctcctgccgaaggagcaacgcaacaggagaggggtctgctgagcctggcgagggtctgggagggaccaggaggaaggcgtgctccctgctcgctgtcctggccctgggggagtgagggagacagacacctgggagagctgtggggaaggcactcgcaccgtgctcttgggaaggaaggagacctggccctgctcaccacggactgggtgcctcgacctcctgaatccccagaacacaacccccctgggctggggtggtctggggaaccatcgtgcccccgcctcccgcctactcctttttaagctt

SEQ ID NO: 19 - DNA, 729 bp, Homo sapiens
  source 1..729: mol_type = genomic DNA
ttggccaggcctgaccctcttggacctttcttctttgccgacaaccactgcccagcagcctctgggacctcggggtcccagggaacccagtccagcctcctggctgttgacttcccattgctcttggagccaccaatcaaagagattcaaagagattcctgcaggccagaggcggaacacacctttatggctggggctctccgtggtgttctggacccagcccctggagacaccattcacttttactgctttgtagtgactcgtgctctccaacctgtcttcctgaaaaaccaaggcccccttcccccacctcttccatggggtgagacttgagcagaacaggggcttccccaagttgcccagaaagactgtctgggtgagaagccatggccagagcttctcccaggcacaggtgttgcaccagggacttctgcttcaagttttggggtaaagacacctggatcagactccaagggctgccctgagtctgggacttctgcctccatggctggtcatgagagcaaaccgtagtcccctggagacagcgactccagagaacctcttgggagacagaagaggcatctgtgcacagctcgatcttctacttgcctgtggggaggggagtgacaggtccacacaccacactgggtcaccctgtcctggatgcctctgaagagagggacagaccgtcagaaactggagagtttctattaaaggtcatttaaacca

SEQ ID NO: 20 - DNA, 847 bp, Homo sapiens
  source 1..847: mol_type = genomic DNA
tcctccgggaccccagccctcaggattcctgatgctccaaggcgactgatgggcgctggatgaagtggcacagtcagcttccctgggggctggtgtcatgttgggctcctggggcgggggcacggcctggcatttcacgcattgctgccaccccaggtccacctgtctccactttcacagcctccaagtctgtggctcttcccttctgtcctccgaggggcttgccttctctcgtgtccagtgaggtgctcagtgatcggcttaacttagagaagcccgccccctccccttctccgtctgtcccaagagggtctgctctgagcctgcgttcctaggtggctcggcctcagctgcctgggttgtggccgccctagcatcctgtatgcccacagctactggaatccccgctgctgctccgggccaagcttctggttgattaatgagggcatggggtggtccctcaagaccttcccctaccttttgtggaaccagtgatgcctcaaagacagtgtcccctccacagctgggtgccaggggcaggggatcctcagtatagccggtgaaccctgataccaggagcctgggcctccctgaacccctggcttccagccatctcatcgccagcctcctcctggacctcttggcccccagccccttccccacacagccccagaagggtcccagagctgaccccactccaggacctaggcccagcccctcagcctcatctggagcccctgaagaccagtcccacccacctttctggcctcatctgacactgctccgcatcctgctgtgtgtcctgttccatgttccggttccatccaaatacactttctggaacaaa

SEQ ID NO: 21 - DNA, 110 bp, Homo sapiens
  source 1..110: mol_type = genomic DNA
gctggagcctcggtggccatgcttcttgccccttgggcctccccccagcccctcctccccttcctgcacccgtacccccgtggtctttgaataaagtctgagtgggcggc

SEQ ID NO: 22 - DNA, 27 bp, Homo sapiens
  source 1..27: mol_type = genomic DNA
ttggaccctcgtacagaagctaatacg

SEQ ID NO: 23 - DNA, 189 bp, Homo sapiens
  source 1..189: mol_type = genomic DNA
ttttttttttttttttttttttttttttttttttttttttttttttttttttttttttttttttttttttttttttttttttttttttttttttttttttttttttttttttttttttttttttttttttttttttttttttttttttttttttttttttcttcctactcaggctttattcaaagacca

SEQ ID NO: 24 - DNA, 20 bp, Homo sapiens
  source 1..20: mol_type = genomic DNA
ccttgaccttctggaacttc

SEQ ID NO: 25 - DNA, 20 bp, Homo sapiens
  source 1..20: mol_type = genomic DNA
ccaagcactgaaacggatat

SEQ ID NO: 26 - DNA, 20 bp, Homo sapiens
  source 1..20: mol_type = genomic DNA
gatgaaaagtgctccaagga

SEQ ID NO: 27 - DNA, 20 bp, Homo sapiens
  source 1..20: mol_type = genomic DNA
aaccgtgatgaaaaggtacc

SEQ ID NO: 28 - DNA, 20 bp, Homo sapiens
  source 1..20: mol_type = genomic DNA
tcatgcagattggaaaggtc

SEQ ID NO: 29 - DNA, 20 bp, Homo sapiens
  source 1..20: mol_type = genomic DNA
cttcttggactgtccagagg

SEQ ID NO: 30 - DNA, 20 bp, Homo sapiens
  source 1..20: mol_type = genomic DNA
gcagtccctgatacaagaac

SEQ ID NO: 31 - DNA, 20 bp, Homo sapiens
  source 1..20: mol_type = genomic DNA
gattgaaggtggctcgctac

SEQ ID NO: 32 - DNA, 75 bp, Homo sapiens
  source 1..75: mol_type = genomic DNA
atgatgccatcctcagtctcatggggtattttgctcttggcgggtctgtgctgtctcgtgccggtgtcgctcgca

SEQ ID NO: 33 - DNA, 90 bp, Homo sapiens
  source 1..90: mol_type = genomic DNA
atggccggaccggcgactcagtcgcccatgaaactcatggccctgcagttgttgctttggcactcagccctctggaccgtccaagaggcg

SEQ ID NO: 34 - DNA, 137 bp, Homo sapiens
  source 1..137: mol_type = genomic DNA
atgcagagagtgaacatgattatggccgagtccccatcgctcatcacaatctgcctgcttggtacctgctttccgccgaatgcactgtctttctggatcacgagaatgcgaataagatcttgaaccgacccaaacgg

SEQ ID NO: 35 - DNA, 63 bp, Homo sapiens
  source 1..63: mol_type = genomic DNA
atgaaaggatcattgctgttgctcctcgtgtcgaaccttctgctttgccagtccgtagccccc

SEQ ID NO: 36 - DNA, 72 bp, Homo sapiens
  source 1..72: mol_type = genomic DNA
atgaaatgggtgacgttcatctcactgttgtttttgttctcgtccgcctactccaggggagtattccgccga

SEQ ID NO: 37 - DNA, 63 bp, Homo sapiens
  source 1..63: mol_type = genomic DNA
atgtggtggcggctctggtggctgctcctgttgctcctcttgctgtggcccatggtgtgggca

SEQ ID NO: 38 - DNA, 95 bp, Homo sapiens
  source 1..95: mol_type = genomic DNA
tgctctttaacctccgcatcctgttgaataacgctgcgttccgaaatgggcataacttcatggtacgcaacttcagatgcggccagccactccag

SEQ ID NO: 39 - DNA, 87 bp, Homo sapiens
  source 1..87: mol_type = genomic DNA
atgtccgtcttgacacccctgctcttgagagggctgacggggtccgctagacgcctgccggtaccgcgagcgaagatccactccctg

SEQ ID NO: 40 - DNA, 87 bp, Homo sapiens
  source 1..87: mol_type = genomic DNA
atgagcgtgctcactccgttgcttcttcgagggcttacgggatcggctcggaggttgcccgtcccgagagcgaagatccattcgttg

SEQ ID NO: 41 - DNA, 175 bp, unidentified
  misc_feature 1..175: note = Description of Unknown: Bacterial signal sequence
  source 1..175: mol_type = unassigned DNA
tgacaaaaataactttatctccccagaattttagaatccaaaaacaggaaaccacactactaaaagaaaaatcaaccgagaaaaattctttagcaaaaagtattctcgcagtaaaaatcacttcatcgaattaaggtcaaaattatcggaacgttttatttcgcataagaacact

SEQ ID NO: 42 - DNA, 69 bp, unidentified
  misc_feature 1..69: note = Description of Unknown: Viral signal sequence
  source 1..69: mol_type = unassigned DNA
atgctgagctttgtggatacccgcaccctgctgctgctggcggtgaccagctgcctggcgacctgccag

SEQ ID NO: 43 - DNA, 96 bp, unidentified
  misc_feature 1..96: note = Description of Unknown: Viral signal sequence
  source 1..96: mol_type = unassigned DNA
atgggcagcagccaggcgccgcgcatgggcagcgtgggcggccatggcctgatggcgctgctgatggcgggcctgattctgccgggcattctggcg

SEQ ID NO: 44 - DNA, 51 bp, unidentified
  misc_feature 1..51: note = Description of Unknown: Viral signal sequence
  source 1..51: mol_type = unassigned DNA
atggcgggcattttttattttctgtttagctttctgtttggcatttgcgat

SEQ ID NO: 45 - DNA, 66 bp, unidentified
  misc_feature 1..66: note = Description of Unknown: Viral signal sequence
  source 1..66: mol_type = unassigned DNA
atggaaaaccgcctgctgcgcgtgtttctggtgtgggcggcgctgaccatggatggcgcgagcgcg

SEQ ID NO: 46 - DNA, 81 bp, unidentified
  misc_feature 1..81: note = Description of Unknown: Viral signal sequence
  source 1..81: mol_type = unassigned DNA
atggcgcgccagggctgctttggcagctatcaggtgattagcctgtttacctttgcgattggcgtgaacctgtgcctgggc

SEQ ID NO: 47 - DNA, 57 bp, unidentified
  misc_feature 1..57: note = Description of Unknown: Bacterial signal sequence
  source 1..57: mol_type = unassigned DNA
atgagccgcctgccggtgctgctgctgctgcagctgctggtgcgcccgggcctgcag

SEQ ID NO: 48 - DNA, 87 bp, unidentified
  misc_feature 1..87: note = Description of Unknown: Bacterial signal sequence
  source 1..87: mol_type = unassigned DNA
atgaaacagcagaaacgcctgtatgcgcgcctgctgaccctgctgtttgcgctgatttttctgctgccgcatagcagcgcgagcgcg

SEQ ID NO: 49 - DNA, 78 bp, Homo sapiens
  source 1..78: mol_type = genomic DNA
atggcgacgccgctgcctccgccctccccgcggcacctgcggctgctgcggctgctgctctccgccctcgtcctcggc

SEQ ID NO: 50 - DNA, 54 bp, Homo sapiens
  source 1..54: mol_type = genomic DNA
atgaaggctccgggtcggctcgtgctcatcatcctgtgctccgtggtcttctct

SEQ ID NO: 51 - DNA, 45 bp, Homo sapiens
  source 1..45: mol_type = genomic DNA
atgcttcagctttggaaacttgttctcctgtgcggcgtgctcact

SEQ ID NO: 52 - DNA, 39 bp, Homo sapiens
  source 1..39: mol_type = genomic DNA
atgctttatctccagggttggagcatgcctgctgtggca

SEQ ID NO: 53 - DNA, 144 bp, Homo sapiens
  source 1..144: mol_type = genomic DNA
atggataacgtgcagccgaaaataaaacatcgccccttctgcttcagtgtgaaaggccacgtgaagatgctgcggctggatattatcaactcactggtaacaacagtattcatgctcatcgtatctgtgttggcactgatacca

SEQ ID NO: 54 - DNA, 96 bp, Homo sapiens
  source 1..96: mol_type = genomic DNA
atgccctgcctagaccaacagctcactgttcatgccctaccctgccctgcccagccctcctctctggccttctgccaagtggggttcttaacagca

SEQ ID NO: 55 - DNA, 138 bp, Homo sapiens
  source 1..138: mol_type = genomic DNA
atgaaaaccttgttcaatccagcccctgccattgctgacctggatccccagttctacaccctctcagatgtgttctgctgcaatgaaagtgaggctgagattttaactggcctcacggtgggcagcgctgcagatgct

SEQ ID NO: 56 - DNA, 57 bp, Homo sapiens
  source 1..57: mol_type = genomic DNA
atgaagcctctccttgttgtgtttgtctttcttttcctttgggatccagtgctggca

SEQ ID NO: 57 - DNA, 63 bp, Homo sapiens
  source 1..63: mol_type = genomic DNA
atgtcctgttccctaaagtttactttgattgtaatttttttttactgttggctttcatccagc

SEQ ID NO: 58 - DNA, 210 bp, Homo sapiens
  source 1..210: mol_type = genomic DNA
atggttcttactaaacctcttcaaagaaatggcagcatgatgagctttgaaaatgtgaaagaaaagagcagagaaggagggccccatgcacacacacccgaagaagaattgtgtttcgtggtaacacactaccctcaggttcagaccacactcaacctgtttttccatatattcaaggttcttactcaaccactttcccttctgtggggt

SEQ ID NO: 59 - DNA, 96 bp, Homo sapiens
  source 1..96: mol_type = genomic DNA
atggccaccccgccattccggctgataaggaagatgttttccttcaaggtgagcagatggatggggcttgcctgcttccggtccctggcggcatcc

SEQ ID NO: 60 - DNA, 87 bp, Homo sapiens
  source 1..87: mol_type = genomic DNA
atgagctttttccaactcctgatgaaaaggaaggaactcattcccttggtggtgttcatgactgtggcggcgggtggagcctcatct

SEQ ID NO: 61 - DNA, 123 bp, Homo sapiens
  source 1..123: mol_type = genomic DNA
atggtctcagctctgcggggagcacccctgatcagggtgcactcaagccctgtttcttctccttctgtgagtggaccacggaggctggtgagctgcctgtcatcccaaagctcagctctgagc

SEQ ID NO: 62 - DNA, 60 bp, Homo sapiens
  source 1..60: mol_type = genomic DNA
atgatggggtccccagtgagtcatctgctggccggcttctgtgtgtgggtcgtcttgggc

SEQ ID NO: 63 - DNA, 69 bp, Homo sapiens
  source 1..69: mol_type = genomic DNA
atggcaagcatggctgccgtgctcacctgggctctggctcttctttcagcgttttcggccacccaggca

SEQ ID NO: 64 - DNA, 135 bp, Homo sapiens
  source 1..135: mol_type = genomic DNA
atggtgctcatgtggaccagtggtgacgccttcaagacggcctacttcctgctgaagggtgcccctctgcagttctccgtgtgcggcctgctgcaggtgctggtggacctggccatcctggggcaggcctacgcc

SEQ ID NO: 65 - DNA, 204 bp, Homo sapiens
  source 1..204: mol_type = genomic DNA
atggattttgtcgctggagccatcggaggcgtctgcggtgttgctgtgggctaccccctggacacggtgaaggtcaggatccagacggagccaaagtacacaggcatctggcactgcgtccgggatacgtatcaccgagagcgcgtgtggggcttctaccggggcctctcgctgcccgtgtgcacggtgtccctggtatcttcc

SEQ ID NO: 66 - DNA, 147 bp, Homo sapiens
  source 1..147: mol_type = genomic DNA
atggagaagcccctcttcccattagtgcctttgcattggtttggctttggctacacagcactggttgtttctggtgggatcgttggctatgtaaaaacaggcagcgtgccgtccctggctgcagggctgctcttcggcagtctagcc

SEQ ID NO: 67 - DNA, 45 bp, Homo sapiens
  source 1..45: mol_type = genomic DNA
atgggtctgctccttcccctggcactctgcatcctagtcctgtgc

SEQ ID NO: 68 - DNA, 78 bp, Homo sapiens
  source 1..78: mol_type = genomic DNA
atggggatccagacgagccccgtcctgctggcctccctgggggtggggctggtcactctgctcggcctggctgtgggc

SEQ ID NO: 69 - DNA, 75 bp, Homo sapiens
  source 1..75: mol_type = genomic DNA
atgtcggacctgctactactgggcctgattgggggcctgactctcttactgctgctgacgctgctagcctttgcc

SEQ ID NO: 70 - DNA, 87 bp, Homo sapiens
  source 1..87: mol_type = genomic DNA
atggagactgtggtgattgttgccataggtgtgctggccaccatgtttctggcttcgtttgcagccttggtgctggtttgcaggcag

SEQ ID NO: 71 - DNA, 105 bp, Homo sapiens
  source 1..105: mol_type = genomic DNA
atgcgcggctctgtggagtgcacctggggttgggggcactgtgcccccagccccctgctcctttggactctacttctgtttgcagccccatttggcctgctgggg

SEQ ID NO: 72 - DNA, 171 bp, Homo sapiens
  source 1..171: mol_type = genomic DNA
atgatgccgtcccgtaccaacctggctactggaatccccagtagtaaagtgaaatattcaaggctctccagcacagacgatggctacattgaccttcagtttaagaaaacccctcctaagatcccttataaggccatcgcacttgccactgtgctgtttttgattggcgcc

SEQ ID NO: 73 - DNA, 108 bp, Homo sapiens
  source 1..108: mol_type = genomic DNA
atggccctgccccagatgtgtgacgggagccacttggcctccaccctccgctattgcatgacagtcagcggcacagtggttctggtggccgggacgctctgcttcgct

SEQ ID NO: 74 - DNA, 63 bp, unidentified
  misc_feature 1..63: note = Description of Unknown: Bacterial signal sequence
  source 1..63: mol_type = unassigned DNA
tgaaaaagtggttcgttgctgccggcatcggcgctgccggactcatgctctccagcgccgcca

SEQ ID NO: 75 - DNA, 63 bp, unidentified
  misc_feature 1..63: note = Description of Unknown: Bacterial signal sequence
  source 1..63: mol_type = unassigned DNA
atgaaacagagcaccattgcgctggcgctgctgccgctgctgtttaccccggtgaccaaagcg

SEQ ID NO: 76 - DNA, 63 bp, unidentified
  misc_feature 1..63: note = Description of Unknown: Bacterial signal sequence
  source 1..63: mol_type = unassigned DNA
atgaaaaaaaccgcgattgcgattgcggtggcgctggcgggctttgcgaccgtggcgcaggcg

SEQ ID NO: 77 - DNA, 63 bp, unidentified
  misc_feature 1..63: note = Description of Unknown: Bacterial signal sequence
  source 1..63: mol_type = unassigned DNA
atgaaaaaactgatgctggcgattttttttagcgtgctgagctttccgagctttagccagagc

SEQ ID NO: 78 - DNA, 69 bp, unidentified
  misc_feature 1..69: note = Description of Unknown: Bacterial signal sequence
  source 1..69: mol_type = unassigned DNA
atgaaaaaaaacattgcgtttctgctggcgagcatgtttgtgtttagcattgcgaccaacgcgtatgcg

SEQ ID NO: 79 - DNA, 96 bp, Homo sapiens
  source 1..96: mol_type = genomic DNA
atgtttgcgaaacgctttaaaaccagcctgctgccgctgtttgcgggctttctgctgctgtttcatctggtgctggcgggcccggcggcggcgagc

SEQ ID NO: 80 - DNA, 57 bp, Homo sapiens
  source 1..57: mol_type = genomic DNA
atgcgctttccgagcatttttaccgcggtgctgtttgcggcgagcagcgcgctggcg

SEQ ID NO: 81 - DNA, 57 bp, Homo sapiens
  source 1..57: mol_type = genomic DNA
atgcgctttccgagcatttttaccaccgtgctgtttgcggcgagcagcgcgctggcg

SEQ ID NO: 82 - DNA, 57 bp, Homo sapiens
  source 1..57: mol_type = genomic DNA
atgcgctttccgagcatttttaccagcgtgctgtttgcggcgagcagcgcgctggcg

SEQ ID NO: 83 - DNA, 57 bp, Homo sapiens
  source 1..57: mol_type = genomic DNA
atgcgctttccgagcatttttacccatgtgctgtttgcggcgagcagcgcgctggcg

SEQ ID NO: 84 - DNA, 57 bp, Homo sapiens
  source 1..57: mol_type = genomic DNA
atgcgctttccgagcatttttaccattgtgctgtttgcggcgagcagcgcgctggcg

SEQ ID NO: 85 - DNA, 57 bp, Homo sapiens
  source 1..57: mol_type = genomic DNA
atgcgctttccgagcatttttacctttgtgctgtttgcggcgagcagcgcgctggcg

SEQ ID NO: 86 - DNA, 57 bp, Homo sapiens
  source 1..57: mol_type = genomic DNA
atgcgctttccgagcatttttaccgaagtgctgtttgcggcgagcagcgcgctggcg

SEQ ID NO: 87 - DNA, 57 bp, Homo sapiens
  source 1..57: mol_type = genomic DNA
atgcgctttccgagcatttttaccggcgtgctgtttgcggcgagcagcgcgctggcg

SEQ ID NO: 88 - DNA, 63 bp, Homo sapiens
  source 1..63: mol_type = genomic DNA
atgcgttcctcccccctcctccgctccgccgttgtggccgccctgccggtgttggcccttgcc

SEQ ID NO: 89 - DNA, 66 bp, synthetic construct
  source 1..66: mol_type = other DNA
atgggcgcggcggccgtgcgctggcacttgtgcgtgctgctggccctgggcacacgcgggcggctg

SEQ ID NO: 90 - DNA, 53 bp, synthetic construct
  misc_feature 1..53: note = Description of Artificial Sequence: Synthetic signal sequence
  source 1..53: mol_type = other DNA
atgaggagctcccttgtgctgttctttgtctctgcgtggacggccttggccag

SEQ ID NO: 91 - DNA, 96 bp, Homo sapiens
  source 1..96: mol_type = genomic DNA
atgctcaggggtccgggacccgggcggctgctgctgctagcagtcctgtgcctggggacatcggtgcgctgcaccgaaaccgggaagagcaagagg

SEQ ID NO: 92 - DNA, 69 bp, Homo sapiens
  source 1..69: mol_type = genomic DNA
atgcttaggggtccggggcccgggctgctgctgctggccgtccagctggggacagcggtgccctccacg

SEQ ID NO: 93 - DNA, 93 bp, Homo sapiens
  source 1..93: mol_type = genomic DNA
atgcgccggggggccctgaccgggctgctcctggtcctgtgcctgagtgttgtgctacgtgcagccccctctgcaacaagcaagaagcgcagg

SEQ ID NO: 94 - protein, 24 aa, Homo sapiens
MMPSSVSWGILLAGLCCLVPVSLA

SEQ ID NO: 95 - protein, 30 aa, Homo sapiens
MAGPATQSPMKLMALQLLLWHSALWTVQEA

SEQ ID NO: 96 - protein, 46 aa, Homo sapiens
MQRVNMIMAESPSLITICLLGYLLSAECTVFLDHENANKILNRPKR

SEQ ID NO: 97 - protein, 21 aa, Homo sapiens
MKGSLLLLLVSNLLLCQSVAP

SEQ ID NO: 98 - protein, 24 aa, Homo sapiens
MKWVTFISLLFLFSSAYSRGVFRR

SEQ ID NO: 99 - protein, 19 aa, Homo sapiens
MWWRLWWLLLLLLLLPMWA

SEQ ID NO: 100 - protein, 32 aa, Homo sapiens
MLFNLRILLNNAAFRNGHNFMVRNFRCGQPLQ

SEQ ID NO: 101 - protein, 29 aa, Homo sapiens
MSVLTPLLLRGLTGSARRLPVPRAKIHSL

SEQ ID NO: 102 - protein, 29 aa, Homo sapiens
MSVLTPLLLRGLTGSARRLPVPRAKIHSL

SEQ ID NO: 103 - protein, 59 aa, unidentified
  REGION 1..59: note = Description of Unknown: Bacterial signal sequence
VTKITLSPQNFRIQKQETTLLKEKSTEKNSLAKSILAVKNHFIELRSKLSERFISHKNT

SEQ ID NO: 104 - protein, 23 aa, unidentified
  REGION 1..23: note = Description of Unknown: Viral signal sequence
MLSFVDTRTLLLLAVTSCLATCQ

SEQ ID NO: 105 - protein, 32 aa, unidentified
  REGION 1..32: note = Description of Unknown: Viral signal sequence
MGSSQAPRMGSVGGHGLMALLMAGLILPGILA

SEQ ID NO: 106 - protein, 17 aa, unidentified
  REGION 1..17: note = Description of Unknown: Viral signal sequence
MAGIFYFLFSFLFGICD

SEQ ID NO: 107 - protein, 22 aa, unidentified
  REGION 1..22: note = Description of Unknown: Viral signal sequence
MENRLLRVFLVWAALTMDGASA

SEQ ID NO: 108 - protein, 27 aa, unidentified
  REGION 1..27: note = Description of Unknown: Viral signal sequence
MARQGCFGSYQVISLFTFAIGVNLCLG

SEQ ID NO: 109 - protein, 19 aa, unidentified
  REGION 1..19: note = Description of Unknown: Bacterial signal sequence
MSRLPVLLLLQLLVRPGLQ

SEQ ID NO: 110 - protein, 29 aa, unidentified
  REGION 1..29: note = Description of Unknown: Bacterial signal sequence
MKQQKRLYARLLTLLFALIFLLPHSSASA

SEQ ID NO: 111 - protein, 22 aa, Homo sapiens
MATPLPPPSPRHLRLLRLLLSG

SEQ ID NO: 112 - protein, 18 aa, Homo sapiens
MKAPGRLVLIILCSVVFS

SEQ ID NO: 113 - protein, 13 aa, Homo sapiens
MLQLWKLLCGVLT

SEQ ID NO: 114 - protein, 13 aa, Homo sapiens
MLYLQGWSMPAVA

SEQ ID NO: 115 - protein, 48 aa, Homo sapiens
MDNVQPKIKHRPFCFSVKGHVKMLRLDIINSLVTTVFMLIVSVLALIP

SEQ ID NO: 116 - protein, 32 aa, Homo sapiens
MPCLDQQLTVHALPCPAQPSSLAFCQVGFLTA

SEQ ID NO: 117 - protein, 46 aa, Homo sapiens
MKTLFNPAPAIADLDPQFYTLSDVFCCNESEAEILTGLTVGSAADA

SEQ ID NO: 118 - protein, 19 aa, Homo sapiens
MKPLLVVFVFLFLWDPVLA

SEQ ID NO: 119 - protein, 21 aa, Homo sapiens [sequence omitted]

SEQ ID NO: 120 - protein, 70 aa, Homo sapiens
MVLTKPLQRNGSMMSFENVKEKSREGGPHAHTPEEELCFVVTHTPQVQTTLNLFFHIFKVLTQPLSLLWG

SEQ ID NO: 121 - protein, 32 aa, Homo sapiens
MATPPFRLIRKMFSFKVSRWMGLACFRSLAAS

SEQ ID NO: 122 - protein, 29 aa, Homo sapiens
MSFFQLLMKRKELIPLVVFMTVAAGGASS

SEQ ID NO: 123 - protein, 41 aa, Homo sapiens
MVSALRGAPLIRVHSSPVSSPSVSGPAALVSCLSSQSSALS

SEQ ID NO: 124 - protein, 20 aa, Homo sapiens
MMGSPVSHLLAGFCVWVVLG

SEQ ID NO: 125 - protein, 23 aa, Homo sapiens
MASMAAVLTWALALLSAFSATQA

SEQ ID NO: 126 - protein, 45 aa, Homo sapiens
MVLMWTSGDAFKTAYFLLKGAPLQFSVCGLLQVLVDLAILGQATA

SEQ ID NO: 127 - protein, 68 aa, Homo sapiens
MDFVAGAIGGVCGVAVGYPLDTVKVRIQTEPLYTGIWHCVRDTYHRERVWGFYRGLSLPVCTVSLVSS

SEQ ID NO: 128 - protein, 49 aa, Homo sapiens
MEKPLFPLVPLHWFGFGYTALVVSGGIVGYVKTGSVPSLAAGLLFGSLA

SEQ ID NO: 129 - protein, 15 aa, Homo sapiens
MGLLLPLALCILVLC

SEQ ID NO: 130 - protein, 26 aa, Homo sapiens
MGIQTSPVLLASLGVGLVTLLGLAVG

SEQ ID NO: 131 - protein, 25 aa, Homo sapiens
MSDLLLLGLIGGLTLLLLLTLLAFA

SEQ ID NO: 132 - protein, 29 aa, Homo sapiens
METVVIVAIGVLATIFLASFAALVLVCRQ

SEQ ID NO: 133 - protein, 35 aa, Homo sapiens
MAGSVECTWGWGHCAPSPLLLWTLLLFAAPFGLLG

SEQ ID NO: 134 - protein, 57 aa, Homo sapiens
MMPSRTNLATGIPSSKVKYSRLSSTDDGYIDLQFKKTPPKIPYKAIALATVLFLIGA

SEQ ID NO: 135 - protein, 36 aa, Homo sapiens
MALPQMCDGSHLASTLRYCMTVSGTVVLVAGTLCFA

SEQ ID NO: 136 - protein, 21 aa, Homo sapiens
MKKWFVAAGIGAGLLMLSSAA

SEQ ID NO: 137 - protein, 21 aa, Homo sapiens
MKQSTIALALLPLLFTPVTKA

SEQ ID NO: 138 - protein, 21 aa, Homo sapiens
MKKTAIAIAVALAGFATVAQA

SEQ ID NO: 139 - protein, 21 aa, unidentified
  REGION 1..21: note = Description of Unknown: Bacterial signal sequence
MKKLMLAIFFSVLSFPSFSQS

SEQ ID NO: 140 - protein, 23 aa, unidentified
  REGION 1..23: note = Description of Unknown: Bacterial signal sequence
MKKNIAFLLASMFVFSIATNAYA

SEQ ID NO: 141 - protein, 32 aa, Homo sapiens
MFAKRFKTSLLPLFAGFLLLFHLVLAGPAAAS

SEQ ID NO: 142 - protein, 19 aa, Homo sapiens
MRFPSIFTAVLFAASSALA

SEQ ID NO: 143 - protein, 19 aa, Homo sapiens
MRFPSIFTTVLFAASSALA

SEQ ID NO: 144 - protein, 19 aa, Homo sapiens
MRFPSIFTSVLFAASSALA

SEQ ID NO: 145 - protein, 19 aa, Homo sapiens
MRFPSIFTHVLFAASSALA

SEQ ID NO: 146 - protein, 19 aa, Homo sapiens
MRFPSIFTIVLFAASSALA

SEQ ID NO: 147 - protein, 19 aa, Homo sapiens
MRFPSIFTFVLFAASSALA

SEQ ID NO: 148 - protein, 19 aa, Homo sapiens
MRFPSIFTEVLFAASSALA

SEQ ID NO: 149 - protein, 19 aa, Homo sapiens
MRFPSIFTGVLFAASSALA

SEQ ID NO: 150 - protein, 21 aa, Homo sapiens
MRSSPLLRSAVVAALPVLALA

SEQ ID NO: 151 - protein, 22 aa, Homo sapiens
MGAAAVRWHLCVLLALGTRGRL

SEQ ID NO: 152 - protein, 17 aa, synthetic construct
  REGION 1..17: note = Description of Artificial Sequence: Synthetic signal sequence
MRSSLVLFFVSAWTALA

SEQ ID NO: 153 - protein, 32 aa, Homo sapiens
MLRGPGPGRLLLLAVLCLGTSVRCTETGKSKR

SEQ ID NO: 154 - protein, 26 aa, Homo sapiens
MLRGPGPGLLLLAVQCLGTAVPSTGA

SEQ ID NO: 155 - protein, 31 aa, Homo sapiens
MRRGALTGLLLVLCLSVVLRAAPSATSKKRR

SEQ ID NO: 156 - DNA, 4585 bp, Homo sapiens
  source 1..4585: mol_type = genomic DNA
ctcttattggtcgaaggctcgtccagctccgagcgtgcgtaaggtgagggctccttccgctccgcgactgcgttaactggagccaggctgagcgtcggcgccggggttcggtggcctctagtgagatctggaggatccaaggattctgtagctacaatgttgtcaagactttttcgaatgcatggcctctttgtggcctcccatccctgggaagtcatagtggggacagtgacactgaccatctgcatgatgtccatgaacatgtttactggtaacaataagatctgtggttggaattatgaatgtccaaagtttgaagaggatgttttgagcagtgacattataattctgacaataacacgatgcatagccatcctgtatatttacttccagttccagaatttacgtcaacttggatcaaaatatattttgggtattgctggccttttcacaattttctcaagttttgtattcagtacagttgtcattcacttcttagacaaagaattgacaggcttgaatgaagctttgccctttttcctacttttgattgacctttccagagcaagcacattagcaaagtttgccctcagttccaactcacaggatgaagtaagggaaaatattgctcgtggaatggcaattttaggtcctacgtttaccctcgatgctcttgttgaatgtcttgtgattggagttggtaccatgtcaggggtacgtcagcttgaaattatgtgctgctttggctgcatgtcagttcttgccaactacttcgtgttcatgactttcttcccagcttgtgtgtccttggtattagagctttctcgggaaagccgcgagggtcgtccaatttggcagctcagccattttgcccgagttttagaagaagaagaaaataagccgaatcctgtaactcagagggtcaagatgattatgtctctaggcttggttcttgttcatgctcacagtcgctggatagctgatccttctcctcaaaacagtacagcagatacttctaaggtttcattaggactggatgaaaatgtgtccaagagaattgaaccaagtgtttccctctggcagttttatctctctaaaatgatcagcatggatattgaacaagttattaccctaagtttagctctccttctggctgtcaagtacatcttctttgaacaaacagagacagaatctacactctcattaaaaaaccctatcacatctcctgtagtgacacaaaagaaagtcccagacaattgttgtagacgtgaacctatgctggtcagaaataaccagaaatgtgattcagtagaggaagagacagggataaaccgagaaagaaaagttgaggttataaaacccttagtggctgaaacagataccccaaacagagctacatttgtggttggtaactcctccttactcgatacttcatcagtactggtgacacaggaacctgaaattgaacttcccagggaacctcggcctaatgaagaatgtctacagatacttgggaatgcagagaaaggtgcaaaattccttagtgatgctgagatcatccagttagtcaatgctaagcatatcccagcctacaagttggaaactctgatggaaactcatgagcgtggtgtatctattcgccgacagttactttccaagaagctttcagaaccttcttctctccagtacctaccttacagggattataattactccttggtgatgggagcttgttgtgagaatgttattggatatatgcccatccctgttggagtggcaggacccctttgcttagatgaaaaagaatttcaggttccaatggcaacaacagaaggttgtcttgtggccagcaccaatagaggctgcagagcaataggtcttggtggaggtgccagcagccgagtccttgcagatgggatgactcgtggcccagttgtgcgtcttccacgtgcttgtgactctgcagaagtgaaagcctggctcgaaacatctgaagggttcgcagtgataaaggaggcatttgacagcactagcagatttgcacgtctacagaaacttcatacaagtatagctggacgcaacctttatatccgtttccagtccaggtcaggggatgccatggggatgaacatgatttcaaagggtacagagaaagcactttcaaaacttcacgagtatttccctgaaatgcagattctagccgttagtggtaactattgtactgacaagaaacctgctgctataaattggatagagggaagaggaaaatctgttgtttgtgaagctgtcattccagccaaggttgtcagagaagtattaaagactaccacagaggctatgattgaggtcaacattaacaagaatttagtgggctctgccatggctgggagcataggaggctacaacgcccatgcagcaaacattgtcaccgccatctacattgcctgtggacaggatgcagcacagaatgttggtagttcaaactgtattactttaatggaagcaagtggtcccacaaatgaagatttatatatcagctgcaccatgccatctatagagataggaacggtgggtggtgggaccaacctactacctcagcaagcctgtttgcagatgctaggtgttcaaggagcatgcaaagataatcctggggaaaatgcccggcagcttgcccgaattgtgtgtgggaccgtaatggctggggaattgtcacttatggcagcattggcagcaggacatcttgtcaaaagtcacatgattcacaacaggtcgaagatcaatttacaagacctccaaggagcttgcaccaagaagacagcctgaatagcccgacagttctgaactggaacatgggcattgggttctaaaggactaacataaaatctgtgaattaaaaaagctcaatgcattgtcttgtggaggatgaatagatgtgatcactgagacagccacttggtttttggctctttcagagaggtctcaggttctttccatgcagactcctcagatctgaacacagtttagtgctttacatgctgtgctctttgaagagatttcaacaagaatattgtatgttaaagcatcagagatggtaatctacagctcacctctgaaggcaaatataagctgggaaaaaagttttgatgaaattcttgaagttcatggtgatcagtgcaattgaccttctccctcactcctgccagttgaaaatggatttttaaattatactgtagctgatgaaactcctgattttgtagttaatttattaagtctgggatgtagaacttcaagaagtaagagctaagttctaagttcatgtttgtaaattaatacttcatttggtgctggtctattttgattttggggggtaatcagcattattcttcagaaggggacctgttttcttcaagggaagaaacactcttattcccaaactacagaataatgtgttaaacatgctaaatagttctatcaggaaaacaaatcactgtatttatctccgcaggctatttgttcagagaggccttttgtttaaatataaatgtttaaatataaatgtttgtctggattggctataacatgtctttcagcattaggcttttaagaaacacagggttttgtattctttactaaagatatcagagctcttaatgttgcttagatgagggtgactgtcaagtacaagcaagactgggaccttagaaatcattgtagaaacacagttttgaaagaaaaataccatgtctctaagccaactttaattgcttaaaagacatttttatttagttgaaaaatctagttttttttgtaaactgtatcaaatctgtatatgttgtaataaaacttatgctagtttattggaagtgttcaagaaataaaaatcaacttgtgtactgataaaatactctagcctgggccagagaagataatgttctttaatgttgtccaggaaaccctggcttgcttgccgagcctaatgaaagggaaagtcagctttcagagccagtgaaggagccacgtgaatggccctagaactgtgcctagttcctgtggccaggaggttggtgactgaaacattcacacagggctctttgatggacccacgaacgctcttagctttctcagggggtcagcagagttattgaatcttaattttttttaatgtacaagttttgtataaataataaagaactccttattttgtattacatctaatgcttcaagtgttgctcttggaaagctgatgatgtctcttgtagaagatggactctgaaaaacattccaggaaaccatggcagcatggagagcctcttagtgattgtgtctgcattgttattgtggaagatttaccttttctgttgtacgtaaagcttaaattgcttttgttgtgactttttagccagtgactttttctgagcttttcatggaagtggcagtgaaaaatatgttgagtgttcattttagtgactgtaattaatatcttgctggattaatgttttgtacaattactaaattgtatacattttgttatagaatacttttttctagtttcagtaaataatgaaaaggaagttaataccaataa

SEQ ID NO: 157 - DNA, 3681 bp, Homo sapiens
  source 1..3681: mol_type = genomic DNA
cgactgcgttaactggagccaggctgagcgtcggcgccggggttcggtggcctctagtgagatctggaggatccaaggattctgtagctacaatgttgtcaagactttttcgaatgcatggcctctttgtggcctcccatccctgggaagtcatagtggggacagtgacactgaccatctgcatgatgtccatgaacatgtttactggtaacaataagatctgtggttggaattatgaatgtccaaagtttgaagaggatgttttgagcagtgacattataattctgacaataacacgatgcatagccatcctgtatatttacttccagttccagaatttacgtcaacttggatcaaaatatattttgggtattgctggccttttcacaattttctcaagttttgtattcagtacagttgtcattcacttcttagacaaagaattgacaggcttgaatgaagctttgccctttttcctacttttgattgacctttccagagcaagcacattagcaaagtttgccctcagttccaactcacaggatgaagtaagggaaaatattgctcgtggaatggcaattttaggtcctacgtttaccctcgatgctcttgttgaatgtcttgtgattggagttggtaccatgtcaggggtacgtcagcttgaaattatgtgctgctttggctgcatgtcagttcttgccaactacttcgtgttcatgactttcttcccagcttgtgtgtccttggtattagagctttctcgggaaagccgcgagggtcgtccaatttggcagctcagccattttgcccgagttttagaagaagaagaaaataagccgaatcctgtaactcagagggtcaagatgattatgtctctaggcttggttcttgttcatgctcacagtcgctggatagctgatccttctcctcaaaacagtacagcagatacttctaaggtttcattaggactggatgaaaatgtgtccaagagaattgaaccaagtgtttccctctggcagttttatctctctaaaatgatcagcatggatattgaacaagttattaccctaagtttagctctccttctggctgtcaagtacatcttctttgaacaaacagagacagaatctacactctcattaaaaaaccctatcacatctcctgtagtgacacaaaagaaagtcccagacaattgttgtagacgtgaacctatgctggtcagaaataaccagaaatgtgattcagtagaggaagagacagggataaaccgagaaagaaaagttgaggttataaaacccttagtggctgaaacagataccccaaacagagctacatttgtggttggtaactcctccttactcgatacttcatcagtactggtgacacaggaacctgaaattgaacttcccagggaacctcggcctaatgaagaatgtctacagatacttgggaatgcagagaaaggtgcaaaattccttagtgatgctgagatcatccagttagtcaatgctaagcatatcccagcctacaagttggaaactctgatggaaactcatgagcgtggtgtatctattcgccgacagttactttccaagaagctttcagaaccttcttctctccagtacctaccttacagggattataattactccttgcttggtggaggtgccagcagccgagtccttgcagatgggatgactcgtggcccagttgtgcgtcttccacgtgcttgtgactctgcagaagtgaaagcctggctcgaaacatctgaagggttcgcagtgataaaggaggcatttgacagcactagcagatttgcacgtctacagaaacttcatacaagtatagctggacgcaacctttatatccgtttccagtccaggtcaggggatgccatggggatgaacatgatttcaaagggtacagagaaagcactttcaaaacttcacgagtatttccctgaaatgcagattctagccgttagtggtaactattgtactgacaagaaacctgctgctataaattggatagagggaagaggaaaatctgttgtttgtgaagctgtcattccagccaaggttgtcagagaagtattaaagactaccacagaggctatgattgaggtcaacattaacaagaatttagtgggctctgccatggctgggagcataggaggctacaacgcccatgcagcaaacattgtcaccgccatctacattgcctgtggacaggatgcagcacagaatgttggtagttcaaactgtattactttaatggaagcaagtggtcccacaaatgaagatttatatatcagctgcaccatgccatctatagagataggaacggtgggtggtgggaccaacctactacctcagcaagcctgtttgcagatgctaggtgttcaaggagcatgcaaagataatcctggggaaaatgcccggcagcttgcccgaattgtgtgtgggaccgtaatggctggggaattgtcacttatggcagcattggcagcaggacatcttgtcaaaagtcacatgattcacaacaggtcgaagatcaatttacaagacctccaaggagcttgcaccaagaagacagcctgaatagcccgacagttctgaactggaacatgggcattgggttctaaaggactaacataaaatctgtgaattaaaaaagctcaatgcattgtcttgtggaggatgaatagatgtgatcactgagacagccacttggtttttggctctttcagagaggtctcaggttctttccatgcagactcctcagatctgaacacagtttagtgctttacatgctgtgctctttgaagagatttcaacaagaatattgtatgttaaagcatcagagatggtaatctacagctcacctctgaaggcaaatataagctgggaaaaaagttttgatgaaattcttgaagttcatggtgatcagtgcaattgaccttctccctcactcctgccagttgaaaatggatttttaaattatactgtagctgatgaaactcctgattttgtagttaatttattaagtctgggatgtagaacttcaagaagtaagagctaagttctaagttcatgtttgtaaattaatacttcatttggtgctggtctattttgattttggggggtaatcagcattattcttcagaaggggacctgttttcttcaagggaagaaacactcttattcccaaactacagaataatgtgttaaacatgctaaatagttctatcaggaaaacaaatcactgtatttatctccgcaggctatttgttcagagaggccttttgtttaaatataaatgtttaaatataaatgtttgtctggattggctataacatgtctttcagcattaggcttttaagaaacacagggttttgtattctttactaaagatatcagagctcttaatgttgcttagatgagggtgactgtcaagtacaagcaagactgggaccttagaaatcattgtagaaacacagttttgaaagaaaaataccatgtctctaagccaactttaattgcttaaaagacatttttatttagttgaaaaatctagttttttttgtaaactgtatcaaatctgtatatgttgtaataaaacttatgctagtttattggaagtgttcaagaaataaaaatcaacttgtgtactgataaaata

SEQ ID NO: 158 - DNA, 2555 bp, Homo sapiens
  source 1..2555: mol_type = genomic DNA
atgttgtcaagactttttcgaatgcatggcctctttgtggcctcccatccctgggaagtcatagtggggacagtgacactgaccatctgcatgatgtccatgaacatgtttactgaaggtacagagaaagcactttcaaaacttcacgagtatttccctgaaatgcagattctagccgttagtggtaactattgtactgacaagaaacctgctgctataaattggatagagggaagaggaaaatctgttgtttgtgaagctgtcattccagccaaggttgtcagagaagtattaaagactaccacagaggctatgattgaggtcaacattaacaagaatttagtgggctctgccatggctgggagcataggaggctacaacgcccatgcagcaaacattgtcaccgccatctacattgcctgtggacaggatgcagcacagaatgttggtagttcaaactgtattactttaatggaagcaagtggtcccacaaatgaagatttatatatcagctgcaccatgccatctatagagataggaacggtgggtggtgggaccaacctactacctcagcaagcctgtttgcagatgctaggtgttcaaggagcatgcaaagataatcctggggaaaatgcccggcagcttgcccgaattgtgtgtgggaccgtaatggctggggaattgtcacttatggcagcattggcagcaggacatcttgtcaaaagtcacatgattcacaacaggtcgaagatcaatttacaagacctccaaggagcttgcaccaagaagacagcctgaatagcccgacagttctgaactggaacatgggcattgggttctaaaggactaacataaaatctgtgaattaaaaaagctcaatgcattgtcttgtggaggatgaatagatgtgatcactgagacagccacttggtttttggctctttcagagaggtctcaggttctttccatgcagactcctcagatctgaacacagtttagtgctttacatgctgtgctctttgaagagatttcaacaagaatattgtatgttaaagcatcagagatggtaatctacagctcacctctgaaggcaaatataagctgggaaaaaagttttgatgaaattcttgaagttcatggtgatcagtgcaattgaccttctccctcactcctgccagttgaaaatggatttttaaattatactgtagctgatgaaactcctgattttgtagttaatttattaagtctgggatgtagaacttcaagaagtaagagctaagttctaagttcatgtttgtaaattaatacttcatttggtgctggtctattttgattttggggggtaatcagcattattcttcagaaggggacctgttttcttcaagggaagaaacactcttattcccaaactacagaataatgtgttaaacatgctaaatagttctatcaggaaaacaaatcactgtatttatctccgcaggctatttgttcagagaggccttttgtttaaatataaatgtttaaatataaatgtttgtctggattggctataacatgtctttcagcattaggcttttaagaaacacagggttttgtattctttactaaagatatcagagctcttaatgttgcttagatgagggtgactgtcaagtacaagcaagactgggaccttagaaatcattgtagaaacacagttttgaaagaaaaataccatgtctctaagccaactttaattgcttaaaagacatttttatttagttgaaaaatctagttttttttgtaaactgtatcaaatctgtatatgttgtaataaaacttatgctagtttattggaagtgttcaagaaataaaaatcaacttgtgtactgataaaatactctagcctgggccagagaagataatgttctttaatgttgtccaggaaaccctggcttgcttgccgagcctaatgaaagggaaagtcagctttcagagccagtgaaggagccacgtgaatggccctagaactgtgcctagttcctgtggccaggaggttggtgactgaaacattcacacagggctctttgatggacccacgaacgctcttagctttctcagggggtcagcagagttattgaatcttaattttttttaatgtacaagttttgtataaataataaagaactccttattttgtattacatctaatgcttcaagtgttgctcttggaaagctgatgatgtctcttgtagaagatggactctgaaaaacattccaggaaaccatggcagcatggagagcctcttagtgattgtgtctgcattgttattgtggaagatttaccttttctgttgtacgtaaagcttaaattgcttttgttgtgactttttagccagtgactttttctgagcttttcatggaagtggcagtgaaaaatatgttgagtgttcattttagtgactgtaattaatatcttgctggattaatgttttgtacaattactaaattgtatacattttgttatagaatacttttttctagtttcagtaaataatgaaaaggaagttaatacc

SEQ ID NO: 159 - DNA, 268 bp, Homo sapiens
  source 1..268: mol_type = genomic DNA
gagatcccgccactgcactccagcctgggcgacagagcgagactccgtctcaaaaaaaaaaaaaaaaaaaaattaatttttattgcagcattgcataaatactgtcaacttaatttgcaggagctatcctgtagcctgcttgtgacatttgcaactgctgatgaaggtggacgattgaattctatggcatgatccaaggattctgtagctacaatgttgtcaagactttttcgaatgcatggcctctttgtggcctcccatccctggg

SEQ ID NO: 160 - DNA, 527 bp, Homo sapiens
  source 1..527: mol_type = genomic DNA
agaacagttaatttctgcagtaggaggaggtcgatgtactccattcttaagtagtcgtttgaaatatttcaggatttgaggatattccttcttagacatggtcctgcagagtcgtaggaagcatttgtttctgggctatactaaatgtgcatgatttcggcgtcccacaaggatccaaggattctgtagctacaatgttgtcaagactttttcgaatgcatggcctctttgtggcctcccatccctgggaagtcatagtggggacagtgacactgaccatctgcatgatgtccatgaacatgtttactggtaacaataagatctgtggttggaattatgaatgtccaaagtttgaagaggatgttttgagcagtgacattataattctgacaataacacgatgcatagccatcctgtatatttacttccagttccagaatttacgtcaacttggatcaaaatatattttgggtattgctggccttttcacaattttctcaagttttgtattcagtacagttgtcatt

SEQ ID NO: 161 - DNA, 3395 bp, Homo sapiens
  source 1..3395: mol_type = genomic DNA
ctttctttaatccagtagacaatgagaaacgctgatttgggtctatggcataataggaagtagtatgccacatactgcatgtgggagttctgcaggacagattgggaagtgcatgcgtgtaagactgggaagaccagttaggagaggctattgcactgttttaagtaagacataataaagccctgcaccaggcggagagcagaaggaacgcacagaagacgcaggagaggcacatttcagagagaatccagtatgcaatggatgtcgcacacaagagagagagacgcaggatccaaggattctgtagctacaatgttgtcaagactttttcgaatgcatggcctctttgtggcctcccatccctgggaagtcatagtggggacagtgacactgaccatctgcatgatgtccatgaacatgtttactggtaacaataagatctgtggttggaattatgaatgtccaaagtttgaagaggatgttttgagcagtgacattataattctgacaataacacgatgcatagccatcctgtatatttacttccagttccagaatttacgtcaacttggatcaaaatatattttgggtattgctggccttttcacaattttctcaagttttgtattcagtacagttgtcattcacttcttagacaaagaattgacaggcttgaatgaagctttgccctttttcctacttttgattgacctttccagagcaagcacattagcaaagtttgccctcagttccaactcacaggatgaagtaagggaaaatattgctcgtggaatggcaattttaggtcctacgtttaccctcgatgctcttgttgaatgtcttgtgattggagttggtaccatgtcaggggtacgtcagcttgaaattatgtgctgctttggctgcatgtcagttcttgccaactacttcgtgttcatgactttcttcccagcttgtgtgtccttggtattagagctttctcgggaaagccgcgagggtcgtccaatttggcagctcagccattttgcccgagttttagaagaagaagaaaataagccgaatcctgtaactcagagggtcaagatgattatgtctctaggcttggttcttgttcatgctcacagtcgctggatagctgatccttctcctcaaaacagtacagcagatacttctaaggtttcattaggactggatgaaaatgtgtccaagagaattgaaccaagtgtttccctctggcagttttatctctctaaaatgatcagcatggatattgaacaagttattaccctaagtttagctctccttctggctgtcaagtacatcttctttgaacaaacagagacagaatctacactctcattaaaaaaccctatcacatctcctgtagtgacacaaaagaaagtcccagacaattgttgtagacgtgaacctatgctggtcagaaataaccagaaatgtgattcagtagaggaagagacagggataaaccgagaaagaaaagttgaggttataaaacccttagtggctgaaacagataccccaaacagagctacatttgtggttggtaactcctccttactcgatacttcatcagtactggtgacacaggaacctgaaattgaacttcccagggaacctcggcctaatgaagaatgtctacagatacttgggaatgcagagaaaggtgcaaaattccttagtgatgctgagatcatccagttagtcaatgctaagcatatcccagcctacaagttggaaactctgatggaaactcatgagcgtggtgtatctattcgccgacagttactttccaagaagctttcagaaccttcttctctccagtacctaccttacagggattataattactccttggtgatgggagcttgttgtgagaatgttattggatatatgcccatccctgttggagtggcaggacccctttgcttagatgaaaaagaatttcaggttccaatggcaacaacagaaggttgtcttgtggccagcaccaatagaggctgcagagcaataggtcttggtggaggtgccagcagccgagtccttgcagatgggatgactcgtggcccagttgtgcgtcttccacgtgcttgtgactctgcagaagtgaaagcctggctcgaaacatctgaagggttcgcagtgataaaggaggcatttgacagcactagcagatttgcacgtctacagaaacttcatacaagtatagctggacgcaacctttatatccgtttccagtccaggtcaggggatgccatggggatgaacatgatttcaaagggtacagagaaagcactttcaaaacttcacgagtatttccctgaaatgcagattctagccgttagtggtaactattgtactgacaagaaacctgctgctataaattggatagagggaagaggaaaatctgttgtttgtgaagctgtcattccagccaaggttgtcagagaagtattaaagactaccacagaggctatgattgaggtcaacattaacaagaatttagtgggctctgccatggctgggagcataggaggctacaacgcccatgcagcaaacattgtcaccgccatctacattgcctgtggacaggatgcagcacagaatgttggtagttcaaactgtattactttaatggaagcaagtggtcccacaaatgaagatttatatatcagctgcaccatgccatctatagagataggaacggtgggtggtgggaccaacctactacctcagcaagcctgtttgcagatgctaggtgttcaaggagcatgcaaagataatcctggggaaaatgcccggcagcttgcccgaattgtgtgtgggaccgtaatggctggggaattgtcacttatggcagcattggcagcaggacatcttgtcaaaagtcacatgattcacaacaggtcgaagatcaatttacaagacctccaaggagcttgcaccaagaagacagcctgaatagcccgacagttctgaactggaacatgggcattgggttctaaaggactaacataaaatctgtgaattaaaaaagctcaatgcattgtcttgtggaggatgaatagatgtgatcactgagacagccacttggtttttggctctttcagagaggtctcaggttctttccatgcagactcctcagatctgaacacagtttagtgctttacatgctgtgctctttgaagagatttcaacaagaatattgtatgttaaagcatcagagatggtaatctacagctcacctctgaaggcaaatataagctgggaaaaaagttttgatgaaattcttgaagttcatggtgatcagtgcaattgaccttctccctcactcctgccagttgaaaatggatttttaaattatactgtagctgatg

SEQ ID NO: 162 - DNA, 3394 bp, Homo sapiens
  source 1..3394: mol_type = genomic DNA
ctttctttaatccagtagacaatgagaaacgctgatttgggtctatggcataataggaagtagtatgccacatactgcatgtgggagttctgcaggacagattgggaagtgcatgcgtgtaagactgggaagaccagttaggagaggctattgcactgttttaagtaagacataataaagccctgcaccaggcggagagcagaaggaacgcacagaagacgcaggagaggcacatttcagagagaatccagtatgcaatggatgtcgcacacaagagagagagacgcaggatccaaggattctgtagctacaatgttgtcaagactttttcgaatgcatggcctctttgtggcctcccatccctgggaagtcatagtggggacagtgacactgaccatctgcatgatgtccatgaacatgtttactggtaacaataagatctgtggttggaattatgaatgtccaaagtttgaagaggatgttttgagcagtgacattataattctgacaataacacgatgcatagccatcctgtatatttacttccagttccagaatttacgtcaacttggatcaaaatatattttgggtattgctggccttttcacaattttctcaagttttgtattcagtacagttgtcattcacttcttagacaaagaattgacaggcttgaagaagctttgccctttttcctacttttgattgacctttccagagcaagcacattagcaaagtttgccctcagttccaactcacaggatgaagtaagggaaaatattgctcgtggaatggcaattttaggtcctacgtttaccctcgatgctcttgttgaatgtcttgtgattggagttggtaccatgtcaggggtacgtcagcttgaaattatgtgctgctttggctgcatgtcagttcttgccaactacttcgtgttcatgactttcttcccagcttgtgtgtccttggtattagagctttctcgggaaagccgcgagggtcgtccaatttggcagctcagccattttgcccgagttttagaagaagaagaaaataagccgaatcctgtaactcagagggtcaagatgattatgtctctaggcttggttcttgttcatgctcacagtcgctggatagctgatccttctcctcaaaacagtacagcagatacttctaaggtttcattaggactggatgaaaatgtgtccaagagaattgaaccaagtgtttccctctggcagttttatctctctaaaatgatcagcatggatattgaacaagttattaccctaagtttagctctccttctggctgtcaagtacatcttctttgaacaaacagagacagaatctacactctcattaaaaaaccctatcacatctcctgtagtgacacaaaagaaagtcccagacaattgttgtagacgtgaacctatgctggtcagaaataaccagaaatgtgattcagtagaggaagagacagggataaaccgagaaagaaaagttgaggttataaaacccttagtggctgaaacagataccccaaacagagctacatttgtggttggtaactcctccttactcgatacttcatcagtactggtgacacaggaacctgaaattgaacttcccagggaacctcggcctaatgaagaatgtctacagatacttgggaatgcagagaaaggtgcaaaattccttagtgatgctgagatcatccagttagtcaatgctaagcatatcccagcctacaagttggaaactctgatggaaactcatgagcgtggtgtatctattcgccgacagttactttccaagaagctttcagaaccttcttctctccagtacctaccttacagggattataattactccttggtgatgggagcttgttgtgagaatgttattggatatatgcccatccctgttggagtggcaggacccctttgcttagatgaaaaagaatttcaggttccaatggcaacaacagaaggttgtcttgtggccagcaccaatagaggctgcagagcaataggtcttggtggaggtgccagcagccgagtccttgcagatgggatgactcgtggcccagttgtgcgtcttccacgtgcttgtgactctgcagaagtgaaagcctggctcgaaacatctgaagggttcgcagtgataaaggaggcatttgacagcactagcagatttgcacgtctacagaaacttcatacaagtatagctggacgcaacctttatatccgtttccagtccaggtcaggggatgccatggggatgaacatgatttcaaagggtacagagaaagcactttcaaaacttcacgagtatttccctgaaatgcagattctagccgttagtggtaactattgtactgacaagaaacctgctgctataaattggatagagggaagaggaaaatctgttgtttgtgaagctgtcattccagccaaggttgtcagagaagtattaaagactaccacagaggctatgattgaggtcaacattaacaagaatttagtgggctctgccatggctgggagcataggaggctacaacgcccatgcagcaaacattgtcaccgccatctacattgcctgtggacaggatgcagcacagaatgttggtagttcaaactgtattactttaatggaagcaagtggtcccacaaatgaagatttatatatcagctgcaccatgccatctatagagataggaacggtgggtggtgggaccaacctactacctcagcaagcctgtttgcagatgctaggtgttcaaggagcatgcaaagataatcctggggaaaatgcccggcagcttgcccgaattgtgtgtgggaccgtaatggctggggaattgtcacttatggcagcattggcagcaggacatcttgtcaaaagtcacatgattcacaacaggtcgaagatcaatttacaagacctccaaggagcttgcaccaagaagacagcctgaatagcccgacagttctgaactggaacatgggcattgggttctaaaggactaacataaaatctgtgaattaaaaaagctcaatgcattgtcttgtggaggatgaatagatgtgatcactgagacagccacttggtttttggctctttcagagaggtctcaggttctttccatgcagactcctcagatctgaacacagtttagtgctttacatgctgtgctctttgaagagatttcaacaagaatattgtatgttaaagcatcagagatggtaatctacagctcacctctgaaggcaaatataagctgggaaaaaagttttgatgaaattcttgaagttcatggtgatcagtgcaattgaccttctccctcactcctgccagttgaaaatggatttttaaattatactgtagctgatg

SEQ ID NO: 163 - DNA, 7241 bp, Homo sapiens
  source 1..7241: mol_type = genomic DNA
gcggcgccgggggcggggggcggcgggcgacggggcgggcgcaggatgagggcggccattgctggggctccgcttcggggaggaggacgctgaggaggcgccgagccgcgcagcgctgcgggggaggcgcccgcgccgacgcggggcccatggccaggaccaccagccagctgtatgacgccgtgcccatccagtccagcgtggtgttatgttcctgcccatccccatcaatggtgaggacccagactgagtccagcacgccccctggcattcctggtggcagcaggcagggccccgccatggacggcactgcagccgagcctcggcccggcgccggctccctgcagcatgcccagcctccgccgcagcctcggaagaagcggcctgaggacttcaagtttgggaaaatccttggggaaggctctttttccacggttgtcctggctcgagaactggcaacctccagagaatatgcgattaaaattctggagaagcgacatatcataaaagagaacaaggtcccctatgtaaccagagagcgggatgtcatgtcgcgcctggatcaccccttctttgttaagctttacttcacatttcaggacgacgagaagctgtatttcggccttagttatgccaaaaatggagaactacttaaatatattcgcaaaatcggttcattcgatgagacctgtacccgattttacacggctgagattgtgtctgctttagagtacttgcacggcaagggcatcattcacagggaccttaaaccggaaaacattttgttaaatgaagatatgcacatccagatcacagattttggaacagcaaaagtcttatccccagagagcaaacaagccagggccaactcattcgtgggaacagcgcagtacgtttctccagagctgctcacggagaagtccgcctgtaagagttcagacctttgggctcttggatgcataatataccagcttgtggcaggactcccaccattccgagctggaaacgagtatcttatatttcagaagatcattaagttggaatatgactttccagaaaaattcttccctaaggcaagagacctcgtggagaaacttttggttttagatgccacaaagcggttaggctgtgaggaaatggaaggatacggacctcttaaagcacacccgttcttcgagtccgtcacgtgggagaacctgcaccagcagacgcctccgaagctcaccgcttacctgccggctatgtcggaagacgacgaggactgctatggcaattatgacaatctcctgagccagtttggctgcatgcaggtgtcttcgtcctcctcctcacactccctgtcagcctccgacacgggcctgccccagaggtcaggcagcaacatagagcagtacattcacgatctggactcgaactcctttgaactggacttacagttttccgaagatgagaagaggttgttgttggagaagcaggctggcggaaacccttggcaccagtttgtagaaaataatttaatactaaagatgggcccagtggataagcggaagggtttatttgcaagacgacgacagctgttgctcacagaaggaccacatttatattatgtggatcctgtcaacaaagttctgaaaggtgaaattccttggtcacaagaacttcgaccagaggccaagaattttaaaactttctttgtccacacgcctaacaggacgtattatctgatggaccccagcgggaacgcacacaagtggtgcaggaagatccaggaggtttggaggcagcgataccagagccacccggacgccgctgtgcagtgacgtggcctgcggccgggctgcccttcgctgccaggacacctgccccagcgcggcttggccgccatccgggacgcttccagaccacctgccagccatcacaaggggaacgcagaggcggaaaccttgcagcatttttatttaaaagaaaagaagaaaaaaaacacccaaccacacaaagaacaaaaccagtaacaaacacaaaggaattcagggtcgctttgcttgctctctgtgctccgtggaggcctccgtgtgccctcgttgccgtggggacccagctccatgcacgtcaacccagtcccgcccagactagtggacagacctggtgtcaccagtttttcctagcatcagtccgaaccatgcgcccgccctgccccaactgtgtgctggtcctgctgtggccgaggggaccgggtgtgtttggctctttatgcccctcccgctgtggtcctggaactcttcaccagggagggagccctgcgggggccgcagctttgtggagggagccgccgtgcttctgtcacctgctccctttcttgcgtctccctgtgatgggcccttaggcctggctgggcccattacatatccctgtggtggctctggtggcagctttctgtggcccctgctgtgttggcaggcaggtttgcgtggtgaggagcgggaggggttggagtggtgcgggagcaggctgccgagtggagggtgccatcgagggctccggatcccttatcctacttagcagtgttggtctctggggctggaagccgagcgcatgctgggagcggtactgtcagaagtgagcccagttagtaccccgctggctcactgcacgagagagtcctgccccgagccctaggtggggccaggaggtgccttggagaagccagccagagcagagagggctgctgacttccgtgtggagcagagaggcctgagggcctcctaaaaggtttaaatgtccacgcctctccagttgctgaagtagggtctgagagaaccctggcatcagcagacccagggtgcttctgtctcctgcagaccacgccagggagtgcagacaccaccgtcacacacgccccttttgtgttttggttcaagtttctcagagcccctcagagcttctacatctgtgcatcagaaatctcacagccttctcatgctgccggctcatctgggcccatagagtgggctttgccagttgctgttgcacaggaggcgagaacagcacacttcaaccccagcttgctggtcggctttcctctagagagagccggttttggggccatttccctttgatgctttggtggccttgccccgctctgcagcacagacaggccagatgcatttgtcctttgcctagctactccccaggtagagagtgctcctggtggcctggcaggtctgggcccttctctccctgcccaggttgtccctggagggcagccctcactccctttgggggagaggcagacattgctgcccacagacctgcctctgactcaactgtgtccaccctccctggtccctacccccaagtcacaggtgactcagcagtgaccctgtgtgccaggccagatccaaactgagagggaaggtgtcgtttttacactgctaatgacgagagtggctctttttagctaggcgagtacagacggggcctgggagggggcagagatgttccccaggccctgcctgtggttcctgcctgggccttggctgctgctgtgtgagagctgcatgtgagcctgtgaccgtgagctggggtgagctgggccgcacctaccctggggccccagggagcaggacgctccggggcccagcacgttgccctgggcctgtggccggagtcggagtcctctctcctcctcctggcttttggaaaggcttggctgtgttggggagtctctcttagccctttcaggaatttctgttcaggcttcctcctcctcatcagctattttacccatctcagaacgtcctgtgtctccatgtaggagagtggctctctcagatctctcagggcgtctggttatagggaaacaagtggagcagggacgtggctttaattggagcactcggctgggctgcttggggagactcttccgtgcgttcttcctctggatagaaccaccacctcctgggcgtcactgacaagctccatcttaacctccaaagccacagaactaggggctcagagccagagctggcagccgccagccaaaatgatgccattgcctgagctgacagccaagcccttctgtgggtcacctttctcctcacccagccccttgctcttcccttttgaaaggcccgtgtgttttctttccttaccctgtgcttgctcatgtctactccggttttctctaccacatccttagagccatcacctggcacgcaggcgccttacattctacggtagaacgtggggtactgtgtgtgcacatagacacacttacgtggaattacagttgtgggtttatccaagatgaggaagatttcacctgctgtttaatagacttggggccatgtgcctccccacacatgggcaaggacaggtggaatgtcgggaccacactgtgcggcttctcggcacaaagcggagggaggctgtggtcgctgccggcctaggtgtcccaggtgccccgcctttctctgggacacagttgggggctggcttctgagggattcctttctcccctctttgtgtggccccagccagggcggtgggcagtcctggtgtagagcacaagcctctccaccctagagaaatgcctctgtaccacggctaccatgtggaaccttaacttgcagaaggcttgttaacaattgttttgagagagatggctggtcatgccacagctgctggggactccgcctactccagccctcttgggacacactgtgggatttgtggcccttccccagaggaattgtggagactgtcccatggaacaaaccctcaggcaccagcacagggctctgggtgactcagtaaaactaacgtttgtctctgacaagatcagctgtaggctcaccggccagagaagaccactgtgagcattttgccgtatatcctgccctgccatttgttcactttttaaactaaaataggaacatccgacacacaccgtttgcatcgtcttctcccttgatattttaagcattttcccatgtcatgagtttctcagaaacatgtttttaacaattgtactatttagtcattgtccatttactataatttatctgaccatttccctactgtaaaatacttaagacggtttctgatttttccactatttaaataatgctgtgatgaatatctttaaaatcttctgatttcttacttttttcccccttagatgcctggaagtggtattttgaggtgaaagagtttgttcattttgaagatatttctgtctctctctcgacctgatgtgtagacgctcacttccagtagcagaaccaccttagttgtgtcttacagattctgaacaaatcggtttctgataagccatgtgttccaaagaatgtctgaataagaccgctctttatttaaatgctaagaggatgtcactactgcaatccatctgtggccgattttttccaagagccaatttccttgttttggttgcaagaacctggctctgcctgcatgtcagctctctgccctccctgctgccgtggctttcaagcgcttggcagaatcttgtacttcgtgtccacaatggtactgaatttgcatctgcacagtcagcagagataacaagtgttgaactgaccttgccacatgcttagtgagtgatttgtaattaagtttatagactcagaaggtatattaggacatttggaatcagtagcagagcaaagcctctttgaaaaaaaccacgtagctgattgggttttacaagagtgcatttgtctcccccttccacccgtggggccccaccttcaggtcttagtggttcacaagagcccagcagccaggctggctttttcattgtagggcgtggttgtcccagctggtgtagatttcaggccgccccccccaactccctgcccacagtgttgcagattgcctggctggcagcaagtccagaccacccaaatttggttggattcttcatttctccactgtagttggggtccattgattgtgcaggggaacgtgcaggaggtttttctaggcaccgtgttcagtgctgcttcactctaccagagattatggccaaattgcacggaatttggtttcttgccctctgaagcctgagggcccccccttgcctggctggttgacagacccggggtggtcactgctgagacttcagagatcgcagctgctgtgagaatacggtgaaggtactttgttctggaagatgttgtcatacacttttccccagttattttcaaacttgacatgagcctatgttgactcactgggtgggggtcccttcttacgcagcacacgtggcaagtgcctgaatcggggctggaggcacttcagagcctctgaggggccaccacttctggcccaaaattgcagggttgtagatgaggctgcctgtggagaactggtgtgaggaggaagctgtttccaacaaagagcactttcatctgttgagatggctgtggtgagcaactgaacgagcctacgtgtgtacctgaattttccccgtaactcatttcttccatatgaagaaacaccaaactatgtacagagaactttttacaaaaggcagaccttttttaagctgtgtaacccacatagcctaaccacctggcagaatgactacgaataggggtcattgtgctggtaaaagcctctattacgactgtaagtaagttggatgttggcaaaattaaattgttacagtatttagagctgctgtagctgttccttcacaacataaaataggataaatgactagtacgtctttcaggtgggtggcaagcagaacatgcgtaatattctctacctggtctgtagctgtaactgtgatgtacagacaaagcaaaaattaaaagaacttatgaaaacaaatgcaatgatactaggatatacacttttgtatttttattcttatataaggttatttgctggctattgttggcctctagttcagtctgtgttatttaaattctaatatatgaattatttgaattgaattcatgttcggggccacgttgttgtatgtattgatgtacagccttgaatgtgaataattattgtaaactatattttacaactttttttctggctttattatataaattttctattgggtcagtgatttaatcatataatttaatgaatctgtttatcctttttttttttccaaatacttgtgctttaggtgtagttaccagatgatgaattttcctcgtatggtcagtagtcttgtaataaaaagcatgtagagtgta

SEQ ID NO: 164 - DNA, 1819 bp, Homo sapiens
  source 1..1819: mol_type = genomic DNA
ccgcttcggggaggaggacgctgaggaggcgccgagccgcgcagcgctgcgggggaggcgcccgcgccgacgcggggcccatggccaggaccaccagccagctgtatgacgccgtgcccatccagtccagcgtggtgttatgttcctgcccatccccatcaatggtgaggacccagactgagtccagcacgccccctggcattcctggtggcagcaggcagggccccgccatggacggcactgcagccgagcctcggcccggcgccggctccctgcagcatgcccagcctccgccgcagcctcggaagaagcggcctgaggacttcaagtttgggaaaatccttggggaaggctctttttccacggttgtcctggctcgagaactggcaacctccagagaatatgcgattaaaattctggagaagcgacatatcataaaagagaacaaggtcccctatgtaaccagagagcgggatgtcatgtcgcgcctggatcaccccttctttgttaagctttacttcacatttcaggacgacgagaagctgtatttcggccttagttatgccaaaaatggagaactacttaaatatattcgcaaaatcggttcattcgatgagacctgtacccgattttacacggctgagattgtgtctgctttagagtacttgcacggcaagggcatcattcacagggaccttaaaccggaaaacattttgttaaatgaagatatgcacatccagatcacagattttggaacagcaaaagtcttatccccagagagcaaacaaggtgtttcagacctttgggctcttggatgcataatataccagcttgtggcaggactcccaccattccgagctggaaacgagtatcttatatttcagaagatcattaagttggaatatgactttccagaaaaattcttccctaaggcaagagacctcgtggagaaacttttggttttagatgccacaaagcggttaggctgtgaggaaatggaaggatacggacctcttaaagcacacccgttcttcgagtccgtcacgtgggagaacctgcaccagcagacgcctccgaagctcaccgcttacctgccggctatgtcggaagacgacgaggactgctatggcaattatgacaatctcctgagccagtttggctgcatgcaggtgtcttcgtcctcctcctcacactccctgtcagcctccgacacgggcctgccccagaggtcaggcagcaacatagagcagtacattcacgatctggactcgaactcctttgaactggacttacagttttccgaagatgagaagaggttgttgttggagaagcaggctggcggaaacccttggcaccagtttgtagaaaataatttaatactaaagatgggcccagtggataagcggaagggtttatttgcaagacgacgacagctgttgctcacagaaggaccacatttatattatgtggatcctgtcaacaaagttctgaaaggtgaaattccttggtcacaagaacttcgaccagaggccaagaattttaaaactttctttgtccacacgcctaacaggacgtattatctgatggaccccagcgggaacgcacacaagtggtgcaggaagatccaggaggtttggaggcagcgataccagagccacccggacgccgctgtgcagtgacgtggcctgcggccgggctgcccttcgctgccaggacacctgccccagcgcggcttggccgccatccgggacgcttccagaccacctgccagccatcacaaggggaacgcagaggcggaaaccttgcagcatttttattt

SEQ ID NO: 165 - DNA, 1714 bp, Homo sapiens
  source 1..1714: mol_type = genomic DNA
cgggcgcaggatgagggcggccattgctggggctccgcttcggggaggaggacgctgaggaggcgccgagccgcgcagcgctgcgggggaggcgcccgcgccgacgcggggcccatggccaggaccaccagccagctgtatgacgccgtgcccatccagtccagcgtggtgttatgttcctgcccatccccatcaatggtgaggacccagactgagtccagcacgccccctggcattcctggtggcagcaggcagggccccgccatggacggcactgcagccgagcctcggcccggcgccggctccctgcagcatgcccagcctccgccgcagcctcggaagaagcggcctgaggacttcaagtttgggaaaatccttggggaaggctctttttccacggttgtcctggctcgagaactggcaacctccagagaatatgcgattaaaattctggagaagcgacatatcataaaagagaacaaggtcccctatgtaaccagagagcgggatgtcatgtcgcgcctggatcaccccttctttgttaagctttacttcacatttcaggacgacgagaagctgtatttcggccttagttatgccaaaaatggagaactacttaaatatattcgcaaaatcggttcattcgatgagacctgtacccgattttacacggctgagattgtgtctgctttagagtacttgcacggcaagggcatcattcacagggaccttaaaccggaaaacattttgttaaatgaagatatgcacatccagatcacagattttggaacagcaaaagtcttatccccagagagcaaacaagccagggccaactcattcgtgggaacagcgcagtacgtttctccagagctgctcacggagaagtccgcctgtaagagttcagacctttgggctcttggatgcataatataccagcttgtggcaggactcccaccattccgagctggaaacgagtatcttatatttcagaagatcattaagttggaatatgactttccagaaaaattcttccctaaggcaagagacctcgtggagaaacttttggttttagatgccacaaagcggttaggctgtgaggaaatggaaggatacggacctcttaaagcacacccgttcttcgagtccgtcacgtgggagaacctgcaccagcagacgcctccgaagctcaccgcttacctgccggctatgtcggaagacgacgaggactgctatggcaattatgacaatctcctgagccagtttggctgcatgcaggtgtcttcgtcctcctcctcacactccctgtcagcctccgacacgggcctgccccagaggtcaggcagcaacatagagcagtacattcacgatctggactcgaactcctttgaactggacttacagttttccgaagatgagaagaggttgttgttggagaagcaggctggcggaaacccttgcctaacaggacgtattatctgatggaccccagcgggaacgcacacaagtggtgcaggaagatccaggaggtttggaggcagcgataccagagccacccggacgccgctgtgcagtgacgtggcctgcggccgggctgcccttcgctgccaggacacctgccccagcgcggcttggccgccatccgggacgcttccagaccacctgccagccatcacaaggggaacgcagaggcggaaaccttgcagcatttttattt

SEQ ID NO: 166 - DNA, 4728 bp, Homo sapiens
  source 1..4728: mol_type = genomic DNA
cgcaggatgagggcggccattgctggggctccgcttcggggaggaggacgctgaggaggcgccgagccgcgcagcgctgcgggggaggcgcccgcgccgacgcggggcccatggccaggaccaccagccagctgtatgacgccgtgcccatccagtccagcgtggtgttatgttcctgcccatccccatcaatggtgaggacccagactgagtccagcacgccccctggcattcctggtggcagcaggcagggccccgccatggacggcactgcagccgagcctcggcccggcgccggctccctgcagcatgcccagcctccgccgcagcctcggaagaagcggcctgaggacttcaagtttgggaaaatccttggggaaggctctttttccacggttgtcctggctcgagaactggcaacctccagagaatatgcgaccagggccaactcattcgtgggaacagcgcagtacgtttctccagagctgctcacggagaagtccgcctgtaagagttcagacctttgggctcttggatgcataatataccagcttgtggcaggactcccaccattccgagctggaaacgagtatcttatatttcagaagatcattaagttggaatatgactttccagaaaaattcttccctaaggcaagagacctcgtggagaaacttttggttttagatgccacaaagcggttaggctgtgaggaaatggaaggatacggacctcttaaagcacacccgttcttcgagtccgtcacgtgggagaacctgcaccagcagacgcctccgaagctcaccgcttacctgccggctatgtcggaagacgacgaggactgctatggcaattatgacaatctcctgagccagtttggctgcatgcaggtgtcttcgtcctcctcctcacactccctgtcagcctccgacacgggcctgccccagaggtcaggcagcaacatagagcagtacattcacgatctggactcgaactcctttgaactggacttacagttttccgaagatgagaagaggttgttgttggagaagcaggctggcggaaacccttggcaccagtttgtagaaaataatttaatactaaagatgggcccagtggataagcggaagggtttatttgcaagacgacgacagctgttgctcacagaaggaccacatttatattatgtggatcctgtcaacaaagttctgaaaggtgaaattccttggtcacaagaacttcgaccagaggccaagaattttaaaactttctttgtccacacgcctaacaggacgtattatctgatggaccccagcgggaacgcacacaagtggtgcaggaagatccaggaggtttggaggcagcgataccagagccacccggacgccgctgtgcagtgacgtggcctgcggccgggctgcccttcgctgccaggacacctgccccagcgcggcttggccgccatccgggacgcttccagaccacctgccagccatcacaaggggaacgcagaggcggaaaccttgcagcatttttatttaaaagaaaagaagaaaaaaaacacccaaccacacaaagaacaaaaccagtaacaaacacaaaggaattcagggtcgctttgcttgctctctgtgctccgtggaggcctccgtgtgccctcgttgccgtggggacccagctccatgcacgtcaacccagtcccgcccagactagtggacagacctggtgtcaccagtttttcctagcatcagtccgaaccatgcgcccgccctgccccaactgtgtgctggtcctgctgtggccgaggggaccgggtgtgtttggctctttatgcccctcccgctgtggtcctggaactcttcaccagggagggagccctgcgggggccgcagctttgtggagggagccgccgtgcttctgtcacctgctccctttcttgcgtctccctgtgatgggcccttaggcctggctgggcccattacatatccctgtggtggctctggtggcagctttctgtggcccctgctgtgttggcaggcaggtttgcgtggtgaggagcgggaggggttggagtggtgcgggagcaggctgccgagtggagggtgccatcgagggctccggatcccttatcctacttagcagtgttggtctctggggctggaagccgagcgcatgctgggagcggtactgtcagaagtgagcccagttagtaccccgctggctcactgcacgagagagtcctgccccgagccctaggtggggccaggaggtgccttggagaagccagccagagcagagagggctgctgacttccgtgtggagcagagaggcctgagggcctcctaaaaggtttaaatgtccacgcctctccagttgctgaagtagggtctgagagaaccctggcatcagcagacccagggtgcttctgtctcctgcagaccacgccagggagtgcagacaccaccgtcacacacgccccttttgtgttttggttcaagtttctcagagcccctcagagcttctacatctgtgcatcagaaatctcacagccttctcatgctgccggctcatctgggcccatagagtgggctttgccagttgctgttgcacaggaggcgagaacagcacacttcaaccccagcttgctggtcggctttcctctagagagagccggttttggggccatttccctttgatgctttggtggccttgccccgctctgcagcacagacaggccagatgcatttgtcctttgcctagctactccccaggtagagagtgctcctggtggcctggcaggtctgggcccttctctccctgcccaggttgtccctggagggcagccctcactccctttgggggagaggcagacattgctgcccacagacctgcctctgactcaactgtgtccaccctccctggtccctacccccaagtcacaggtgactcagcagtgaccctgtgtgccaggccagatccaaactgagagggaaggtgtcgtttttacactgctaatgacgagagtggctctttttagctaggcgagtacagacggggcctgggagggggcagagatgttccccaggccctgcctgtggttcctgcctgggccttggctgctgctgtgtgagagctgcatgtgagcctgtgaccgtgagctggggtgagctgggccgcacctaccctggggccccagggagcaggacgctccggggcccagcacgttgccctgggcctgtggccggagtcggagtcctctctcctcctcctggcttttggaaaggcttggctgtgttggggagtctctcttagccctttcaggaatttctgttcaggcttcctcctcctcatcagctattttacccatctcagaacgtcctgtgtctccatgtaggagagtggctctctcagatctctcagggcgtctggttatagggaaacaagtggagcagggacgtggctttaattggagcactcggctgggctgcttggggagactcttccgtgcgttcttcctctggatagaaccaccacctcctgggcgtcactgacaagctccatcttaacctccaaagccacagaactaggggctcagagccagagctggcagccgccagccaaaatgatgccattgcctgagctgacagccaagcccttctgtgggtcacctttctcctcacccagccccttgctcttcccttttgaaaggcccgtgtgttttctttccttaccctgtgcttgctcatgtctactccggttttctctaccacatccttagagccatcacctggcacgcaggcgccttacattctacggtagaacgtggggtactgtgtgtgcacatagacacacttacgtggaattacagttgtgggtttatccaagatgaggaagatttcacctgctgtttaatagacttggggccatgtgcctccccacacatgggcaaggacaggtggaatgtcgggaccacactgtgcggcttctcggcacaaagcggagggaggctgtggtcgctgccggcctaggtgtcccaggtgccccgcctttctctgggacacagttgggggctggcttctgagggattcctttctcccctctttgtgtggccccagccagggcggtgggcagtcctggtgtagagcacaagcctctccaccctagagaaatgcctctgtaccacggctaccatgtggaaccttaacttgcagaaggcttgttaacaattgttttgagagagatggctggtcatgccacagctgctggggactccgcctactccagccctcttgggacacactgtgggatttgtggcccttccccagaggaattgtggagactgtcccatggaacaaaccctcaggcaccagcacagggctctgggtgactcagtaaaactaacgtttgtctctgacaagatcagctgtaggctcaccggccagagaagaccactgtgagcattttgccgtatatcctgccctgccatttgttcactttttaaactaaaataggaacatccgacacacaccgtttgcatcgtcttctcccttgatattttaagcattttcccatgtcatgagtttctcagaaacatgtttttaacaattgtactatttagtcattgtccatttactataatttatctgaccatttccctactgtaaaatacttaagacggtttctgatttttccactatttaaataatgctgtgatgaatatctttaaaa

SEQ ID NO: 167 - DNA, 10143 bp, Homo sapiens
  source 1..10143: mol_type = genomic DNA
atggtcggccgggcggtgtgttgtcatccgcggagcgacgaccggaggctgcggcggagccccggcggggcgtttggtttcggtttggccctgactgggattagtgttgacgatcgaaatgggagtccccaagttttacagatggatctcagagcggtatccctgtctcagcgaagtggtgaaagagcatcagattcctgaatttgacaacttgtacctggatatgaatggaattatacatcagtgctcccatcctaatgatgatgatgttcactttagaatttcagatgataaaatctttactgatatttttcactacctggaggtgttgtttcgcattattaaacccaggaaagtgttctttatggctgtagatggtgtggctcctcgagcaaaaatgaaccagcagcgtgggaggcgttttaggtcagcaaaggaggcagaagacaaaattaaaaaggcaatagagaagggagaaactcttcctacagaggccagatttgattccaactgtatcacaccaggaactgaatttatggccaggttacatgaacatctgaagtattttgtaaatatgaaaatttccacagacaagtcatggcaaggagttaccatctacttctcaggccatgagactcctggagaaggagagcataaaatcatggaatttatcagatccgagaaagcaaagccagatcatgatccaaacaccagacactgtctttatggtttagatgctgacttgattatgcttggattaacaagtcatgaggcacatttttctctcttaagagaagaagttcgatttggtggcaaaaaaacacaacgggtatgtgctccagaagaaactacatttcaccttctacacttgtctttaatgagagagtatattgactatgagttttcagtattaaaagaaaagatcacatttaaatatgatattgaaaggataatagatgattggattttgatggggtttcttgttggtaatgattttatccctcatctacctcatttacatattaatcatgatgcactgcctcttctttatggaacatatgttaccatcctgccagaacttgggggttatattaatgaaagtgggcacctcaacttacctcgatttgagaaataccttgtgaaactatcagattttgatcgggagcacttcagtgaagtttttgtggacctaaaatggtttgaaagcaaagttggtaacaagtacctcaatgaagcagcaggtgtcgcagcagaagaagccaggaactacaaggaaaagaaaaagttaaagggccaggaaaattctctgtgttggactgctttagacaaaaatgaaggcgaaatgataacttctaaggataatttagaagatgagactgaagatgatgacctatttgaaactgagtttagacaatataaaagaacatattacatgacgaagatgggggttgacgtagtatctgatgactttctggctgatcaagctgcatgttatgttcaggcaatacagtggattttgcactattactatcatggagttcagtcctggagctggtattatccttatcattatgcacctttcctgtctgatatacacaacatcagtacactcaaaatccattttgaactaggaaaaccttttaagccatttgaacagcttcttgctgtacttccagcagccagcaaaaatttacttcctgcatgctaccagcatttgatgaccaatgaagactcaccaattatagaatattacccacctgattttaaaactgacctaaatgggaaacaacaggaatgggaagctgtggtgttaatcccttttattgatgagaagcgattattggaagccatggagacatgtaaccactccctcaaaaaggaagagaggaaaagaaaccaacatagtgagtgcctaatgtgctggtatgatagagacacagagtttatctatccttctccatggccagaaaagttccctgccatagaacgatgttgtacaaggtataaaataatatccttagatgcttggcgtgtagacataaacaaaaacaaaataaccagaattgaccagaaagcattatatttctgtggatttcctactctgaaacacatcagacacaaattttttttgaagaaaagtggtgttcaagtattccagcaaagcagtcgtggagaaaacatgatgttggaaatcttagtggatgcagaatcagatgaacttaccgtagaaaatgtagcttcatcagtgcttggaaaatctgtctttgttaattggcctcaccttgaggaagctagagtcgtggctgtatcagatggagaaactaagttttacttggaagaacctccaggaacacagaagctttattcaggaagaactgccccaccatctaaagtggttcatcttggagataaagaacaatctaactgggcaaaagaagtacaaggaatttcagaacactacctgagaagaaaaggaataataataaatgaaacatctgcagttgtgtatgctcagttactcacaggtcgtaaatatcaaataaatcaaaatggtgaagttcgtctagagaaacagtggtcaaaacaagttgttccttttgtttatcaaactattgtcaaggacatccgagctttcgactcccgtttctccaatatcaaaacattggatgatttgtttcctctgagaagtatggtctttatgctgggaactccctattatggctgcactggagaagttcaggattcaggtgatgtgattacagaaggtaggattcgtgtgattttcagcattccatgtgaacccaatcttgatgctttaatacagaaccagcataaatattctataaagtacaacccaggatatgtgttggccagtcgccttggagtgagtggataccttgtttcaaggtttacaggaagtatttttattggaagaggatctaggagaaaccctcatggagaccataaagcaaatgtgggtttaaatctcaaattcaacaagaaaaatgaggaggtacctggatatactaagaaagttggaagtgaatggatgtattcatctgcagcagaacaacttctggcagagtacttagagagagctccagaactatttagttatatagccaaaaatagccaagaggatgtgttctatgaagatgacatttggcctggagaaaatgagaatggtgctgaaaaagttcaagaaattattacttggctaaaaggacatcctgtcagtactttatctcgttcttcttgtgatttacaaattctggatgcagctattgttgagaaaattgaggaagaagtcgaaaagtgcaagcaaagaaagaataataagaaggtgcgagtaacagtgaaaccccatttgctatacagacctttagaacagcaacatggagtcattcctgatcgggatgcagaattttgtctttttgaccgtgttgtaaatgtgagagaaaacttctcagttccagttggccttcgaggcaccatcataggaataaaaggagctaatagagaagccgatgtactatttgaagtattatttgatgaagaatttcctggagggttaacaataagatgctcacctggtagaggttatcgactgccaacaagtgccttggtgaacctttctcatgggagtcgctctgaaactggaaatcagaagttgacagccatcgtaaaaccacaaccagctgtacatcaacatagctcaagttcatcagtttcctctgggcatttgggagccctcaaccattcccctcaatcactttttgttcctactcaagtacctactaaagatgatgatgaattctgcaacatttggcagtccttacagggatctggaaagatgcaatactttcagccaactatacaagagaagggtgcagttctacctcaagaaataagccaagtaaatcaacatcataaatctggctttaatgacaacagtgttaaatatcagcaaagaaaacatgaccctcacagaaaatttaaagaagagtgtaagagtcctaaagctgagtgttggtcccaaaaaatgtccaataagcagcctaactctggaattgagaactttttagcatctttgaatatctccaaagaaaatgaagtacagtcatctcatcatggggagcctccaagtgaagagcatttgtcaccacagtcatttgccatgggaacacggatgcttaaagaaattctaaaaattgatggctctaacactgtggaccataagaatgaaatcaaacagattgctaatgaaatccctgtttcctctaacagaagagatgaatatggattaccctctcagcctaaacaaaataagaaattagcatcttatatgaacaagcctcacagtgctaatgagtaccataatgttcagtctatggacaatatgtgttggcctgcccccagccagatccctcctgtatccacaccagtaactgaactttctcgaatttgttcccttgttggaatgccacaacctgatttctcctttcttaggatgccacagacaatgaccgtttgccaagtaaaattatctaatggcttactggtacatgggccacagtgccactctgaaaatgaagccaaagagaaagctgcactttttgctttacaacagttgggctccttaggcatgaatttccctttgccttcacaagtatttgcaaattatccttcagctgtaccacctggaaccattcctccagcctttcccccacctactggctgggatcactatggaagcaactatgcattgggggcagctaatataatgccttcgtcgtctcatctctttggctcaatgccatggggaccatcggtgccagttcctgggaagcccttccatcatactttatattctgggaccatgcccatggctgggggaataccagggggtgtgcacaatcagtttatacctctgcaggttactaaaaaaagggttgcaaacaaaaagaactttgagaataaggaagcccagagttctcaagccactccagttcagactagccagccagattcttccaacattgtcaaagtaagtccacgggagagctcatcagcttctttgaagtcctctccgattgctcaacctgcatcttcttttcaagttgaaactgcctctcaaggccatagtatatctcaccataagtcaacaccaatctcttcttcaagaagaaaatcaagaaaactggctgttaattttggtgtttctaaaccttctgagtaaatttggctcttagaattaagttaatttcttctctttccatctacctttttataaatacatatctatgtctcataaaaattagaatgtactattttaaaataatatgtgtaaattgaaatttttttcatttttaagttatcaggcacttttcatgctgtttaaaagactgtgtatcaaattgtgcactttaagtatgtgcagtttgttgtatgtcaattatacctcaataaatctgtaataaaaaactaaattaaaccttgcattaaaataatatcacagtatcagtggactaaacattaaaatgtaccactctaatcattggcctcatgattgaagcatcctgaactatgaattagacatcagttagcaataataagcattttttacactatcattgaggaataattacatggagcatgaaatttgggcctccagtataacttactgaatgtggattttatttctctttttaatgatgtaagaaaattgtcaggagaatggctcttatttatgtgtgttttaacttatgctttgttgcctctgagggtctttagacctgctgtgaaaggatcacatttgttgtggtgctgccagttttgctttattctaaattttgtaccaaagcaactttagaataatcagaatatttcatctaactgcttagaactataaatagcattctaaatttgagtaaatacaattttttaggttactcaagaaccagcattagtaatttctagtaaaattgtttcaaaatctacagggtacaatgattacaaattaatcttctaacaaaataaaatatgaaatattagtcatgttaattaataaactgtattattttgtatagctttttatttgcttacctgacattttatgagagcttcatagttggtcggtatgtagtgcttcttgggactgaagaaattctaattgttgtttaagttccaaggtgtgctacaatataggaggcacagtcatcagtttgtgacatacattatttactgcctatttcattctgattctatatttttagctttatgctgaactgttcaatgatgctgggattctctctttgcatgtcatatgtgaatgtgtggttcaagctgtaactgttgaaattattttagaatttatgacgatttctcagcagggcctatgtttatatatatatatatatttattctttagtttttgtgatatgcttatatttttaaggaagtaagttatagcatacttttttaaaagtaggaaccacaatctttatatggagcagcttgttatatctgattttcatgtaactcattggaaactctgccatgactcttaaagtagtcttacttgttttttaaaatgctggtattaaactaaatggactcctttcactaactgctgatttcagagtttaaatgttagcaggatatttgtgtattagcagtgccttcagtataagagagaaatattcattatctgtcatttatcatagtcgtataagtttccatgattttattttctgttattttcataagttcagatgtttatcagttcccaacattgtttctttatctgtagtgggatcttgagtaatgaggctcaagtaaatcctcaatgtgtataattattgcctcataaactctctctttgtttttaaaggaaacatctattatggtaatacaaagaaaagttaaattgtgacagtaatgttatattaacctcttcctactttaaagtgtgaaatgtttcacctcagctgtacaaactccagcattgagaatttgcctcactcattactcctgtgtgacagttatataaatagcatgcagctcacatctgttttagagcatagaagaagcggcacctgccatcttctgaaaactccaaagggaaatttcagtagacatagtgcactaaacccataaggatacttgaccaatatttgagcacagcaagctgacagttctatacagataggcagtgaaagagttttattttccagccaggcgcagtggctcaaatcccagcacttcgggaggctaaggcaggcggatcacttgaggtccggagttccagacaagcctggccaacatgatgaagccctgtctctactaaaaatacaaaaattagccgggcgtgatggcacatgcctttagtcccagctactcgggaggctgaggcatgagaatcatttgaacccgcgaggcagagtctgcagtgagccgagattgcaccactgcactccagcctggagagcagagcaagactctgtctcaaaaaaaagaaaaaagttttattatccttactttttttttaacattattattctaaaggtcaaaactgagaagagattaagataggagagagctccataatggctggatagtggtcaggcattctctattcttttccccctgtagacccattctaaatgtgggcctgaggtcaatgggagatgtgccctccctatggaggatgtaagaagcagaggccatttctgccccatgttgaggaaacaatctgttgatagacctggaatttagagtatatctgaaaagcagttggacttcaagaaatttaaaattctctctttgagatggggtggactaagaccacccccaaagtttaaaaatatgctcattcaacttgaatcttctgaggactttttgtgaaaatggtggactgtttagggcataggacagattccccaaattgctttatgcttccacataactagagcacttcaatctatttaagcctttgtctcctaactgaaacattatttctaaatatttctattcaataagttttttcttttttgagcaacttaagtgaattttgaagattgctccttccagtctcgttccttttcacattttcctgcattacctaataattacctcagcgttagaatttgaatgtattaattgatttaaacatcatgtagactaaagtcttaaacatctaagactcagttgtagttgcagaaaaaaattaaagtcacctctactgaaccttggtttcaatttaagatttttcttgcttttcaaaggggtaactaataaagattgaagggtttttttcccgattggtggaggaatgaagaactattgatgcaagtttttttattgtttctttctatgatcaggtacctgctttcattttagactgctacttccaaactaagctagattcttggttttaatgagaggaggcagagagagggaggcagatggaagaagaaaaacagttaaataagacatacccagtcactgcatttttggactataccgtatctttctagcacaaggaaatagataaactgtaaggtcttttttactcactttttatttatgtgttctatttgtgttagtcataactgtttatagtggttgtctaatttttacttttattatatgagatagagctgtgcagatcttcactcaagttagttctgtcacgcttcttcccattatttagagcacagttttttaaagcaactgtacaatttctcagccttatgagcttgctgtatttcttggtatcatgttgcttccaaattttgtttttactgtagaagacaattaatttattgtagagaagtggctgtgaaagtcgttctctgtctttaaaaatcaattgcagaagttcatttgtcatttttctagagataaattatagtactcaaactggcagtgctcagtatatacattttgtaagctttgtcagtgaaaccatcagttttgcaggagcttcctttcctagtcaagataaagcttaaaattccagaaattaatgtcgttcggactgactttattcatatttccatcaaacttctccaatacagtaagagatagtgttgaaccagcatcaagtctccagaaacatggcagagcagacaggccgttaagtttcacagacatcatagatccttttcttaaagaagaaaaacatgtataaaatagttttagtagtccaaaatgtcaactatctgtagctgcttttgtgtgtgtgtcagtgaacaaataataatgccttgctcaatcaatgcattcagccatctcaagtgcaatttgtgaaggagactatggtttccaaaagatacatttttttacaaagttaaacctgtaaaaagtctttttttttttccctccagccgtacaccaactgcacttggttgtttcagcagttggtatactattaaattgtccaggccaaataggtttctgtagctgttttagtaatttgaagccaaattctcatgctgtttctcattaaaaagaatgagaatttggtccatagttagctttaagttctctcttcctttctttcccttacagttaagggtttggtgggggatggggaggttgttttcgttttttggatttttttgtcttttggctttaagtatcatattttcttttgcctgtatccaactgcttctttgagtattttcatctagtttaatgtgagtaatagatgctgtgctgtcattgaagtgttcaacattttgttcatttaaacaaaagtgtaattcatacatatatagatacatatcttaattgatttctcaactattttataagtaactggaatttttcattagatcttatacagagaagtattttattaaaaattcaaaagggaagacttttatgtgctcattttgtaatttttgattttaaatatctttacattgtctgccaattaaagtgttttaaacttgcattggaatggactccgaatgtatttttgtggtgttacgttatccgtagatttctagcatgaagttagcctcacgatgctgtgcaaaggattttaaaatatgagagtcactgaaagagtttaaacatctgttcatgttaaatgctctatggattttaattaaagacttgagaatgattttataa

SEQ ID NO: 168 - DNA, 5383 bp, Homo sapiens
  source 1..5383: mol_type = genomic DNA
cgtttggtttcggtttggccctgactgggattagtgttgacgatcgaaatgggagtccccaagttttacagatggatctcagagcggtatccctgtctcagcgaagtggtgaaagagcatcagattcctgaatttgacaacttgtacctggatatgaatggaattatacatcagtgctcccatcctaatgatgatgatgttcactttagaatttcagatgataaaatctttactgatatttttcactacctggaggtgttgtttcgcattattaaacccaggaaagtgttctttatggctgtagatggtgtggctcctcgagcaaaaatgaaccagcagcgtgggaggcgttttaggtcagcaaaggaggcagaagacaaaattaaaaaggcaatagagaagggagaaactcttcctacagaggccagatttgattccaactgtatcacaccaggaactgaatttatggccaggttacatgaacatctgaagtattttgtaaatatgaaaatttccacagacaagtcatggcaaggagttaccatctacttctcaggccatgagactcctggagaaggagagcataaaatcatggaatttatcagatccgagaaagcaaagccagatcatgatccaaacaccagacactgtctttatggtttagatgctgacttgattatgcttggattaacaagtcatgaggcacatttttctctcttaagagaagaagttcgatttggtggcaaaaaaacacaacgggtatgtgctccagaagaaactacatttcaccttctacacttgtctttaatgagagagtatattgactatgagttttcagtattaaaagaaaagatcacatttaaatatgatattgaaaggataatagatgattggattttgatggggtttcttgttggtaatgattttatccctcatctacctcatttacatattaatcatgatgcactgcctcttctttatggaacatatgttaccatcctgccagaacttgggggttatattaatgaaagtgggcacctcaacttacctcgatttgagaaataccttgtgaaactatcagattttgatcgggagcacttcagtgaagtttttgtggacctaaaatggtttgaaagcaaagttggtaacaagtacctcaatgaagcagcaggtgtcgcagcagaagaagccaggaactacaaggaaaagaaaaagttaaagggccaggaaaattctctgtgttggactgctttagacaaaaatgaaggcgaaatgataacttctaaggataatttagaagatgagactgaagatgatgacctatttgaaactgagtttagacaatataaaagaacatattacatgacgaagatgggggttgacgtagtatctgatgactttctggctgatcaagctgcatgttatgttcaggcaatacagtggattttgcactattactatcatggagttcagtcctggagctggtattatccttatcattatgcacctttcctgtctgatatacacaacatcagtacactcaaaatccattttgaactaggaaaaccttttaagccatttgaacagcttcttgctgtacttccagcagccagcaaaaatttacttcctgcatgctaccagcatttgatgaccaatgaagactcaccaattatagaatattacccacctgattttaaaactgacctaaatgggaaacaacaggaatgggaagctgtggtgttaatcccttttattgatgagaagcgattattggaagccatggagacatgtaaccactccctcaaaaaggaagagaggaaaagaaaccaacatagtgagtgcctaatgtgctggtatgatagagacacagagtttatctatccttctccatggccagaaaagttccctgccatagaacgatgttgtacaaggtataaaataatatccttagatgcttggcgtgtagacataaacaaaaacaaaataaccagaattgaccagaaagcattatatttctgtggatttcctactctgaaacacatcagacacaaattttttttgaagaaaagtggtgttcaagtattccagcaaagcagtcgtggagaaaacatgatgttggaaatcttagtggatgcagaatcagatgaacttaccgtagaaaatgtagcttcatcagtgcttggaaaatctgtctttgttaattggcctcaccttgaggaagctagagtcgtggctgtatcagatggagaaactaagttttacttggaagaacctccaggaacacagaagctttattcaggaagaactgccccaccatctaaagtggttcatcttggagataaagaacaatctaactgggcaaaagaagtacaaggaatttcagaacactacctgagaagaaaaggaataataataaatgaaacatctgcagttgtgtatgctcagttactcacaggtcgtaaatatcaaataaatcaaaatggtgaagttcgtctagagaaacagtggtcaaaacaagttgttccttttgtttatcaaactattgtcaaggacatccgagctttcgactcccgtttctccaatatcaaaacattggatgatttgtttcctctgagaagtatggtctttatgctgggaactccctattatggctgcactggagaagttcaggattcaggtgatgtgattacagaaggtaggattcgtgtgattttcagcattccatgtgaacccaatcttgatgctttaatacagaaccagcataaatattctataaagtacaacccaggatatgtgttggccagtcgccttggagtgagtggataccttgtttcaaggtttacaggaagtatttttattggaagaggatctaggagaaaccctcatggagaccataaagcaaatgtgggtttaaatctcaaattcaacaagaaaaatgaggaggtacctggatatactaagaaagttggaagtgaatggatgtattcatctgcagcagaacaacttctggcagagtacttagagagagctccagaactatttagttatatagccaaaaatagccaagaggatgtgttctatgaagatgacatttggcctggagaaaatgagaatggtgctgaaaaagttcaagaaattattacttggctaaaaggacatcctgtcagtactttatctcgttcttcttgtgatttacaaattctggatgcagctattgttgagaaaattgaggaagaagtcgaaaagtgcaagcaaagaaagaataataagaaggtgcgagtaacagtgaaaccccatttgctatacagacctttagaacagcaacatggagtcattcctgatcgggatgcagaattttgtctttttgaccgtgttgtaaatgtgagagaaaacttctcagttccagttggccttcgaggcaccatcataggaataaaaggagctaatagagaagccgatgtactatttgaagtattatttgatgaagaatttcctggagggttaacaataagatgctcacctggtagaggttatcgactgccaacaagtgccttggtgaacctttctcatgggagtcgctctgaaactggaaatcagaagttgacagccatcgtaaaaccacaaccagctgtacatcaacatagctcaagttcatcagtttcctctgggcatttgggagccctcaaccattcccctcaatcactttttgttcctactcaagtacctactaaagatgatgatgaattctgcaacatttggcagtccttacagggatctggaaagatgcaatactttcagccaactatacaagagaagggtgcagttctacctcaagaaataagccaagtaaatcaacatcataaatctggctttaatgacaacagtgttaaatatcagcaaagaaaacatgaccctcacagaaaatttaaagaagagtgtaagagtcctaaagctgagtgttggtcccaaaaaatgtccaataagcagcctaactctggaattgagaactttttagcatctttgaatatctccaaagaaaatgaagtacagtcatctcatcatggggagcctccaagtgaagagcatttgtcaccacagtcatttgccatgaagggaacacggatgcttaaagaaattctaaaaattgatggctctaacactgtggaccataagaatgaaatcaaacagattgctaatgaaatccctgtttcctctaacagaagagatgaatatggattaccctctcagcctaaacaaaataagaaattagcatcttatatgaacaagcctcacagtgctaatgagtaccataatgttcagtctatggacaatatgtgttggcctgcccccagccagatccctcctgtatccacaccagtaactgaactttctcgaatttgttcccttgttggaatgccacaacctgatttctcctttcttaggatgccacagacaatgaccgtttgccaagtaaaattatctaatggcttactggtacatgggccacagtgccactctgaaaatgaagccaaagagaaagctgcactttttgctttacaacagttgggctccttaggcatgaatttccctttgccttcacaagtatttgcaaattatccttcagctgtaccacctggaaccattcctccagcctttcccccacctactgctaatataatgccttcgtcgtctcatctctttggctcaatgccatggggaccatcggtgccagttcctgggaagcccttccatcatactttatattctgggaccatgcccatggctgggggaataccagggggtgtgcacaatcagtttatacctctgcaggttactaaaaaaagggttgcaaacaaaaagaactttgagaataaggaagcccagagttctcaagccactccagttcagactagccagccagattcttccaacattgtcaaagtaagtccacgggagagctcatcagcttctttgaagtcctctccgattgctcaacctgcatcttcttttcaagttgaaactgcctctcaaggccatagtatatctcaccataagtcaacaccaatctcttcttcaagaagaaaatcaagaaaactggctgttaattttggtgtttctaaaccttctgagtaaatttggctcttagaattaagttaatttcttctctttccatctacctttttataaatacatatctatgtctcataaaaattagaatgtactattttaaaataatatgtgtaaattgaaatttttttcatttttaagttatcaggcacttttcatgctgtttaaaagactgtgtatcaaattgtgcactttaagtatgtgcagtttgttgtatgtcaattatacctcaataaatctgtaataaaaaactaaa

SEQ ID NO: 169 - DNA, 2075 bp, Homo sapiens
  source 1..2075: mol_type = genomic DNA
ggcggagccccggcggggcgtttggtttcggtttggccctgactgggattagtgttgacgatcgaaatgggagtccccaagttttacagatggatctcagagcggtatccctgtctcagcgaagtggtgaaagagcatcagattcctgaatttgacaacttgtacctggatatgaatggaattatacatcagtgctcccatcctaatgatgatgatgttcactttagaatttcagatgataaaatctttactgatatttttcactacctggaggtgttgtttcgcattattaaacccaggaaagtgttctttatggctgtagatggtgtggctcctcgagcaaaaatgaaccagcagcgtgggaggcgttttaggtcagcaaaggaggcagaagacaaaattaaaaaggcaatagagaagggagaaactcttcctacagaggccagatttgattccaactgtatcacaccaggaactgaatttatggccaggttacatgaacatctgaagtattttgtaaatatgaaaatttccacagacaagtcatggcaaggagttaccatctacttctcaggccatgagactcctggagaaggagagcataaaatcatggaatttatcagatccgagaaagcaaagccagatcatgatccaaacaccagacactgtctttatggtttagatgctgacttgattatgcttggattaacaagtcatgaggcacatttttctctcttaagagaagaagttcgatttggtggcaaaaaaacacaacgggtatgtgctccagaagaaactacatttcaccttctacacttgtctttaatgagagagtatattgactatgagttttcagtattaaaagaaaagatcacatttaaatatgatattgaaaggataatagatgattggattttgatggggtttcttgttggtaatgattttatccctcatctacctcatttacatattaatcatgatgcactgcctcttctttatggaacatatgttaccatcctgccagaacttgggggttatattaatgaaagtgggcacctcaacttacctcgatttgagaaataccttgtgaaactatcagattttgatcgggagcacttcagtgaagtttttgtggacctaaaatggtttgaaagcaaagttggtaacaagtacctcaatgaagcagcaggtgtcgcagcagaagaagccaggaactacaaggaaaagaaaaagttaaagggccaggaaaattctctgtgttggactgctttagacaaaaatgaaggcgaaatgataacttctaaggataatttagaagatgagactgaagatgatgacctatttgaaactgagtttagacaatataaaagaacatattacatgacgaagatgggggttgacgtagtatctgagtacgtttttgccaatgcttttattttaaaatagaaaaaattagattttgcagttattcagaaaatatgattttgatgaagtagtgggagaaaaaggattttttggtttcatgaattattgtgtatgtttcaactagtctggttttggagaagatggtattaattctgacttgtattatattcctgtgataaaaattgctgaagagaaaatgatccttatgtataaggatttttgttacaaagttgtttataatagtaaaaaaattagaaataatctaaatgtccaataagaaggttcatcataattggccactgcttcttcattacagtcaccatctctgtcacctcttccatctccggaatctgcagaactgctaaactggtacttgcagaaagttcataacaatttggaaggatgcttatagtacattattaagtacaaattgtaaaggcaagacatgaaatcatacatacagtatgctctcattaaccttaaaaaaacctagatatagataaaagactgaaacactaaaaatgtaaaagtgatggctataagatgataaaaatgctgttcttcattgtccagattttcactcctgaggaaatagttcttttataataaaaaagcaatatttttcatattaaaaaactacctcccagaaa

SEQ ID NO: 170 - DNA, 1180 bp, Homo sapiens
  source 1..1180: mol_type = genomic DNA
gcggcggagccccggcggggcgtttggtttcggtttggccctgactgggattagtgttgacgatcgaaatgggagtccccaagttttacagatggatctcagagcggtatccctgtctcagcgaagtggtgaaagagcatcagattcctgaatttgacaacttgtacctggatatgaatggaattatacatcagtgctcccatcctaatgatgatgatgttcactttagaatttcagatgataaaatctttactgatatttttcactacctggaggtgttgtttcgcattattaaacccaggaaagtgttctttatggctgtagatggtgtggctcctcgagcaaaaatgaaccagcagcgtgggaggcgttttagattatgcttggattaacaagtcatgaggcacatttttctctcttaagagaagaagttcgatttggtggcaaaaaaacacaacgggtatgtgctccagaagaaactacatttcaccttctacacttgtctttaatgagagagtatattgactatgagttttcagtattaaaagaaaagatcacatttaaatatgatattgaaaggataatagatgattggattttgatggggtttcttgttggtaatgattttatccctcatctacctcatttacatattaatcatgatgcactgcctcttctttatggaacatatgttaccatcctgccagaacttgggggttatattaatgaaagtgggcacctcaacttacctcgatttgagaaataccttgtgaaactatcagattttgatcgggagcacttcagtgaagtttttgtggacctaaaatggtttgaaagcaaagttggtaacaagtacctcaatgaagcagcaggtgtcgcagcagaagaagccaggaactacaaggaaaagaaaaagttaaagggccaggaaaattctctgtgttggactgctttagacaaaaatgaaggcgaaatgataacttctaaggataatttagaagatgagactgaagatgatgacctatttgaaactgagtttagacaatataaaagaacatattacatgacgaagatgggggttgacgtagtatctgagtacgtttttgccaatgcttttattttaaaatagaaaaaattagattttgcagttattcagaaaatatgattttgatgaagtagt

SEQ ID NO: 171 - DNA, 5600 bp, Homo sapiens
  source 1..5600: mol_type = genomic DNA
gaccaatgaagactcaccaattatagaatattacccacctgattttaaaactgacctaaatgggaaacaacaggaatgggaagctgtggtgttaatcccttttattgatgagcgattattggaagccatggagacatgtaaccactccctcaaaaaggaagagaggaaaagaaaccaacatagtgagtgcctaatgtgctggtatgatagagacacagagtttatctatccttctccatggccagaaaagttccctgccatagaacgatgttgtacaaggtataaaataatatccttagatgcttggcgtgtagacataaacaaaaacaaaataaccagaattgaccagaaagcattatatttctgtggatttcctactctgaaacacatcagacacaaattttttttgaagaaaagtggtgttcaagtattccagcaaagcagtcgtggagaaaacatgatgttggaaatcttagtggatgcagaatcagatgaacttaccgtagaaaatgtagcttcatcagtgcttggaaaatctgtctttgttaattggcctcaccttgaggaagctagagtcgtggctgtatcagatggagaaactaagttttacttggaagaacctccaggaacacagaagctttattcaggaagaactgccccaccatctaaagtggttcatcttggagataaagaacaatctaactgggcaaaagaagtacaaggaatttcagaacactacctgagaagaaaaggaataataataaatgaaacatctgcagttgtgtatgctcagttactcacaggtcgtaaatatcaaataaatcaaaatggtgaagttcgtctagagaaacagtggtcaaaacaagttgttccttttgtttatcaaactattgtcaaggacatccgagctttcgactcccgtttctccaatatcaaaacattggatgatttgtttcctctgagaagtatggtctttatgctgggaactccctattatggctgcactggagaagttcaggattcaggtgatgtgattacagaaggtaggattcgtgtgattttcagcattccatgtgaacccaatcttgatgctttaatacagaaccagcataaatattctataaagtacaacccaggatatgtgttggccagtcgccttggagtgagtggataccttgtttcaaggtttacaggaagtatttttattggaagaggatctaggagaaaccctcatggagaccataaagcaaatgtgggtttaaatctcaaattcaacaagaaaaatgaggaggtacctggatatactaagaaagttggaagtgaatggatgtattcatctgcagcagaacaacttctggcagagtacttagagagagctccagaactatttagttatatagccaaaaatagccaagaggatgtgttctatgaagatgacatttggcctggagaaaatgagaatggtgctgaaaaagttcaagaaattattacttggctaaaaggacatcctgtcagtactttatctcgttcttcttgtgatttacaaattctggatgcagctattgttgagaaaattgaggaagaagtcgaaaagtgcaagcaaagaaagaataataagaaggtgcgagtaacagtgaaaccccatttgctatacagacctttagaacagcaacatggagtcattcctgatcgggatgcagaattttgtctttttgaccgtgttgtaaatgtgagagaaaacttctcagttccagttggccttcgaggcaccatcataggaataaaaggagctaatagagaagccgatgtactatttgaagtattatttgatgaagaatttcctggagggttaacaataagatgctcacctggtagaggttatcgactgccaacaagtgccttggtgaacctttctcatgggagtcgctctgaaactggaaatcagaagttgacagccatcgtaaaaccacaaccagctgtacatcaacatagctcaagttcatcagtttcctctgggcatttgggagccctcaaccattcccctcaatcactttttgttcctactcaagtacctactaaagatgatgatgaattctgcaacatttggcagtccttacagggatctggaaagatgcaatactttcagccaactatacaagagaagggtgcagttctacctcaagaaataagccaagtaaatcaacatcataaatctggctttaatgacaacagtgttaaatatcagcaaagaaaacatgaccctcacagaaaatttaaagaagagtgtaagagtcctaaagctgagtgttggtcccaaaaaatgtccaataagcagcctaactctggaattgagaactttttagcatctttgaatatctccaaagaaaatgaagtacagtcatctcatcatggggagcctccaagtgaagagcatttgtcaccacagtcatttgccatgaagggaacacggatgcttaaagaaattctaaaaattgatggctctaacactgtggaccataagaatgaaatcaaacagattgctaatgaaatccctgtttcctctaacagaagagatgaatatggattaccctctcagcctaaacaaaataagaaattagcatcttatatgaacaagcctcacagtgctaatgagtaccataatgttcagtctatggacaatatgtgttggcctgcccccagccagatccctcctgtatccacaccagtaactgaactttctcgaatttgttcccttgttggaatgccacaacctgatttctcctttcttaggatgccacagacaatgaccgtttgccaagtaaaattatctaatggcttactggtacatgggccacagtgccactctgaaaatgaagccaaagagaaagctgcactttttgctttacaacagttgggctccttaggcatgaatttccctttgccttcacaagtatttgcaaattatccttcagctgtaccacctggaaccattcctccagcctttcccccacctactgctaatataatgccttcgtcgtctcatctctttggctcaatgccatggggaccatcggtgccagttcctgggaagcccttccatcatactttatattctgggaccatgcccatggctgggggaataccagggggtgtgcacaatcagtttatacctctgcaggttactaaaaaaagggttgcaaacaaaaagaactttgagaataaggaagcccagagttctcaagccactccagttcagactagccagccagattcttccaacattgtcaaagtaagtccacgggagagctcatcagcttctttgaagtcctctccgattgctcaacctgcatcttcttttcaagttgaaactgcctctcaaggccatagtatatctcaccataagtcaacaccaatctcttcttcaagaagaaaatcaagaaaactggctgttaattttggtgtttctaaaccttctgagtaaatttggctcttagaattaagttaatttcttctctttccatctacctttttataaatacatatctatgtctcataaaaattagaatgtactattttaaaataatatgtgtaaattgaaatttttttcatttttaagttatcaggcacttttcatgctgtttaaaagactgtgtatcaaattgtgcactttaagtatgtgcagtttgttgtatgtcaattatacctcaataaatctgtaataaaaaactaaattaaaccttgcattaaaataatatcacagtatcagtggactaaacattaaaatgtaccactctaatcattggcctcatgattgaagcatcctgaactatgaattagacatcagttagcaataataagcattttttacactatcattgaggaataattacatggagcatgaaatttgggcctccagtataacttactgaatgtggattttatttctctttttaatgatgtaagaaaattgtcaggagaatggctcttatttatgtgtgttttaacttatgctttgttgcctctgagggtctttagacctgctgtgaaaggatcacatttgttgtggtgctgccagttttgctttattctaaattttgtaccaaagcaactttagaataatcagaatatttcatctaactgcttagaactataaatagcattctaaatttgagtaaatacaattttttaggttactcaagaaccagcattagtaatttctagtaaaattgtttcaaaatctacagggtacaatgattacaaattaatcttctaacaaaataaaatatgaaatattagtcatgttaattaataaactgtattattttgtatagctttttatttgcttacctgacattttatgagagcttcatagttggtcggtatgtagtgcttcttgggactgaagaaattctaattgttgtttaagttccaaggtgtgctacaatataggaggcacagtcatcagtttgtgacatacattatttactgcctatttcattctgattctatatttttagctttatgctgaactgttcaatgatgctgggattctctctttgcatgtcatatgtgaatgtgtggttcaagctgtaactgttgaaattattttagaatttatgacgatttctcagcagggcctatgtttatatatatatatatatttattctttagtttttgtgatatgcttatatttttaaggaagtaagttatagcatacttttttaaaagtaggaaccacaatctttatatggagcagcttgttatatctgattttcatgtaactcattggaaactctgccatgactcttaaagtagtcttacttgttttttaaaatgctggtattaaactaaatggactcctttcactaactgctgatttcagagtttaaatgttagcaggatatttgtgtattagcagtgccttcagtataagagagaaatattcattatctgtcatttatcatagtcgtataagtttccatgattttattttctgttattttcataagttcagatgtttatcagttcccaacattgtttctttatctgtagtgggatcttgagtaatgaggctcaagtaaatcctcaatgtgtataattattgcctcataaactctctctttgtttttaaaggaaacatctattatggtaatacaaagaaaagttaaattgtgacagtaatgttatattaacctcttcctactttaaagtgtgaaatgtttcacctcagctgtacaaactccagcattgagaatttgcctcactcattactcctgtgtgacagttatataaatagcatgcagctcacatctgttttagagcatagaagaagcggcacctgccatcttctgaaaactccaaagggaaatttcagtagacatagtgcactaaacccataaggatacttgaccaatatttgagcacagcaagctgacagttctatacagataggcagtgaaagagttttattttccagccaggcgcagtggctcaaatcccagcacttcgggaggctaaggcaggcggatcacttgaggtccggagttccagacaagcctggccaacatgatgaagccctgtctctactaaaaatacaaaa

SEQ ID NO: 172 - DNA, 1655 bp, Homo sapiens
  source 1..1655: mol_type = genomic DNA
ctacttccggtggtgctgtggtctgcccctggagaacccagaagaacacagctgtgcgcgcccacaggctctgggggcgggagaagataagtcgcaaggagggggcgggacctacacctcaggaaagccggagaattggggcacgaagcggggctttgatgacccgcaaagggcgaggcatgcaggaggtggaggaattaagtgaaacagggaaggttgttaaacagcaccgtgtgggcgaggccttaagggtcgtggtccttgtctgggcggggtctttgggcgtcgacgaggcctggttctgggtaggcggggctactacggggcggtgcctgctgtggaaatgcctgcccgcgcgcttctgcccaggcgcatggggcatcgtactctagcctccactcctgccctgtgggcctccatcccgtgccctcgctctgagctgcgcctggacctggttctgccttctggacaatctttccggtggagggagcaaagtcctgcacactggagtggtgtactagcggatcaagtatggacactgactcagactgaggagcagctccactgcactgtgtaccgaggagacaagagccaggctagcaggcccacaccagacgagctggaggccgtgcgcaagtacttccagctagatgttaccctggctcaactgtatcaccactggggttccgtggactcccacttccaagaggtggctcagaaattccaaggtgtgcgactgctgcgacaagaccccatcgaatgccttttctcttttatctgttcctccaacaacaacatcgcccgcatcactggcatggtggagcggctgtgccaggcttttggacctcggctcatccagcttgatgatgtcacctaccatggcttccccagcctgcaggccctggctgggccagaggtggaggctcatctcaggaagctgggcctgggctatcgtgcccgttacgtgagtgccagtgcccgagccatcctggaagaacagggcgggctagcctggctgcagcagctacgagagtcctcatatgaggaggcccacaaggccctctgcatcctgcctggagtgggcaccaaggtggctgactgcatctgcctgatggccctagacaagccccaggctgtgcccgtggatgtccatatgtggcacattgcccaacgtgactacagctggcaccctaccacgtcccaggcgaagggaccgagcccccagaccaacaaggaactgggaaactttttccggagcctgtggggaccttatgctggctgggcccaagcgactccaccctcctacaggtgctgttcagtgccgacctgcgccaatcccgccatgctcaggagccaccagcaaagcgcagaaagggttccaaagggccggaaggctagatggggcaccctggacaaagaaattccccaagcaccttcccctccattccccacttctctctccccatccccacccagtctcatgttggggaggggcctccctgtgactacctcaaaggccaggcacccccaaatcaagcagtcagtttgcacaacaagatggggtgggggatattgagggagacagcgctaaggatggttttatcttccctttattacaagaaggaacaataaaatagaaacatttgtatggaaaa

SEQ ID NO: 173 - DNA, 2191 bp, Homo sapiens
  source 1..2191: mol_type = genomic DNA
ggagaattggggcacgaagcggggctttgatgacccgcaaagggcgaggcatgcaggaggtggaggaattaagtgaaacagggaaggttgttaaacagcaccgtgtgggcgaggccttaagggtcgtggtccttgtctgggcggggtctttgggcgtcgacgaggcctggttctgggtaggcggggctactacggggcggtgcctgctgtggaaatgcctgcccgcgcgcttctgcccaggcgcatggggcatcgtactctagcctccactcctgccctgtgggcctccatcccgtgccctcgctctgagctgcgcctggacctggttctgccttctggacaatctttccggtggagggagcaaagtcctgcacactggagtggtgtactagcggatcaagtatggacactgactcagactgaggagcagctccactgcactgtgtaccgaggagacaagagccaggctagcaggcccacaccagacgagctggaggccgtgcgcaagtacttccagctagatgttaccctggctcaactgtatcaccactggggttccgtggactcccacttccaagaggtggctcagaaattccaaggtgtgcgactgctgcgacaagaccccatcgaatgccttttctcttttatctgttcctccaacaacaacatcgcccgcatcactggcatggtggagcggctgtgccaggcttttggacctcggctcatccagcttgatgatgtcacctaccatggcttccccagcctgcaggccctggctgggccagaggtggaggctcatctcaggaagctgggcctgggctatcgtgcccgttacgtgagtgccagtgcccgagccatcctggaagaacagggcgggctagcctggctgcagcagctacgagagtcctcatatgaggaggcccacaaggccctctgcatcctgcctggagtgggcaccaaggtggctgactgcatctgcctgatggccctagacaagccccaggctgtgcccgtggatgtccatatgtggcacattgcccaacgtgactacagctggcaccctaccacgtcccaggcgaagggaccgagcccccagaccaacaaggaactgggaaactttttccggagcctgtggggaccttatgctggctgggcccaagcgctctgtcaggtcatcaccacttttatgacctttctcggaccccataggctggatcagatgcctcctgaagaattacagacttcttcctctagacttggagggcctccttggcaatgcatttgatggccaccagcttctgcgtcctcttatcttctgccaggatcacctccgagaaggcccccctatcgggagaggggattcacaaggtgaagaactggaaccccagcttccctccagcctctcctccattccctatgggttctgtgaccactgctggaccaaggacgtggatgaccctcccctagtcactcatccatcccctggctccagagatggtcacatgacccaggcctggccagtcaaagtagtctctcccctggccacagtaattggtcatgtgatgcaagccagcttactagcactttgagaatgagtctcctgttgagctggtaggatgtaagcctggagctaatggcgatcatctttgccaccacctggggagagcctgcttgggaatgaaattaacacaaaggaagtccaacctgagaaatggccaaatatatttcctgataacattatgtggccctctggatccagccatgcctgaggtctacccctgggcttttggattatgtgtacagttggttcatccctttttctgctaattcgagtcatggctaatttaacaccctttagaaccttaaagaaccatcagcatcacccgggaacttttttagaaatgcaaaatctctactgctttggatcctgggtcaaaaaaaagaaaaaaaaaagaaatgcaaaactttaggccctgccccagatttactaaatcaatctgcagtttaacaaaatcctcaggtgatttgtatgctcattgaactttaagaagcagtgttttagaacaggttcttaaaaaggaacaaataaactcatttaactaaagttaactgattaaagaggatttgctagggtattctttccacatctgtttgctttctctgggagaataagaagtcataagtcaaagaa

SEQ ID NO: 174 - DNA, 2220 bp, Homo sapiens
  source 1..2220: mol_type = genomic DNA
ctacttccggtggtgctgtggtctgcccctggagaacccagaagaacacagctgtgcgcgcccacaggctctgggggcgggagaagataagtcgcaaggagggggcgggacctacacctcaggaaagccggagaattggggcacgaagcggggctttgatgacccgcaaagggcgaggcatgcaggaggtggaggaattaagtgaaacagggaaggttgttaaacagcaccgtgtgggcgaggccttaagggtcgtggtccttgtctgggcggggtctttgggcgtcgacgaggcctggttctgggtaggcggggctactacggggcggtgcctgctgtggaaatgcctgcccgcgcgcttctgcccaggcgcatggggcatcgtactctagcctccactcctgccctgtgggcctccatcccgtgccctcgctctgagctgcgcctggacctggttctgccttctggacaatctttccggtggagggagcaaagtcctgcacactggagtggtgtactagcggatcaagtatggacactgactcagactgaggagcagctccactgcactgtgtaccgaggagacaagagccaggctagcaggcccacaccagacgagctggaggccgtgcgcaagtacttccagctagatgttaccctggctcaactgtatcaccactggggttccgtggactcccacttccaagaggtggctcagaaattccaaggtgtgcgactgctgcgacaagaccccatcgaatgccttttctcttttatctgttcctccaacaacaacatcgcccgcatcactggcatggtggagcggctgtgccaggcttttggacctcggctcatccagcttgatgatgtcacctaccatggcttccccagcctgcaggccctggctgggccagaggtggaggctcatctcaggaagctgggcctgggctatcgtgcccgttacgtgagtgccagtgcccgagccatcctggaagaacagggcgggctagcctggctgcagcagctacgagagtcctcatatgaggaggcccacaaggccctctgcatcctgcctggagtgggcaccaaggtggctgactgcatctgcctgatggccctagacaagccccaggctgtgcccgtggatgtccatatgtggcacattgcccaacgtgactacagctggcaccctaccacgtcccaggcgaagggaccgagcccccagaccaacaaggaactgggaaactttttccggagcctgtggggaccttatgctggctgggcccaagcgggcctccttggcaatgcatttgatggccaccagcttctgcgtcctcttatcttctgccaggatcacctccgagaaggcccccctatcgggagaggggattcacaaggtgaagaactggaaccccagcttccctccagcctctcctccattccctatgggttctgtgaccactgctggaccaaggacgtggatgaccctcccctagtcactcatccatcccctggctccagagatggtcacatgacccaggcctggccagtcaaagtagtctctcccctggccacagtaattggtcatgtgatgcaagccagcttactagcactttgagaatgagtctcctgttgagctggtaggatgtaagcctggagctaatggcgatcatctttgccaccacctggggagagcctgcttgggaatgaaattaacacaaaggaagtccaacctgagaaatggccaaatatatttcctgataacattatgtggccctctggatccagccatgcctgaggtctacccctgggcttttggattatgtgtacagttggttcatccctttttctgctaattcgagtcatggctaatttaacaccctttagaaccttaaagaaccatcagcatcacccgggaacttttttagaaatgcaaaatctctactgctttggatcctgggtcaaaaaaaagaaaaaaaaaagaaatgcaaaactttaggccctgccccagatttactaaatcaatctgcagtttaacaaaatcctcaggtgatttgtatgctcattgaactttaagaagcagtgttttagaacaggttcttaaaaaggaacaaataaactcatttaactaaagttaactgattaaagaggatttgctagggtattctttccacatctgtttgctttctctgggagaataagaagtcataagtcaaagaa

SEQ ID NO: 175 - DNA, 1815 bp, Homo sapiens
  source 1..1815: mol_type = genomic DNA
ccagaagaacacagctgtgcgcgcccacaggctctgggggcgggagaagataagtcgcaaggagggggcgggacctacacctcaggaaagccggagaattggggcacgaagcggggctttgatgacccgcaaagggcgaggcatgcaggaggtggaggaattaagtgaaacagggaaggttgttaaacagcaccgtgtgggcgaggccttaagggtcgtggtccttgtctgggcggggtctttgggcgtcgacgaggcctggttctgggtaggcggggctactacggggcggtgcctgctgtggaaatgcctgcccgcgcgcttctgcccaggcgcatggggcatcgtactctagcctccactcctgccctgtgggcctccatcccgtgccctcgctctgagctgcgcctggacctggttctgccttctggacaatctttccggtggagggagcaaagtcctgcacactggagtggtgtactagcggatcaagtatggacactgactcagactgaggagcagctccactgcactgtgtaccgaggagacaagagccaggctagcaggcccacaccagacgagctggaggccgtgcgcaagtacttccagctagatgttaccctggctcaactgtatcaccactggggttccgtggactcccacttccaagaggtggctcagaaattccaaggtgtgcgactgctgcgacaagaccccatcgaatgccttttctcttttatctgttcctccaacaacaacatcgcccgcatcactggcatggtggagcggctgtgccaggcttttggacctcggctcatccagcttgatgatgtcacctaccatggcttccccagcctgcaggccctggctgggccagaggtggaggctcatctcaggaagctgggcctgggctatcgtgcccgttacgtgagtgccagtgcccgagccatcctggaagaacagggcgggctagcctggctgcagcagctacgagagtcctcatatgaggaggcccacaaggccctctgcatcctgcctggagtgggcaccaaggtggctgactgcatctgcctgatggccctagacaagccccaggctgtgcccgtggatgtccatatgtggcacattgcccaacgtgactacagctggcaccctaccacgtcccaggcgaagggaccgagcccccagaccaacaaggaactgggaaactttttccggagcctgtggggaccttatgctggctgggcccaagcggtgagtgtacctaggtgtcctccctaggtttcctctcctccagcccagacccagtggactcttccaccaccgccccaggtggccctaaaggactctccagccacccctgtcccaaccccagtggattctcattgccttcggccctgttccccaaggactcttccacctcccaacactgtcactagtctcaccagccctgaccccagtgtaccctcctccccacacagactccaccctcctacaggtgctgttcagtgccgacctgcgccaatcccgccatgctcaggagccaccagcaaagcgcagaaagggttccaaagggccggaaggctagatggggcaccctggacaaagaaattccccaagcaccttcccctccattccccacttctctctccccatccccacccagtctcatgttggggaggggcctccctgtgactacctcaaaggccaggcacccccaaatcaagcagtcagtttgcacaacaagatggggtgggggatattgagggagacagcgctaaggatggttttatcttccctttattacaagaagga

SEQ ID NO: 176 - DNA, 1084 bp, Homo sapiens
  source 1..1084: mol_type = genomic DNA
ggcggtgcctgctgtggaaatgcctgcccgcgcgcttctgcccaggcgcatggggcatcgtactctagcctccactcctgccctgtgggcctccatcccgtgccctcgctctgagctgcgcctggacctggttctgccttctggacaatctttccggtggagggagcaaagtcctgcacactggagtggtgtactagcggatcaagtatggacactgactcagactgaggagcagctccactgcactgtgtaccgaggagacaagagccaggctagcaggcccacaccagacgagctggaggccgtgcgcaagtacttccagctagatgttaccctggctcaactgtatcaccactggggttccgtggactcccacttccaagaggtggctcagaaattccaaggtgtgcgactgctgcgacaagaccccatcgaatgccttttctcttttatctgttcctccaacaacaacatcgcccgcatcactggcatggtggagcggctgtgccaggcttttggacctcggctcatccagcttgatgatgtcacctaccatggcttccccagcctgcaggccctggctgggccagaggtggaggctcatctcaggaagctgggcctgggctatcgtgcccgttacgtgagtgccagtgcccgagccatcctggaagaacagggcgggctagcctggctgcagcagctacgagagtcctcatatgaggaggcccacaaggccctctgcatcctgcctggagtgggcaccaaggaaactttttccggagcctgtggggaccttatgctggctgggcccaagcggtgctgttcagtgccgacctgcgccaatcccgccatgctcaggagccaccagcaaagcgcagaaagggttccaaagggccggaaggctagatggggcaccctggacaaagaaattccccaagcaccttcccctccattccccacttctctctccccatccccacccagtctcatgttggggaggggcctccctgtgactacctcaaaggccaggcacccccaaatcaagcagtcagtttgcacaacaagatggggtgggggatattga

SEQ ID NO: 177 - DNA, 1744 bp, Homo sapiens
  source 1..1744: mol_type = genomic DNA
ctacttccggtggtgctgtggtctgcccctggagaacccagaagaacacagctgtgcgcgcccacaggctctgggggcgggagaagataagtcgcaaggagggggcgggacctacacctcaggaaagccggagaattggggcacgaagcggggctttgatgacccgcaaagggcgaggcatgcaggaggtggaggaattaagtgaaacagggaaggttgttaaacagcaccgtgtgggcgaggccttaagggtcgtggtccttgtctgggcggggtctttgggcgtcgacgaggcctggttctgggtaggcggggctactacggggcggtgcctgctgtggaaatgcctgcccgcgcgcttctgcccaggcgcatggggcatcgtactctagcctccactcctgccctgtgggcctccatcccgtgccctcgctctgagctgcgcctggacctggttctgccttctggacaatctttccggtggagggagcaaagtcctgcacactggagtggtgtactagcggatcaagtatggacactgactcagactgaggagcagctccactgcactgtgtaccgaggagacaagagccaggctagcaggcccacaccagacgagctggaggccgtgcgcaagtacttccagctagatgttaccctggctcaactgtatcaccactggggttccgtggactcccacttccaagaggtggctcagaaattccaaggtgtgcgactgctgcgacaagaccccatcgaatgccttttctcttttatctgttcctccaacaacaacatcgcccgcatcactggcatggtggagcggctgtgccaggcttttggacctcggctcatccagcttgatgatgtcacctaccatggcttccccagcctgcaggccctggctgggccagaggtggaggctcatctcaggaagctgggcctgggctatcgtgcccgttacgtgagtgccagtgcccgagccatcctggaagaacagggcgggctagcctggctgcagcagctacgagagtcctcatatgaggaggcccacaaggccctctgcatcctgcctggagtgggcaccaaggtggctgactgcatctgcctgatggccctagacaagccccaggctgtgcccgtggatgtccatatgtggcacattgcccaacgtgactacagctggcaccctaccacgtcccaggcgaagggaccgagcccccagaccaacaaggaactgggaaactttttccggagcctgtggggaccttatgctggctgggcccaagcggtgctgttcagtgccgacctgcgccaatcccgccatgctcaggagccaccagcaaagcgcagaaagggttccaaagggccggaaggctagatggggcaccctggacaaagaaattccccaagcaccttcccctccattccccacttctctctccccatccccacccagtctcatgttggggaggggcctccctgtgactacctcaaaggccaggcacccccaaatcaagcagtcagtttgcacaacaagatggggtgggggatattgagggagacagcgctaaggatggttttatcttccctttattacaagaaggaacaataaaatagaaacatttgtatggaaaatgcagtgaggagtggtagggaagcaggtgaggaggggacagggcagagaaactcccggttcagggagggaaggggagcaggctgcccccaagccctcccacgcaga

SEQ ID NO: 178 - DNA, 1950 bp, Homo sapiens
  source 1..1950: mol_type = genomic DNA
ctacttccggtggtgctgtggtctgcccctggagaacccagaagaacacagctgtgcgcgcccacaggctctgggggcgggagaagataagtcgcaaggagggggcgggacctacacctcaggaaagccggagaattggggcacgaagcggggctttgatgacccgcaaagggcgaggcatgcaggaggtggaggaattaagtgaaacagggaaggttgttaaacagcaccgtgtgggcgaggccttaagggtcgtggtccttgtctgggcggggtctttgggcgtcgacgaggcctggttctgggtaggcggggctactacggggcggtgcctgctgtggaaatgcctgcccgcgcgcttctgcccaggcgcatggggcatcgtactctagcctccactcctgccctgtgggcctccatcccgtgccctcgctctgagctgcgcctggacctggttctgccttctggacaatctttccggtggagggagcaaagtcctgcacactggagtggtgtactagcggatcaagtatggacactgactcagactgaggagcagctccactgcactgtgtaccgaggagacaagagccaggctagcaggcccacaccagacgagctggaggccgtgcgcaagtacttccagctagatgttaccctggctcaactgtatcaccactggggttccgtggactcccacttccaagaggtggctcagaaattccaaggtgtgcgactgctgcgacaagaccccatcgaatgccttttctcttttatctgttcctccaacaacaacatcgcccgcatcactggcatggtggagcggctgtgccaggcttttggacctcggctcatccagcttgatgatgtcacctaccatggcttccccagcctgcaggccctggctgggccagaggtggaggctcatctcaggaagctgggcctgggctatcgtgcccgttacgtgagtgccagtgcccgagccatcctggaagaacagggcgggctagcctggctgcagcagctacgagagtcctcatatgaggaggcccacaaggccctctgcatcctgcctggagtgggcaccaagggcctccttggcaatgcatttgatggccaccagcttctgcgtcctcttatcttctgccaggatcacctccgagaaggcccccctatcgggagaggggattcacaaggtgaagaactggaaccccagcttccctccagcctctcctccattccctatgggttctgtgaccactgctggaccaaggacgtggatgaccctcccctagtcactcatccatcccctggctccagagatggtcacatgacccaggcctggccagtcaaagtagtctctcccctggccacagtaattggtcatgtgatgcaagccagcttactagcactttgagaatgagtctcctgttgagctggtaggatgtaagcctggagctaatggcgatcatctttgccaccacctggggagagcctgcttgggaatgaaattaacacaaaggaagtccaacctgagaaatggccaaatatatttcctgataacattatgtggccctctggatccagccatgcctgaggtctacccctgggcttttggattatgtgtacagttggttcatccctttttctgctaattcgagtcatggctaatttaacaccctttagaaccttaaagaaccatcagcatcacccgggaacttttttagaaatgcaaaatctctactgctttggatcctgggtcaaaaaaaagaaaaaaaaaagaaatgcaaaactttaggccctgccccagatttactaaatcaatctgcagtttaacaaaatcctcaggtgatttgtatgctcattgaactttaagaagcagtgttttagaacaggttcttaaaaaggaacaaataaactcatttaactaaagttaactgattaaagagg

SEQ ID NO: 179 - DNA, 1069 bp, Homo sapiens
  source 1..1069: mol_type = genomic DNA
cgaagcggggctttgatgacccgcaaagggcgaggcatgcaggaggtggaggaattaagtgaaacagggaaggttgttaaacagcaccgtgtgggcgaggccttaagggtcgtggtccttgtctgggcggggtctttgggcgtcgacgaggcctggttctgggtaggcggggctactacggggcggtgcctgctgtggaaatgcctgcccgcgcgcttctgcccaggcgcatggggcatcgtactctagcctccactcctgccctgtgggcctccatcccgtgccctcgctctgagctgcgcctggacctggttctgccttctggacaatctttccggtggagggagcaaagtcctgcacactggagtggtgtactagcggatcaagtatggacactgactcagactgaggagcagctccactgcactgtgtaccgaggagacaagagccaggctagcaggcccacaccagacgagctggaggccgtgcgcaagtacttccagctagatgttaccctggctcaactgtatcaccactggggttccgtggactcccacttccaagaggtggctcagaaattccaaggtgtgcgactgctgcgacaagaccccatcgaatgccttttctcttttatctgttcctccaacaacaacatcgcccgcatcactggcatggtggagcggctgtgccaggcttttggacctcggctcatccagcttgatgatgtcacctaccatggcttccccagcctgcaggccctggctgggcctccttggcaatgcatttgatggccaccagcttctgcgtcctcttatcttctgccaggatcacctccgagaaggcccccctatcgggagaggggattcacaaggtgaagaactggaaccccagcttccctccagcctctcctccattccctatgggttctgtgaccactgctggaccaaggacgtggatgaccctcccctagtcactcatccatcccctggctccagagatggtcacatgacccaggcctggccagtcaaagtagtctctcccctggccacagtaattggtcatgtgatgc

SEQ ID NO: 180 - DNA, 1948 bp, Homo sapiens
  source 1..1948: mol_type = genomic DNA
cggagaattggggcacgaagcggggctttgatgacccgcaaagggcgaggcatgcaggaggtggaggaattaagtgaaacagggaaggttgttaaacagcaccgtgtgggcgaggccttaagggtcgtggtccttgtctgggcggggtctttgggcgtcgacgaggcctggttctgggtaggcggggctactacggggcggtgcctgctgtggaaatgcctgcccgcgcgcttctgcccaggcgcatggggcatcgtactctagcctccactcctgccctgtgggcctccatcccgtgccctcgctctgagctgcgcctggacctggttctgccttctggacaatctttccggtggagggagcaaagtcctgcacactggagtggtgtactagcggatcaagtatggacactgactcagactgaggagcagctccactgcactgtgtaccgaggagacaagagccaggctagcaggcccacaccagacgagctggaggccgtgcgcaagtacttccagctagatgttaccctggctcaactgtatcaccactggggttccgtggactcccacttccaagaggtggctcagaaattccaaggtgtgcgactgctgcgacaagaccccatcgaatgccttttctcttttatctgttcctccaacaacaacatcgcccgcatcactggcatggtggagcggctgtgccaggcttttggacctcggctcatccagcttgatgatgtcacctaccatggcttccccagcctgcaggccctggctgggccagaggtggaggctcatctcaggaagctgggcctgggctatcgtgcccgttacgtgagtgccagtgcccgagccatcctggaagaacagggcgggctagcctggctgcagcagctacgagagtcctcatatgaggaggcccacaaggccctctgcatcctgcctggagtgggcaccaaggtggctgactgcatctgcctgatggccctagacaagccccaggctgtgcccgtggatgtccatatgtggcacattgcccaacgtgactacagctggcaccctaccacgtcccaggcgaagggaccgagcccccagaccaacaaggaactgggaaactttttccggagcctgtggggaccttatgctggctgggcccaagcggctggatcagatgcctcctgaagaattacagacttcttcctctagacttggagggcctccttggcaatgcatttgatggccaccagcttctgcgtcctcttatcttctgccaggatcacctccgagaaggcccccctatcgggagaggggattcacaaggtgaagaactggaaccccagcttccctccagcctctcctccattccctatgggttctgtgaccactgctggaccaaggacgtggatgaccctcccctagtcactcatccatcccctggctccagagatggtcacatgacccaggcctggccagtcaaagtagtctctcccctggccacagtaattggtcatgtgatgcaagccagcttactagcactttgagaatgagtctcctgttgagctggtaggatgtaagcctggagctaatggcgatcatctttgccaccacctggggagagcctgcttgggaatgaaattaacacaaaggaagtccaacctgagaaatggccaaatatatttcctgataacattatgtggccctctggatccagccatgcctgaggtctacccctgggcttttggattatgtgtacagttggttcatccctttttctgctaattcgagtcatggctaatttaacaccctttagaaccttaaagaaccatcagcatcacccgggaacttttttagaaatgcaaaatctctactgctttggatcctgggtcaaaaaaaagaaaaaaaaaagaaatgcaaaactttaggccctgccccagatttactaaatc

SEQ ID NO: 181 - DNA, 9731 bp, Homo sapiens
  source 1..9731: mol_type = genomic DNA
ggcagccaggagaggcagtggagcttttctccgttgactgtcagaagaaagtgactgttgttgaaaatgtttgctgcaactaaaggagagctgctaagatctactttctagttaaacaagcttttatatttctccccggctcctctcagttcccttgggaaatcaactaattgtgtgtgtaagctaagtgtgtggaggagagaagatgcaaaaaggaagagaaaggtggggaaagaaggaaattgggaacaattagacaaaaagactatagtttgaggccatcaggagtattctagtctgactgaagccaggcagaaggcacagtatctcttgtcctcctgggttttaagcagctgcaacaggaggaggaactgcggcttgtgtttacaaggccgaaatctgaagaaaaagcttccattcttttcccatcttgatatggagggttctccagaggaaaataaggaaatgagatattacatgcttcaaagactttgaaatactcgtgggatatgaagtggaggtgcctagagggttgaagataatgaggacagatgaagaaatgtttgattgtgccatacttacagttgctgattttcaaggtccagcatgtctggcttgcacctagtaaagcagggccgagacagaaagaaaatagattctcaacgagatttcactgtggcttctccagcagaatttgttactcgctttgggggaaataaagtgattgagaaggttcttattgctaacaatggcattgcagcagtgaaatgcatgcggtctatccgtaggtggtcttatgaaatgtttcgaaatgaacgtgcaattagattcgttgtcatggtcacacctgaagaccttaaagccaatgcagaatacattaagatggcagatcactatgtgccagtgcctggaggaccaaacaacaacaactatgcaaatgtggaattaattcttgatattgctaaaaggatcccagtacaagcagtgtgggctggctggggtcatgcttctgagaatcccaaactaccggaacttctcttgaaaaatggcattgccttcatgggtcctccaagccaggccatgtgggctttaggggataagattgcatcttccatagtggctcaaactgcaggtatcccaactcttccctggagcggcagtggtcttcgtgtggactggcaggaaaatgatttttcaaaacgtatcttaaatgttccccaggagctatatgaaaaaggttatgtgaaagatgtggatgatgggctacaggcagctgaggaagttggatatccagtaatgatcaaggcctcagagggaggaggagggaagggaattagaaaagtcaacaatgcagatgacttccctaatctcttcagacaggttcaagctgaagttcctggatctcccatatttgtgatgagactagccaaacaatctcgtcatctggaggtgcagatcttagcggaccaatatggcaatgctatctctttgtttggtcgtgattgctctgtacaacgcaggcatcagaagattattgaagaagcacctgctactattgctactccagcagtatttgaacacatggaacagtgtgcggtgaaacttgccaaaatggtgggttatgtgagtgctgggactgtggaatacctgtacagccaggatggcagcttctactttctggaattgaatcctcggctgcaggtagagcacccttgtacagagatggtggctgatgtcaatctccctgcagcacagctccagattgccatggggattcctctatatagaatcaaggatatccgtatgatgtatggggtatctccctggggtgattctcccattgattttgaagattctgcacacgttccttgtccaaggggccatgttattgctgctcggatcactagtgaaaatccagatgagggttttaagcccagctcaggaacagttcaggagctaaatttccgcagcaataagaatgtttggggatatttcagtgttgctgctgcagggggacttcatgaatttgctgattctcagtttggtcactgcttttcttggggagaaaacagagaagaggcaatttcaaacatggtggtggctttgaaggagctgtctattcggggtgactttcgaactacagttgaatacctgatcaaattgttagagactgaaagctttcagatgaacagaattgatactggctggctggacagactgatagcagaaaaagtacaggctgagcgacctgacaccatgttgggggttgtgtgtggtgccctccacgtggcagatgtgagcctgcggaatagcgtctctaacttccttcactccttagaaaggggtcaagtccttcctgctcatacacttctgaatacagtagatgttgaacttatctatgagggagtcaagtatgtacttaaggtgactcgacagtcccccaactcctatgtggtgatcatgaatggctcatgtgtagaagtagatgtacatcggctgagtgacggtggactgctcttgtcctatgatggcagcagttatactacgtatatgaaagaggaagtggatagatatcgcatcacaattggcaataaaacctgtgtgtttgagaaggaaaatgacccatcggtgatgcgctcaccttctgctgggaagttaatccagtacattgtagaagatggaggtcatgtgtttgccggccagtgctatgctgagattgaggtaatgaagatggtaatgaccttaacagctgtggagtctggctgtatccattacgtcaagcgacctggagcagctcttgaccctggctgtgtactagccaaaatgcaactggacaaccccagcaaggttcagcaggctgaacttcacacaggtagtctgccacggatccagagcacggcactcagaggcgagaaactccatcgagtgttccattatgtcctggataatctggtcaatgtaatgaatggatactgccttccagatcctttctttagcagcaaggtaaaagactgggtagagcgattgatgaaaaccctcagagatccctccctgcctctcctagaattgcaagatattatgaccagtgtgtctggccgcattccccccaatgtggagaagtctatcaagaaggaaatggctcagtatgctagcaacatcacatcagtcctctgtcagtttcccagccagcagattgcaaacatcctagatagccatgcagctacattgaaccggaaatctgaacgggaagtcttctttatgaatactcagagcattgttcagctggtacagaggtaccgaagtggcatccgaggccacatgaaggctgtggtgatggatctgctccggcagtacctgcgagtagagacacaattccagaatggtcactatgacaaatgtgtattcgccctccgagaagagaataaaagtgacatgaacactgtactgaactacatcttctctcacgctcaagtcaccaagaagaatcttctggtcacaatgcttattgatcagttgtgtggccgggaccctactctcactgatgagctgctgaatattctcacagagctaactcaactcagtaagaccaccaatgccaaagtagcacttcgagcacgccaggttcttattgcctcccatttgccatcatatgagcttcgccataaccaagtagagtctatcttcctatcagctattgacatgtatggacatcaattttgcattgagaacctgcagaaactcatcctatcagaaacatctatttttgatgtcctaccaaacttcttctatcacagcaaccaagtagtgaggatggcagctctggaggtgtatgttcgaagggcttatattgcctatgaacttaacagcgtacaacaccgccagcttaaggacaacacctgtgtggtggaattccagttcatgctgcccacatctcatccaaacagagggaacatccctacgctaaacagaatgtccttctcctccaacctcaaccactatggcatgacccatgtagctagtgtcagcgatgtactgttggacaactcattcactccaccttgtcagcggatgggcggaatggtctcttttcggacttttgaagattttgtcaggatctttgatgaagtgatgggctgcttctctgactccccaccccagagtcccacattccctgaggcaggtcacacgtctctttatgatgaggataaggttcccagggatgaaccaattcacattctcaatgtggctatcaagactgactgtgatattgaggatgacaggctggcagctatgttcagagaatttacccagcaaaataaagctaccctggttgaccatgggatccggcgccttactttcctggttgcacaaaaggatttcagaaagcaggtcaactatgaggtggatcggagatttcatagagaattccctaaattttttacattccgagcaagggataagtttgaggaggatcgtatctatcgtcatctggagcctgctctggctttccagttagagctgaaccggatgagaaattttgacctcactgccattccatgtgctaatcacaagatgcacctgtatctcggggcagccaaggtggaagtgggcacagaagtgacagactacaggttctttgttcgtgcaatcatcaggcattctgatctggtcaccaaggaagcttcttttgaatatctgcaaaatgaaggggagcggctactcctggaagccatggatgagttggaagttgcttttaacaatacaaatgtccgcactgactgtaaccacatcttcctcaactttgtgcccacggttatcatggacccatcaaagattgaggaatccgtgcggagcatggtaatgcggtatggaagtcgcctgtggaaattgcgcgtcctccaggcagaactgaaaatcaacattcgcctgacgccaactggaaaagcaattcccatccgcctcttcctgacaaacgagtctggctattacttggatatcagcctatacaaggaagtgactgactccaggacagcacagatcatgtttcaggcatatggagacaaacagggaccactgcatggaatgttaatcaatactccatatgtgaccaaagacctgctgcaatcaaagaggttccaggcacaatccttagggacaacatacatatatgatatcccagagatgtttcggcagtccctgatcaaactctgggagtctatgtccactcaagcatttcttccatctccccctctgccttctgacatgctgacttacactgaactggtactggatgatcaaggtcagctggtccacatgaacaggcttccaggaggaaatgagattggcatggtagcttggaaaatgacctttaaaagtcctgaatatccagaaggccgagatatcattgttattggcaatgacatcacataccgaattgggtcctttgggcctcaagaggatttgttatttctcagagcttccgaacttgctagggcagaaggtattccacgcatctatgtatcagccaacagtggagcaagaatcggactggcagaagaaattcgccatatgtttcatgtggcctgggtagatcctgaggatccttacaagggatacaggtatttatatctgactcctcaagattataagagagtcagtgctctcaactctgtccattgtgaacacgtggaagatgaaggagaatccaggtacaagataacagatattattgggaaagaagagggaattggacccgagaaccttcgaggttctggaatgattgctggagaatcctcattggcctataatgagatcattaccatcagcctggtgacgtgccgggccattgggattggggcttaccttgtccggctgggacagagaaccatccaggttgagaattctcacttaattctaacaggagctggagccctcaacaaagtcctcgggcgggaagtgtacacctccaataaccagctggggggcatccagattatgcacaacaatggggtgacccactgcactgtgtgtgatgactttgaaggggttttcactgtcctgcactggctgtcttacatgcccaagagcgtgcacagttcagttcctcttctgaactcaaaggatcctatagacagaatcatcgagtttgttcccacaaagaccccatacgatcctcgatggatgctagcaggccgtcctcacccaacccaaaaaggtcagtggttgagtggcttttttgactatggatctttctcagagattatgcagccctgggcacagactgtggtggttggtagagccaggctaggaggaatacctgtgggagttgttgctgtagaaacccgaacagtagaactaagtatcccagctgatccagcaaacctggattctgaagccaagataatccagcaggctggccaggtttggttcccagattctgcgtttaagacatatcaggccatcaaggacttcaaccgggaagggctgcctctgatggtctttgccaactggagaggcttctctggtggaatgaaagatatgtacgaccaagtgctgaagtttggtgcttacattgtggatggcttgagggagtgctgccagcctgtgctggtttacattcctccccaggctgagctgcggggtggctcctgggtggtgattgactcctccatcaacccccggcacatggagatgtatgctgaccgagaaagcaggggatctgttctggagccagaagggacagtagaaatcaaattccgcagaaaggatctggtgaaaaccatgcgtcgggtggacccagtctacatccacttggctgagcgattggggaccccagagctaagcacagctgagcggaaggagttggagaacaagttgaaggagcgggaggaattcctaattcccatttaccatcaggtagccgtgcagtttgctgacttgcacgacacaccaggccggatgcaggagaagggtgttattagcgatatcctggattggaaaacatcccgtaccttcttctactggcggctgaggcgtcttctgctggaggacctggtcaagaagaaaatccacaatgccaaccctgagctgactgatggccagattcaagccatgttaaggcgctggtttgtggaagtggaaggaacagtgaaggcttatgtttgggacaataataaggatctggcggagtggctagagaaacagctgacagaggaggatggtgttcactcggtaatagaggaaaacatcaaatgcatcagcagagactacgtcctcaagcaaatccgcagcttggtccaggccaatccagaggttgccatggattccatcatccatatgacgcagcacatatcacccactcagcgagcagaagtcatacggatcctctccacaatggattccccttccacgtaggaagagcttcctgcctgtccctgccctgtctctggagaaaagggctagagctgccttttacaactgtaaccactgtaatgagaaggcacaggagacccagcactggagtcaaatggcattttacttcctctcgtttcaggttatgcatgacatcctgggatgtaagatcacagaatccccctccagcccaccagtcacacctaccccattcagtatttattaccctggccaggcctagtcctccactccctgcacaggactgagaaggcaatgaaaggtacaaacatgtaccatgaggtcttactaaccaaagtagggctgcccctcctgtcctgacagccccttggcctcccagcatggggaagcgtgaggagttgcccagcagtgagcagcccccctcactcctggccccatgagccgcagccacaggcagcagaggagggctaaggagaggaggaagcctcaagtccattgtttattaccccgactcttagcccagcacacagtaggcactggagaggaatgattcccagtttaaccacactacggtaccttttatgaagaaaaattagagcataaaatctactacaagctccataggaactcaaagatgagggcaaaactgtgagccaagaagcagagaaagaaaatagaaccagttattcttgatttaggggacctcaaccttgggttcagtctctgaggacaaagggaaaggtagttgttggcctgcctctcgcctgcacgtcactgctggactagctgtcgcatgtggctgggagctgcaaggccagtgcttgaggggccccagcagttccacaggtggtgaagcctgagttggcagaggaggagccagaagagaactgccctttctgcactggtggaaactagttatttatgccatgtggagagccagtgagatagatagatagtctgtttgttttgaggacttggaaagttgttcctatgaagcctggagcttggatggttttgagaggttaatggtgcctccacactcactcttccctagttccaggattactgtcctagcagctaacggttctactctcttccccagagtgtagacaggcagcaggtctccccacagctctgaaaggaccctggtgacagctacaccctcagcaccaggagctggccttcctgatgagggaggcttccaggaaacacagaatccacatgaccttaagattatttacaactcagtcatggtgctgctgtcctccaggcttactggcccctcctgactggcatcaggggcttcctcaggtggtggagagagtttactttcaacaactagtttattcaagaaaagaacttactgattcctctgttcctaaagcaagagtggcaggtgatcagggctggtgtagcatccggttcctttagtgcagctaactgcatttgtcactgatgaccaaggaggaaatcactaagacatttgagaagcagtggtatgaacgttcttggacaagccacagttctgagccttaaccctgtagtttgcacacaagaacgagctccacctccccttcttcaggaggaatctgtgcggatagattggctggacttttcaatggttctgggttgcaggtgggcactgtatggctgggtatggagcggacagcccccaggagtcagagcctcagcccggctgccctggtggaaggtacaggtgttcagcaccttcagaaaagggcataaagtggtgggggacaattctcagtccaggaaaatgcattgaccattgctggctatttgcttacctagtaagaattggattcatttttgaccagattattcttctatgcttttttgcaataaatcaaatcccacatatctacaagtggtatgaagtcctgcaccccccaggaggcctgtccaggcatgtcttcagaggcagggtgggttacactcatttacctcccctctccccaccaaattatgacacaaacgagtatgtttcctctctagaaccctgtaatgcctcctcccccatccccagagctccttactgtaggtcttaccctggacaaggattttttcaagttggaggcacagaacatgagcaatctgacattcccacagcccctcaaacatgcaaggctactaaggcaggaggagtataaatgatggatattgaccaagacctgcttggacggagaccgccatattatctgttctcttcgttcacaaaacagccttcacttgtctcagaatttgatggacacatactgtgatgagcaggagcttcagatgcactctttacacattttgttgaaataaacctctacatttgt

SEQ ID NO: 182 - DNA, 9962 bp, Homo sapiens
  source 1..9962: mol_type = genomic DNA
gccctcttggccttttcccggtccccgccgcgcgcctgctgctgtccccgtgcccgaggactgggaggatggggctgagccgcttgcctgacttttgatccgaccagtaatcactttgcccgtgtggcgcgtggcccgttgcctgaggcttcctggcgcgtggggctgtttggtcccctccggagtgcggtgaggcgggccgagccgggactgcctgggtttggggataacgttcccatctccacccctgttgcagcaagggaaattgaggctgagggaactgggcccagggacggcgagccgtggctgcctctccagtccgggccccgaagggctgctcgtggatgaaccagactgattttaaggggtgaagagggtgcgtttcaatcagatgcttctggaacgtcgaaattgtcttctttggaaagaaccatcccctctttgggcttcagaggcccaaattgaggcgcaatgatgagaggatgtggtggtctactctgatgtcaatcttgagggctaggtctttctggaagtggatatctactcagacagtaagaattataagagctgtaagagctcattttggaggaataatggatgaaccatctcccttggcccaacctctggagctgaaccagcactctcgattcataataggttctgtgtctgaagataactcagaggatgagatcagcaacctggtgaagttggacctactggaggagaaggagggctccttgtcacctgcttctgttggctcagatacactctctgatttggggatctctagcctacaggatggcttggccttgcacataaggtccagcatgtctggcttgcacctagtaaagcagggccgagacagaaagaaaatagattctcaacgagatttcactgtggcttctccagcagaatttgttactcgctttgggggaaataaagtgattgagaaggttcttattgctaacaatggcattgcagcagtgaaatgcatgcggtctatccgtaggtggtcttatgaaatgtttcgaaatgaacgtgcaattagattcgttgtcatggtcacacctgaagaccttaaagccaatgcagaatacattaagatggcagatcactatgtgccagtgcctggaggaccaaacaacaacaactatgcaaatgtggaattaattcttgatattgctaaaaggatcccagtacaagcagtgtgggctggctggggtcatgcttctgagaatcccaaactaccggaacttctcttgaaaaatggcattgccttcatgggtcctccaagccaggccatgtgggctttaggggataagattgcatcttccatagtggctcaaactgcaggtatcccaactcttccctggagcggcagtggtcttcgtgtggactggcaggaaaatgatttttcaaaacgtatcttaaatgttccccaggagctatatgaaaaaggttatgtgaaagatgtggatgatgggctacaggcagctgaggaagttggatatccagtaatgatcaaggcctcagagggaggaggagggaagggaattagaaaagtcaacaatgcagatgacttccctaatctcttcagacaggttcaagctgaagttcctggatctcccatatttgtgatgagactagccaaacaatctcgtcatctggaggtgcagatcttagcggaccaatatggcaatgctatctctttgtttggtcgtgattgctctgtacaacgcaggcatcagaagattattgaagaagcacctgctactattgctactccagcagtatttgaacacatggaacagtgtgcggtgaaacttgccaaaatggtgggttatgtgagtgctgggactgtggaatacctgtacagccaggatggcagcttctactttctggaattgaatcctcggctgcaggtagagcacccttgtacagagatggtggctgatgtcaatctccctgcagcacagctccagattgccatggggattcctctatatagaatcaaggatatccgtatgatgtatggggtatctccctggggtgattctcccattgattttgaagattctgcacacgttccttgtccaaggggccatgttattgctgctcggatcactagtgaaaatccagatgagggttttaagcccagctcaggaacagttcaggagctaaatttccgcagcaataagaatgtttggggatatttcagtgttgctgctgcagggggacttcatgaatttgctgattctcagtttggtcactgcttttcttggggagaaaacagagaagaggcaatttcaaacatggtggtggctttgaaggagctgtctattcggggtgactttcgaactacagttgaatacctgatcaaattgttagagactgaaagctttcagatgaacagaattgatactggctggctggacagactgatagcagaaaaagtacaggctgagcgacctgacaccatgttgggggttgtgtgtggtgccctccacgtggcagatgtgagcctgcggaatagcgtctctaacttccttcactccttagaaaggggtcaagtccttcctgctcatacacttctgaatacagtagatgttgaacttatctatgagggagtcaagtatgtacttaaggtgactcgacagtcccccaactcctatgtggtgatcatgaatggctcatgtgtagaagtagatgtacatcggctgagtgacggtggactgctcttgtcctatgatggcagcagttatactacgtatatgaaagaggaagtggatagatatcgcatcacaattggcaataaaacctgtgtgtttgagaaggaaaatgacccatcggtgatgcgctcaccttctgctgggaagttaatccagtacattgtagaagatggaggtcatgtgtttgccggccagtgctatgctgagattgaggtaatgaagatggtaatgaccttaacagctgtggagtctggctgtatccattacgtcaagcgacctggagcagctcttgaccctggctgtgtactagccaaaatgcaactggacaaccccagcaaggttcagcaggctgaacttcacacaggtagtctgccacggatccagagcacggcactcagaggcgagaaactccatcgagtgttccattatgtcctggataatctggtcaatgtaatgaatggatactgccttccagatcctttctttagcagcaaggtaaaagactgggtagagcgattgatgaaaaccctcagagatccctccctgcctctcctagaattgcaagatattatgaccagtgtgtctggccgcattccccccaatgtggagaagtctatcaagaaggaaatggctcagtatgctagcaacatcacatcagtcctctgtcagtttcccagccagcagattgcaaacatcctagatagccatgcagctacattgaaccggaaatctgaacgggaagtcttctttatgaatactcagagcattgttcagctggtacagaggtaccgaagtggcatccgaggccacatgaaggctgtggtgatggatctgctccggcagtacctgcgagtagagacacaattccagaatggtcactatgacaaatgtgtattcgccctccgagaagagaataaaagtgacatgaacactgtactgaactacatcttctctcacgctcaagtcaccaagaagaatcttctggtcacaatgcttattgatcagttgtgtggccgggaccctactctcactgatgagctgctgaatattctcacagagctaactcaactcagtaagaccaccaatgccaaagtagcacttcgagcacgccaggttcttattgcctcccatttgccatcatatgagcttcgccataaccaagtagagtctatcttcctatcagctattgacatgtatggacatcaattttgcattgagaacctgcagaaactcatcctatcagaaacatctatttttgatgtcctaccaaacttcttctatcacagcaaccaagtagtgaggatggcagctctggaggtgtatgttcgaagggcttatattgcctatgaacttaacagcgtacaacaccgccagcttaaggacaacacctgtgtggtggaattccagttcatgctgcccacatctcatccaaacagagggaacatccctacgctaaacagaatgtccttctcctccaacctcaaccactatggcatgacccatgtagctagtgtcagcgatgtactgttggacaactcattcactccaccttgtcagcggatgggcggaatggtctcttttcggacttttgaagattttgtcaggatctttgatgaagtgatgggctgcttctctgactccccaccccagagtcccacattccctgaggcaggtcacacgtctctttatgatgaggataaggttcccagggatgaaccaattcacattctcaatgtggctatcaagactgactgtgatattgaggatgacaggctggcagctatgttcagagaatttacccagcaaaataaagctaccctggttgaccatgggatccggcgccttactttcctggttgcacaaaaggatttcagaaagcaggtcaactatgaggtggatcggagatttcatagagaattccctaaattttttacattccgagcaagggataagtttgaggaggatcgtatctatcgtcatctggagcctgctctggctttccagttagagctgaaccggatgagaaattttgacctcactgccattccatgtgctaatcacaagatgcacctgtatctcggggcagccaaggtggaagtgggcacagaagtgacagactacaggttctttgttcgtgcaatcatcaggcattctgatctggtcaccaaggaagcttcttttgaatatctgcaaaatgaaggggagcggctactcctggaagccatggatgagttggaagttgcttttaacaatacaaatgtccgcactgactgtaaccacatcttcctcaactttgtgcccacggttatcatggacccatcaaagattgaggaatccgtgcggagcatggtaatgcggtatggaagtcgcctgtggaaattgcgcgtcctccaggcagaactgaaaatcaacattcgcctgacgccaactggaaaagcaattcccatccgcctcttcctgacaaacgagtctggctattacttggatatcagcctatacaaggaagtgactgactccaggacagcacagatcatgtttcaggcatatggagacaaacagggaccactgcatggaatgttaatcaatactccatatgtgaccaaagacctgctgcaatcaaagaggttccaggcacaatccttagggacaacatacatatatgatatcccagagatgtttcggcagtccctgatcaaactctgggagtctatgtccactcaagcatttcttccatctccccctctgccttctgacatgctgacttacactgaactggtactggatgatcaaggtcagctggtccacatgaacaggcttccaggaggaaatgagattggcatggtagcttggaaaatgacctttaaaagtcctgaatatccagaaggccgagatatcattgttattggcaatgacatcacataccgaattgggtcctttgggcctcaagaggatttgttatttctcagagcttccgaacttgctagggcagaaggtattccacgcatctatgtatcagccaacagtggagcaagaatcggactggcagaagaaattcgccatatgtttcatgtggcctgggtagatcctgaggatccttacaagggatacaggtatttatatctgactcctcaagattataagagagtcagtgctctcaactctgtccattgtgaacacgtggaagatgaaggagaatccaggtacaagataacagatattattgggaaagaagagggaattggacccgagaaccttcgaggttctggaatgattgctggagaatcctcattggcctataatgagatcattaccatcagcctggtgacgtgccgggccattgggattggggcttaccttgtccggctgggacagagaaccatccaggttgagaattctcacttaattctaacaggagctggagccctcaacaaagtcctcgggcgggaagtgtacacctccaataaccagctggggggcatccagattatgcacaacaatggggtgacccactgcactgtgtgtgatgactttgaaggggttttcactgtcctgcactggctgtcttacatgcccaagagcgtgcacagttcagttcctcttctgaactcaaaggatcctatagacagaatcatcgagtttgttcccacaaagaccccatacgatcctcgatggatgctagcaggccgtcctcacccaacccaaaaaggtcagtggttgagtggcttttttgactatggatctttctcagagattatgcagccctgggcacagactgtggtggttggtagagccaggctaggaggaatacctgtgggagttgttgctgtagaaacccgaacagtagaactaagtatcccagctgatccagcaaacctggattctgaagccaagataatccagcaggctggccaggtttggttcccagattctgcgtttaagacatatcaggccatcaaggacttcaaccgggaagggctgcctctgatggtctttgccaactggagaggcttctctggtggaatgaaagatatgtacgaccaagtgctgaagtttggtgcttacattgtggatggcttgagggagtgctgccagcctgtgctggtttacattcctccccaggctgagctgcggggtggctcctgggtggtgattgactcctccatcaacccccggcacatggagatgtatgctgaccgagaaagcaggggatctgttctggagccagaagggacagtagaaatcaaattccgcagaaaggatctggtgaaaaccatgcgtcgggtggacccagtctacatccacttggctgagcgattggggaccccagagctaagcacagctgagcggaaggagttggagaacaagttgaaggagcgggaggaattcctaattcccatttaccatcaggtagccgtgcagtttgctgacttgcacgacacaccaggccggatgcaggagaagggtgttattagcgatatcctggattggaaaacatcccgtaccttcttctactggcggctgaggcgtcttctgctggaggacctggtcaagaagaaaatccacaatgccaaccctgagctgactgatggccagattcaagccatgttaaggcgctggtttgtggaagtggaaggaacagtgaaggcttatgtttgggacaataataaggatctggcggagtggctagagaaacagctgacagaggaggatggtgttcactcggtaatagaggaaaacatcaaatgcatcagcagagactacgtcctcaagcaaatccgcagcttggtccaggccaatccagaggttgccatggattccatcatccatatgacgcagcacatatcacccactcagcgagcagaagtcatacggatcctctccacaatggattccccttccacgtaggaagagcttcctgcctgtccctgccctgtctctggagaaaagggctagagctgccttttacaactgtaaccactgtaatgagaaggcacaggagacccagcactggagtcaaatggcattttacttcctctcgtttcaggttatgcatgacatcctgggatgtaagatcacagaatccccctccagcccaccagtcacacctaccccattcagtatttattaccctggccaggcctagtcctccactccctgcacaggactgagaaggcaatgaaaggtacaaacatgtaccatgaggtcttactaaccaaagtagggctgcccctcctgtcctgacagccccttggcctcccagcatggggaagcgtgaggagttgcccagcagtgagcagcccccctcactcctggccccatgagccgcagccacaggcagcagaggagggctaaggagaggaggaagcctcaagtccattgtttattaccccgactcttagcccagcacacagtaggcactggagaggaatgattcccagtttaaccacactacggtaccttttatgaagaaaaattagagcataaaatctactacaagctccataggaactcaaagatgagggcaaaactgtgagccaagaagcagagaaagaaaatagaaccagttattcttgatttaggggacctcaaccttgggttcagtctctgaggacaaagggaaaggtagttgttggcctgcctctcgcctgcacgtcactgctggactagctgtcgcatgtggctgggagctgcaaggccagtgcttgaggggccccagcagttccacaggtggtgaagcctgagttggcagaggaggagccagaagagaactgccctttctgcactggtggaaactagttatttatgccatgtggagagccagtgagatagatagatagtctgtttgttttgaggacttggaaagttgttcctatgaagcctggagcttggatggttttgagaggttaatggtgcctccacactcactcttccctagttccaggattactgtcctagcagctaacggttctactctcttccccagagtgtagacaggcagcaggtctccccacagctctgaaaggaccctggtgacagctacaccctcagcaccaggagctggccttcctgatgagggaggcttccaggaaacacagaatccacatgaccttaagattatttacaactcagtcatggtgctgctgtcctccaggcttactggcccctcctgactggcatcaggggcttcctcaggtggtggagagagtttactttcaacaactagtttattcaagaaaagaacttactgattcctctgttcctaaagcaagagtggcaggtgatcagggctggtgtagcatccggttcctttagtgcagctaactgcatttgtcactgatgaccaaggaggaaatcactaagacatttgagaagcagtggtatgaacgttcttggacaagccacagttctgagccttaaccctgtagtttgcacacaagaacgagctccacctccccttcttcaggaggaatctgtgcggatagattggctggacttttcaatggttctgggttgcaggtgggcactgtatggctgggtatggagcggacagcccccaggagtcagagcctcagcccggctgccctggtggaaggtacaggtgttcagcaccttcagaaaagggcataaagtggtgggggacaattctcagtccaggaaaatgcattgaccattgctggctatttgcttacctagtaagaattggattcatttttgaccagattattcttctatgcttttttgcaataaatcaaatcccacatatctacaagtggtatgaagtcctgcaccccccaggaggcctgtccaggcatgtcttcagaggcagggtgggttacactcatttacctcccctctccccaccaaattatgacacaaacgagtatgtttcctctctagaaccctgtaatgcctcctcccccatccccagagctccttactgtaggtcttaccctggacaaggattttttcaagttggaggcacagaacatgagcaatctgacattcccacagcccctcaaacatgcaaggctactaaggcaggaggagtataaatgatggatattgaccaagacctgcttggacggagaccgccatattatctgttctcttcgttcacaaaacagccttcacttgtctcagaatttgatggacacatactgtgatgagcaggagcttcagatgcactctttacacattttgttgaaataaacctctacatttgtagaagagtta

SEQ ID NO: 183 - DNA, 9624 bp, Homo sapiens
  source 1..9624: mol_type = genomic DNA
ggcagccaggagaggcagtggagcttttctccgttgactgtcagaagaaagtgactgttgttgaaaatgtttgctgcaactaaaggagagctgctaagatctactttctagttaaacaagcttttatatttctccccggctcctctcagttcccttgggaaatcaactaattgtgtgtgtaagctaagtgtgtggaggagagaagatgcaaaaaggaagagaaaggtggggaaagaaggaaattgggaacaattagacaaaaagactatagtttgaggccatcaggagtattctagtctgactgaagccaggcagaaggcacagtatctcttgtcctcctgggttttaagcagctgcaacaggaggaggaactgcggcttgtgtttacaaggccgaaatctgaagaaaaagcttccattcttttcccatcttgatatggagggttctccagaggaaaataaggaaatgagatattacatgcttcaaaggtccagcatgtctggcttgcacctagtaaagcagggccgagacagaaagaaaatagattctcaacgagatttcactgtggcttctccagcagaatttgttactcgctttgggggaaataaagtgattgagaaggttcttattgctaacaatggcattgcagcagtgaaatgcatgcggtctatccgtaggtggtcttatgaaatgtttcgaaatgaacgtgcaattagattcgttgtcatggtcacacctgaagaccttaaagccaatgcagaatacattaagatggcagatcactatgtgccagtgcctggaggaccaaacaacaacaactatgcaaatgtggaattaattcttgatattgctaaaaggatcccagtacaagcagtgtgggctggctggggtcatgcttctgagaatcccaaactaccggaacttctcttgaaaaatggcattgccttcatgggtcctccaagccaggccatgtgggctttaggggataagattgcatcttccatagtggctcaaactgcaggtatcccaactcttccctggagcggcagtggtcttcgtgtggactggcaggaaaatgatttttcaaaacgtatcttaaatgttccccaggagctatatgaaaaaggttatgtgaaagatgtggatgatgggctacaggcagctgaggaagttggatatccagtaatgatcaaggcctcagagggaggaggagggaagggaattagaaaagtcaacaatgcagatgacttccctaatctcttcagacaggttcaagctgaagttcctggatctcccatatttgtgatgagactagccaaacaatctcgtcatctggaggtgcagatcttagcggaccaatatggcaatgctatctctttgtttggtcgtgattgctctgtacaacgcaggcatcagaagattattgaagaagcacctgctactattgctactccagcagtatttgaacacatggaacagtgtgcggtgaaacttgccaaaatggtgggttatgtgagtgctgggactgtggaatacctgtacagccaggatggcagcttctactttctggaattgaatcctcggctgcaggtagagcacccttgtacagagatggtggctgatgtcaatctccctgcagcacagctccagattgccatggggattcctctatatagaatcaaggatatccgtatgatgtatggggtatctccctggggtgattctcccattgattttgaagattctgcacacgttccttgtccaaggggccatgttattgctgctcggatcactagtgaaaatccagatgagggttttaagcccagctcaggaacagttcaggagctaaatttccgcagcaataagaatgtttggggatatttcagtgttgctgctgcagggggacttcatgaatttgctgattctcagtttggtcactgcttttcttggggagaaaacagagaagaggcaatttcaaacatggtggtggctttgaaggagctgtctattcggggtgactttcgaactacagttgaatacctgatcaaattgttagagactgaaagctttcagatgaacagaattgatactggctggctggacagactgatagcagaaaaagtacaggctgagcgacctgacaccatgttgggggttgtgtgtggtgccctccacgtggcagatgtgagcctgcggaatagcgtctctaacttccttcactccttagaaaggggtcaagtccttcctgctcatacacttctgaatacagtagatgttgaacttatctatgagggagtcaagtatgtacttaaggtgactcgacagtcccccaactcctatgtggtgatcatgaatggctcatgtgtagaagtagatgtacatcggctgagtgacggtggactgctcttgtcctatgatggcagcagttatactacgtatatgaaagaggaagtggatagatatcgcatcacaattggcaataaaacctgtgtgtttgagaaggaaaatgacccatcggtgatgcgctcaccttctgctgggaagttaatccagtacattgtagaagatggaggtcatgtgtttgccggccagtgctatgctgagattgaggtaatgaagatggtaatgaccttaacagctgtggagtctggctgtatccattacgtcaagcgacctggagcagctcttgaccctggctgtgtactagccaaaatgcaactggacaaccccagcaaggttcagcaggctgaacttcacacaggtagtctgccacggatccagagcacggcactcagaggcgagaaactccatcgagtgttccattatgtcctggataatctggtcaatgtaatgaatggatactgccttccagatcctttctttagcagcaaggtaaaagactgggtagagcgattgatgaaaaccctcagagatccctccctgcctctcctagaattgcaagatattatgaccagtgtgtctggccgcattccccccaatgtggagaagtctatcaagaaggaaatggctcagtatgctagcaacatcacatcagtcctctgtcagtttcccagccagcagattgcaaacatcctagatagccatgcagctacattgaaccggaaatctgaacgggaagtcttctttatgaatactcagagcattgttcagctggtacagaggtaccgaagtggcatccgaggccacatgaaggctgtggtgatggatctgctccggcagtacctgcgagtagagacacaattccagaatggtcactatgacaaatgtgtattcgccctccgagaagagaataaaagtgacatgaacactgtactgaactacatcttctctcacgctcaagtcaccaagaagaatcttctggtcacaatgcttattgatcagttgtgtggccgggaccctactctcactgatgagctgctgaatattctcacagagctaactcaactcagtaagaccaccaatgccaaagtagcacttcgagcacgccaggttcttattgcctcccatttgccatcatatgagcttcgccataaccaagtagagtctatcttcctatcagctattgacatgtatggacatcaattttgcattgagaacctgcagaaactcatcctatcagaaacatctatttttgatgtcctaccaaacttcttctatcacagcaaccaagtagtgaggatggcagctctggaggtgtatgttcgaagggcttatattgcctatgaacttaacagcgtacaacaccgccagcttaaggacaacacctgtgtggtggaattccagttcatgctgcccacatctcatccaaacagagggaacatccctacgctaaacagaatgtccttctcctccaacctcaaccactatggcatgacccatgtagctagtgtcagcgatgtactgttggacaactcattcactccaccttgtcagcggatgggcggaatggtctcttttcggacttttgaagattttgtcaggatctttgatgaagtgatgggctgcttctctgactccccaccccagagtcccacattccctgaggcaggtcacacgtctctttatgatgaggataaggttcccagggatgaaccaattcacattctcaatgtggctatcaagactgactgtgatattgaggatgacaggctggcagctatgttcagagaatttacccagcaaaataaagctaccctggttgaccatgggatccggcgccttactttcctggttgcacaaaaggatttcagaaagcaggtcaactatgaggtggatcggagatttcatagagaattccctaaattttttacattccgagcaagggataagtttgaggaggatcgtatctatcgtcatctggagcctgctctggctttccagttagagctgaaccggatgagaaattttgacctcactgccattccatgtgctaatcacaagatgcacctgtatctcggggcagccaaggtggaagtgggcacagaagtgacagactacaggttctttgttcgtgcaatcatcaggcattctgatctggtcaccaaggaagcttcttttgaatatctgcaaaatgaaggggagcggctactcctggaagccatggatgagttggaagttgcttttaacaatacaaatgtccgcactgactgtaaccacatcttcctcaactttgtgcccacggttatcatggacccatcaaagattgaggaatccgtgcggagcatggtaatgcggtatggaagtcgcctgtggaaattgcgcgtcctccaggcagaactgaaaatcaacattcgcctgacgccaactggaaaagcaattcccatccgcctcttcctgacaaacgagtctggctattacttggatatcagcctatacaaggaagtgactgactccaggacagcacagatcatgtttcaggcatatggagacaaacagggaccactgcatggaatgttaatcaatactccatatgtgaccaaagacctgctgcaatcaaagaggttccaggcacaatccttagggacaacatacatatatgatatcccagagatgtttcggcagtccctgatcaaactctgggagtctatgtccactcaagcatttcttccatctccccctctgccttctgacatgctgacttacactgaactggtactggatgatcaaggtcagctggtccacatgaacaggcttccaggaggaaatgagattggcatggtagcttggaaaatgacctttaaaagtcctgaatatccagaaggccgagatatcattgttattggcaatgacatcacataccgaattgggtcctttgggcctcaagaggatttgttatttctcagagcttccgaacttgctagggcagaaggtattccacgcatctatgtatcagccaacagtggagcaagaatcggactggcagaagaaattcgccatatgtttcatgtggcctgggtagatcctgaggatccttacaagggatacaggtatttatatctgactcctcaagattataagagagtcagtgctctcaactctgtccattgtgaacacgtggaagatgaaggagaatccaggtacaagataacagatattattgggaaagaagagggaattggacccgagaaccttcgaggttctggaatgattgctggagaatcctcattggcctataatgagatcattaccatcagcctggtgacgtgccgggccattgggattggggcttaccttgtccggctgggacagagaaccatccaggttgagaattctcacttaattctaacaggagctggagccctcaacaaagtcctcgggcgggaagtgtacacctccaataaccagctggggggcatccagattatgcacaacaatggggtgacccactgcactgtgtgtgatgactttgaaggggttttcactgtcctgcactggctgtcttacatgcccaagagcgtgcacagttcagttcctcttctgaactcaaaggatcctatagacagaatcatcgagtttgttcccacaaagaccccatacgatcctcgatggatgctagcaggccgtcctcacccaacccaaaaaggtcagtggttgagtggcttttttgactatggatctttctcagagattatgcagccctgggcacagactgtggtggttggtagagccaggctaggaggaatacctgtgggagttgttgctgtagaaacccgaacagtagaactaagtatcccagctgatccagcaaacctggattctgaagccaagataatccagcaggctggccaggtttggttcccagattctgcgtttaagacatatcaggccatcaaggacttcaaccgggaagggctgcctctgatggtctttgccaactggagaggcttctctggtggaatgaaagatatgtacgaccaagtgctgaagtttggtgcttacattgtggatggcttgagggagtgctgccagcctgtgctggtttacattcctccccaggctgagctgcggggtggctcctgggtggtgattgactcctccatcaacccccggcacatggagatgtatgctgaccgagaaagcaggggatctgttctggagccagaagggacagtagaaatcaaattccgcagaaaggatctggtgaaaaccatgcgtcgggtggacccagtctacatccacttggctgagcgattggggaccccagagctaagcacagctgagcggaaggagttggagaacaagttgaaggagcgggaggaattcctaattcccatttaccatcaggtagccgtgcagtttgctgacttgcacgacacaccaggccggatgcaggagaagggtgttattagcgatatcctggattggaaaacatcccgtaccttcttctactggcggctgaggcgtcttctgctggaggacctggtcaagaagaaaatccacaatgccaaccctgagctgactgatggccagattcaagccatgttaaggcgctggtttgtggaagtggaaggaacagtgaaggcttatgtttgggacaataataaggatctggcggagtggctagagaaacagctgacagaggaggatggtgttcactcggtaatagaggaaaacatcaaatgcatcagcagagactacgtcctcaagcaaatccgcagcttggtccaggccaatccagaggttgccatggattccatcatccatatgacgcagcacatatcacccactcagcgagcagaagtcatacggatcctctccacaatggattccccttccacgtaggaagagcttcctgcctgtccctgccctgtctctggagaaaagggctagagctgccttttacaactgtaaccactgtaatgagaaggcacaggagacccagcactggagtcaaatggcattttacttcctctcgtttcaggttatgcatgacatcctgggatgtaagatcacagaatccccctccagcccaccagtcacacctaccccattcagtatttattaccctggccaggcctagtcctccactccctgcacaggactgagaaggcaatgaaaggtacaaacatgtaccatgaggtcttactaaccaaagtagggctgcccctcctgtcctgacagccccttggcctcccagcatggggaagcgtgaggagttgcccagcagtgagcagcccccctcactcctggccccatgagccgcagccacaggcagcagaggagggctaaggagaggaggaagcctcaagtccattgtttattaccccgactcttagcccagcacacagtaggcactggagaggaatgattcccagtttaaccacactacggtaccttttatgaagaaaaattagagcataaaatctactacaagctccataggaactcaaagatgagggcaaaactgtgagccaagaagcagagaaagaaaatagaaccagttattcttgatttaggggacctcaaccttgggttcagtctctgaggacaaagggaaaggtagttgttggcctgcctctcgcctgcacgtcactgctggactagctgtcgcatgtggctgggagctgcaaggccagtgcttgaggggccccagcagttccacaggtggtgaagcctgagttggcagaggaggagccagaagagaactgccctttctgcactggtggaaactagttatttatgccatgtggagagccagtgagatagatagatagtctgtttgttttgaggacttggaaagttgttcctatgaagcctggagcttggatggttttgagaggttaatggtgcctccacactcactcttccctagttccaggattactgtcctagcagctaacggttctactctcttccccagagtgtagacaggcagcaggtctccccacagctctgaaaggaccctggtgacagctacaccctcagcaccaggagctggccttcctgatgagggaggcttccaggaaacacagaatccacatgaccttaagattatttacaactcagtcatggtgctgctgtcctccaggcttactggcccctcctgactggcatcaggggcttcctcaggtggtggagagagtttactttcaacaactagtttattcaagaaaagaacttactgattcctctgttcctaaagcaagagtggcaggtgatcagggctggtgtagcatccggttcctttagtgcagctaactgcatttgtcactgatgaccaaggaggaaatcactaagacatttgagaagcagtggtatgaacgttcttggacaagccacagttctgagccttaaccctgtagtttgcacacaagaacgagctccacctccccttcttcaggaggaatctgtgcggatagattggctggacttttcaatggttctgggttgcaggtgggcactgtatggctgggtatggagcggacagcccccaggagtcagagcctcagcccggctgccctggtggaaggtacaggtgttcagcaccttcagaaaagggcataaagtggtgggggacaattctcagtccaggaaaatgcattgaccattgctggctatttgcttacctagtaagaattggattcatttttgaccagattattcttctatgcttttttgcaataaatcaaatcccacatatctacaagtggtatgaagtcctgcaccccccaggaggcctgtccaggcatgtcttcagaggcagggtgggttacactcatttacctcccctctccccaccaaattatgacacaaacgagtatgtttcctctctagaaccctgtaatgcctcctcccccatccccagagctccttactgtaggtcttaccctggacaaggattttttcaagttggaggcacagaacatgagcaatctgacattcccacagcccctcaaacatgcaaggctactaaggcaggaggagtataaatgatggatattgaccaagacctgcttggacggagaccgccatattatctgttctcttcgttcacaaaacagccttcacttgtctcagaatttgatggacacatactgtgatgagcaggagcttcagatgcactctttacacattttgttgaaataaacctctacatttgtagaa

SEQ ID NO: 184 - DNA, 1803 bp, Homo sapiens
  source 1..1803: mol_type = genomic DNA
agaaattcgccatatgtttcatgtggcctgggtagatcctgaggatccttacaagggatacaggtatttatatctgactcctcaagattataagagagtcagtgctctcaactctgtccattgtgaacacgtggaagatgaaggagaatccaggtgacgtgccgggccattgggattggggcttaccttgtccggctgggacagagaaccatccaggttgagaattctcacttaattctaacaggagctggagccctcaacaaagtcctcgggcgggaagtgtacacctccaataaccagctggggggcatccagattatgcacaacaatggggtgacccactgcactgtgtgtgatgactttgaaggggttttcactgtcctgcactggctgtcttacatgcccaagagcgtgcacagttcagttcctcttctgaactcaaaggatcctatagacagaatcatcgagtttgttcccacaaagaccccatacgatcctcgatggatgctagcaggccgtcctcacccaacccaaaaaggtcagtggttgagtggcttttttgactatggatctttctcagagattatgcagccctgggcacagactgtggtggttggtagagccaggctaggaggaatacctgtgggagttgttgctgtagaaacccgaacagtagaactaagtatcccagctgatccagcaaacctggattctgaagccaagataatccagcaggctggccaggtttggttcccagattctgcgtttaagacatatcaggccatcaaggacttcaaccgggaagggctgcctctgatggtctttgccaactggagaggcttctctggtggaatgaaagatatgtacgaccaagtgctgaagtttggtgcttacattgtggatggcttgagggagtgctgccagcctgtgctggtttacattcctccccaggctgagctgcggggtggctcctgggtggtgattgactcctccatcaacccccggcacatggagatgtatgctgaccgagaaagcaggggatctgttctggagccagaagggacagtagaaatcaaattccgcagaaaggatctggtgaaaaccatgcgtcgggtggacccagtctacatccacttggctgagcgattggggaccccagagctaagcacagctgagcggaaggagttggagaacaagttgaaggagcgggaggaattcctaattcccatttaccatcaggtagccgtgcagtttgctgacttgcacgacacaccaggccggatgcaggagaagggtgttattagcgatatcctggattggaaaacatcccgtaccttcttctactggcggctgaggcgtcttctgctggaggacctggtcaagaagaaaatccacaatgccaaccctgagctgactgatggccagattcaagccatgttaaggcgctggtttgtggaagtggaaggaacagtgaaggcttatgtttgggacaataataaggatctggcggagtggctagagaaacagctgacagaggaggatggtgttcactcggtaatagaggaaaacatcaaatgcatcagcagagactacgtcctcaagcaaatccgcagcttggtccaggccaatccagaggttgccatggattccatcatccatatgacgcagcacatatcacccactcagcgagcagaagtcatacggatcctctccacaatggattccccttccacgtaggaagagcttcctgcctgtccctgccctgtctctggagaaaagggctagagctgccttttacaactg

SEQ ID NO: 185 - DNA, 662 bp, Homo sapiens
  source 1..662: mol_type = genomic DNA
cggcctggtgctgcacgcctgtcagccatcgcccgagccgccggcgtctcctcccgcccagcagttcctccacgcaggggctccggaatcgcccgaccgcacacgttgccaccctgaggtctttctggaagtggatatctactcagacagtaagaattataagagctgtaagagctcattttggaggaataatggatgaaccatctcccttggcccaacctctggagctgaaccagcactctcgattcataataggttctgtgtctgaagataactcagaggatgagatcagcaacctggtgaagttggacctactggaggagaaggagggctccttgtcacctgcttctgttggctcagatacactctctgatttggggatctctagcctacaggatggcttggccttgcacataagactttgaaatactcgtgggatatgaagtggaggtgcctagagggttgaagataatgaggacagatgaagaaatgtttgattgtgccatacttacagttgctgattttcaaggtccagcatgtctggcttgcacctagtaaagcagggccgagacagaaagaaaatagattctcaacgagatttcactgtggcttctccagcagaatttgttactcgctttgggggaaataaagtgattgagaag

SEQ ID NO: 186 - DNA, 9554 bp, Homo sapiens
  source 1..9554: mol_type = genomic DNA
cggcctggtgctgcacgcctgtcagccatcgcccgagccgccggcgtctcctcccgcccagcagttcctccacgcaggggctccggaatcgcccgaccgcacacgttgccaccctgaggtctttctggaagtggatatctactcagacagtaagaattataagagctgtaagagctcattttggaggaataatggatgaaccatctcccttggcccaacctctggagctgaaccagcactctcgattcataataggttctgtgtctgaagataactcagaggatgagatcagcaacctggtgaagttggacctactggaggagaaggagggctccttgtcacctgcttctgttggctcagatacactctctgatttggggatctctagcctacaggatggcttggccttgcacataaggtccagcatgtctggcttgcacctagtaaagcagggccgagacagaaagaaaatagattctcaacgagatttcactgtggcttctccagcagaatttgttactcgctttgggggaaataaagtgattgagaaggttcttattgctaacaatggcattgcagcagtgaaatgcatgcggtctatccgtaggtggtcttatgaaatgtttcgaaatgaacgtgcaattagattcgttgtcatggtcacacctgaagaccttaaagccaatgcagaatacattaagatggcagatcactatgtgccagtgcctggaggaccaaacaacaacaactatgcaaatgtggaattaattcttgatattgctaaaaggatcccagtacaagcagtgtgggctggctggggtcatgcttctgagaatcccaaactaccggaacttctcttgaaaaatggcattgccttcatgggtcctccaagccaggccatgtgggctttaggggataagattgcatcttccatagtggctcaaactgcaggtatcccaactcttccctggagcggcagtggtcttcgtgtggactggcaggaaaatgatttttcaaaacgtatcttaaatgttccccaggagctatatgaaaaaggttatgtgaaagatgtggatgatgggctacaggcagctgaggaagttggatatccagtaatgatcaaggcctcagagggaggaggagggaagggaattagaaaagtcaacaatgcagatgacttccctaatctcttcagacaggttcaagctgaagttcctggatctcccatatttgtgatgagactagccaaacaatctcgtcatctggaggtgcagatcttagcggaccaatatggcaatgctatctctttgtttggtcgtgattgctctgtacaacgcaggcatcagaagattattgaagaagcacctgctactattgctactccagcagtatttgaacacatggaacagtgtgcggtgaaacttgccaaaatggtgggttatgtgagtgctgggactgtggaatacctgtacagccaggatggcagcttctactttctggaattgaatcctcggctgcaggtagagcacccttgtacagagatggtggctgatgtcaatctccctgcagcacagctccagattgccatggggattcctctatatagaatcaaggatatccgtatgatgtatggggtatctccctggggtgattctcccattgattttgaagattctgcacacgttccttgtccaaggggccatgttattgctgctcggatcactagtgaaaatccagatgagggttttaagcccagctcaggaacagttcaggagctaaatttccgcagcaataagaatgtttggggatatttcagtgttgctgctgcagggggacttcatgaatttgctgattctcagtttggtcactgcttttcttggggagaaaacagagaagaggcaatttcaaacatggtggtggctttgaaggagctgtctattcggggtgactttcgaactacagttgaatacctgatcaaattgttagagactgaaagctttcagatgaacagaattgatactggctggctggacagactgatagcagaaaaagtacaggctgagcgacctgacaccatgttgggggttgtgtgtggtgccctccacgtggcagatgtgagcctgcggaatagcgtctctaacttccttcactccttagaaaggggtcaagtccttcctgctcatacacttctgaatacagtagatgttgaacttatctatgagggagtcaagtatgtacttaaggtgactcgacagtcccccaactcctatgtggtgatcatgaatggctcatgtgtagaagtagatgtacatcggctgagtgacggtggactgctcttgtcctatgatggcagcagttatactacgtatatgaaagaggaagtggatagatatcgcatcacaattggcaataaaacctgtgtgtttgagaaggaaaatgacccatcggtgatgcgctcaccttctgctgggaagttaatccagtacattgtagaagatggaggtcatgtgtttgccggccagtgctatgctgagattgaggtaatgaagatggtaatgaccttaacagctgtggagtctggctgtatccattacgtcaagcgacctggagcagctcttgaccctggctgtgtactagccaaaatgcaactggacaaccccagcaaggttcagcaggctgaacttcacacaggtagtctgccacggatccagagcacggcactcagaggcgagaaactccatcgagtgttccattatgtcctggataatctggtcaatgtaatgaatggatactgccttccagatcctttctttagcagcaaggtaaaagactgggtagagcgattgatgaaaaccctcagagatccctccctgcctctcctagaattgcaagatattatgaccagtgtgtctggccgcattccccccaatgtggagaagtctatcaagaaggaaatggctcagtatgctagcaacatcacatcagtcctctgtcagtttcccagccagcagattgcaaacatcctagatagccatgcagctacattgaaccggaaatctgaacgggaagtcttctttatgaatactcagagcattgttcagctggtacagaggtaccgaagtggcatccgaggccacatgaaggctgtggtgatggatctgctccggcagtacctgcgagtagagacacaattccagaatggtcactatgacaaatgtgtattcgccctccgagaagagaataaaagtgacatgaacactgtactgaactacatcttctctcacgctcaagtcaccaagaagaatcttctggtcacaatgcttattgatcagttgtgtggccgggaccctactctcactgatgagctgctgaatattctcacagagctaactcaactcagtaagaccaccaatgccaaagtagcacttcgagcacgccaggttcttattgcctcccatttgccatcatatgagcttcgccataaccaagtagagtctatcttcctatcagctattgacatgtatggacatcaattttgcattgagaacctgcagaaactcatcctatcagaaacatctatttttgatgtcctaccaaacttcttctatcacagcaaccaagtagtgaggatggcagctctggaggtgtatgttcgaagggcttatattgcctatgaacttaacagcgtacaacaccgccagcttaaggacaacacctgtgtggtggaattccagttcatgctgcccacatctcatccaaacagagggaacatccctacgctaaacagaatgtccttctcctccaacctcaaccactatggcatgacccatgtagctagtgtcagcgatgtactgttggacaactcattcactccaccttgtcagcggatgggcggaatggtctcttttcggacttttgaagattttgtcaggatctttgatgaagtgatgggctgcttctctgactccccaccccagagtcccacattccctgaggcaggtcacacgtctctttatgatgaggataaggttcccagggatgaaccaattcacattctcaatgtggctatcaagactgactgtgatattgaggatgacaggctggcagctatgttcagagaatttacccagcaaaataaagctaccctggttgaccatgggatccggcgccttactttcctggttgcacaaaaggatttcagaaagcaggtcaactatgaggtggatcggagatttcatagagaattccctaaattttttacattccgagcaagggataagtttgaggaggatcgtatctatcgtcatctggagcctgctctggctttccagttagagctgaaccggatgagaaattttgacctcactgccattccatgtgctaatcacaagatgcacctgtatctcggggcagccaaggtggaagtgggcacagaagtgacagactacaggttctttgttcgtgcaatcatcaggcattctgatctggtcaccaaggaagcttcttttgaatatctgcaaaatgaaggggagcggctactcctggaagccatggatgagttggaagttgcttttaacaatacaaatgtccgcactgactgtaaccacatcttcctcaactttgtgcccacggttatcatggacccatcaaagattgaggaatccgtgcggagcatggtaatgcggtatggaagtcgcctgtggaaattgcgcgtcctccaggcagaactgaaaatcaacattcgcctgacgccaactggaaaagcaattcccatccgcctcttcctgacaaacgagtctggctattacttggatatcagcctatacaaggaagtgactgactccaggacagcacagatcatgtttcaggcatatggagacaaacagggaccactgcatggaatgttaatcaatactccatatgtgaccaaagacctgctgcaatcaaagaggttccaggcacaatccttagggacaacatacatatatgatatcccagagatgtttcggcagtccctgatcaaactctgggagtctatgtccactcaagcatttcttccatctccccctctgccttctgacatgctgacttacactgaactggtactggatgatcaaggtcagctggtccacatgaacaggcttccaggaggaaatgagattggcatggtagcttggaaaatgacctttaaaagtcctgaatatccagaaggccgagatatcattgttattggcaatgacatcacataccgaattgggtcctttgggcctcaagaggatttgttatttctcagagcttccgaacttgctagggcagaaggtattccacgcatctatgtatcagccaacagtggagcaagaatcggactggcagaagaaattcgccatatgtttcatgtggcctgggtagatcctgaggatccttacaagggatacaggtatttatatctgactcctcaagattataagagagtcagtgctctcaactctgtccattgtgaacacgtggaagatgaaggagaatccaggtacaagataacagatattattgggaaagaagagggaattggacccgagaaccttcgaggttctggaatgattgctggagaatcctcattggcctataatgagatcattaccatcagcctggtgacgtgccgggccattgggattggggcttaccttgtccggctgggacagagaaccatccaggttgagaattctcacttaattctaacaggagctggagccctcaacaaagtcctcgggcgggaagtgtacacctccaataaccagctggggggcatccagattatgcacaacaatggggtgacccactgcactgtgtgtgatgactttgaaggggttttcactgtcctgcactggctgtcttacatgcccaagagcgtgcacagttcagttcctcttctgaactcaaaggatcctatagacagaatcatcgagtttgttcccacaaagaccccatacgatcctcgatggatgctagcaggccgtcctcacccaacccaaaaaggtcagtggttgagtggcttttttgactatggatctttctcagagattatgcagccctgggcacagactgtggtggttggtagagccaggctaggaggaatacctgtgggagttgttgctgtagaaacccgaacagtagaactaagtatcccagctgatccagcaaacctggattctgaagccaagataatccagcaggctggccaggtttggttcccagattctgcgtttaagacatatcaggccatcaaggacttcaaccgggaagggctgcctctgatggtctttgccaactggagaggcttctctggtggaatgaaagatatgtacgaccaagtgctgaagtttggtgcttacattgtggatggcttgagggagtgctgccagcctgtgctggtttacattcctccccaggctgagctgcggggtggctcctgggtggtgattgactcctccatcaacccccggcacatggagatgtatgctgaccgagaaagcaggggatctgttctggagccagaagggacagtagaaatcaaattccgcagaaaggatctggtgaaaaccatgcgtcgggtggacccagtctacatccacttggctgagcgattggggaccccagagctaagcacagctgagcggaaggagttggagaacaagttgaaggagcgggaggaattcctaattcccatttaccatcaggtagccgtgcagtttgctgacttgcacgacacaccaggccggatgcaggagaagggtgttattagcgatatcctggattggaaaacatcccgtaccttcttctactggcggctgaggcgtcttctgctggaggacctggtcaagaagaaaatccacaatgccaaccctgagctgactgatggccagattcaagccatgttaaggcgctggtttgtggaagtggaaggaacagtgaaggcttatgtttgggacaataataaggatctggcggagtggctagagaaacagctgacagaggaggatggtgttcactcggtaatagaggaaaacatcaaatgcatcagcagagactacgtcctcaagcaaatccgcagcttggtccaggccaatccagaggttgccatggattccatcatccatatgacgcagcacatatcacccactcagcgagcagaagtcatacggatcctctccacaatggattccccttccacgtaggaagagcttcctgcctgtccctgccctgtctctggagaaaagggctagagctgccttttacaactgtaaccactgtaatgagaaggcacaggagacccagcactggagtcaaatggcattttacttcctctcgtttcaggttatgcatgacatcctgggatgtaagatcacagaatccccctccagcccaccagtcacacctaccccattcagtatttattaccctggccaggcctagtcctccactccctgcacaggactgagaaggcaatgaaaggtacaaacatgtaccatgaggtcttactaaccaaagtagggctgcccctcctgtcctgacagccccttggcctcccagcatggggaagcgtgaggagttgcccagcagtgagcagcccccctcactcctggccccatgagccgcagccacaggcagcagaggagggctaaggagaggaggaagcctcaagtccattgtttattaccccgactcttagcccagcacacagtaggcactggagaggaatgattcccagtttaaccacactacggtaccttttatgaagaaaaattagagcataaaatctactacaagctccataggaactcaaagatgagggcaaaactgtgagccaagaagcagagaaagaaaatagaaccagttattcttgatttaggggacctcaaccttgggttcagtctctgaggacaaagggaaaggtagttgttggcctgcctctcgcctgcacgtcactgctggactagctgtcgcatgtggctgggagctgcaaggccagtgcttgaggggccccagcagttccacaggtggtgaagcctgagttggcagaggaggagccagaagagaactgccctttctgcactggtggaaactagttatttatgccatgtggagagccagtgagatagatagatagtctgtttgttttgaggacttggaaagttgttcctatgaagcctggagcttggatggttttgagaggttaatggtgcctccacactcactcttccctagttccaggattactgtcctagcagctaacggttctactctcttccccagagtgtagacaggcagcaggtctccccacagctctgaaaggaccctggtgacagctacaccctcagcaccaggagctggccttcctgatgagggaggcttccaggaaacacagaatccacatgaccttaagattatttacaactcagtcatggtgctgctgtcctccaggcttactggcccctcctgactggcatcaggggcttcctcaggtggtggagagagtttactttcaacaactagtttattcaagaaaagaacttactgattcctctgttcctaaagcaagagtggcaggtgatcagggctggtgtagcatccggttcctttagtgcagctaactgcatttgtcactgatgaccaaggaggaaatcactaagacatttgagaagcagtggtatgaacgttcttggacaagccacagttctgagccttaaccctgtagtttgcacacaagaacgagctccacctccccttcttcaggaggaatctgtgcggatagattggctggacttttcaatggttctgggttgcaggtgggcactgtatggctgggtatggagcggacagcccccaggagtcagagcctcagcccggctgccctggtggaaggtacaggtgttcagcaccttcagaaaagggcataaagtggtgggggacaattctcagtccaggaaaatgcattgaccattgctggctatttgcttacctagtaagaattggattcatttttgaccagattattcttctatgcttttttgcaataaatcaaatcccacatatctacaagtggtatgaagtcctgcaccccccaggaggcctgtccaggcatgtcttcagaggcagggtgggttacactcatttacctcccctctccccaccaaattatgacacaaacgagtatgtttcctctctagaaccctgtaatgcctcctcccccatccccagagctccttactgtaggtcttaccctggacaaggattttttcaagttggaggcacagaacatgagcaatctgacattcccacagcccctcaaacatgcaaggctactaaggcaggaggagtataaatgatggatattgaccaagacctgcttggacggagaccgccatattatctgttctcttcgttcacaaaacagccttcacttgtctcagaatttgatggacacatactgtgatgagcaggagcttcagatgcactctttacacattttgttgaaataaacctctacatttgtagaa

SEQ ID NO: 187 - DNA, 1064 bp, Homo sapiens
  source 1..1064: mol_type = genomic DNA
gccctcttggccttttcccggtccccgccgcgcgcctgctgctgtccccgtgcccgaggactgggaggatggggctgagccgcttgcctgacttttgatccgaccagtaatcactttgcccgtgtggcgcgtggcccgttgcctgaggcttcctggcgcgtggggctgtttggtcccctccggagtgcggtgaggcgggccgagccgggactgcctgggtttggggataacgttcccatctccacccctgttgcagcaagggaaattgaggctgagggaactgggcccagggacggcgagccgtggctgcctctccagtccgggccccgaagggctgctcgtggatgaaccagactgattttaaggggtgaagagggtgcgtttcaatcagatgcttctggaacgtcgaaattgtcttctttggaaagaaccatcccctctttgggcttcagaggcccaaattgaggcgcaatgatgagaggatgtggtggtctactctgatgtcaatcttgagggctaggtctttctggaagtggatatctactcagacagtaagaattataagagctgtaagagctcattttggaggaataatggatgaaccatctcccttggcccaacctctggagctgaaccagcactctcgattcataataggttctgtgtctgaagataactcagaggatgagatcagcaacctggtgaagttggacctactggaggagaaggagggctccttgtcacctgcttctgttggctcagatacactctctgatttggggatctctagcctacaggatggcttggccttgcacataagactttgaaatactcgtgggatatgaagtggaggtgcctagagggttgaagataatgaggacagatgaagaaatgtttgattgtgccatacttacagttgctgattttcaaggtccagcatgtctggcttgcacctagtaaagcagggccgagacagaaagaaaatagattctcaacgagatttcactgtggcttctccagcagaatttgttactcgctttgggggaaataaagtgattgagaag

SEQ ID NO: 188 - DNA, 1064 bp, Homo sapiens; identical to SEQ ID NO: 187
  source 1..1064: mol_type = genomic DNA

SEQ ID NO: 189 - DNA, 9836 bp, Homo sapiens
  source 1..9836: mol_type = genomic DNA
ggcccccgccgggtgctgagcgcccgccaccgccctcttggccttttcccggtccccgccgcgcgcctgctgctgtccccgtgcccgaggactgggaggatggggctgagccgcttgcctgacttttgatccgaccagtaatcactttgcccgtgtggcgcgtggcccgttgcctgaggcttcctggcgcgtggggctgtttggtcccctccggagtgcggtgaggcgggccgagccgggactgcctgggtttggggataacgttcccatctccacccctgttgcagcaagggaaattgaggctgagggaactgggcccagggacggcgagccgtggctgcctctccagtccgggccccgaagggctgctcgtggatgaaccagactgattttaaggggtgaagagggtgcgtttcaatcagatgcttctggaacgtcgaaattgtcttctttggaaagaaccatcccctctttgggcttcagaggcccaaattgaggcgcaatgatgagaggatgtggtggtctactctgatgtcaatcttgagggctaggtctttctggaagtggatatctactcagacagtaagaattataagagctgtaagagctcattttggaggaataatggatgaaccatctcccttggcccaacctctggagctgaaccagcactctcgattcataataggttctgtgtctgaagataactcagaggatgagatcagcaacctggtgaagttggacctactggaggagaaggagggctccttgtcacctgcttctgttggctcagatacactctctgatttggggatctctagcctacaggatggcttggccttgcacataaggtccagcatgtctggcttgcacctagtaaagcagggccgagacagaaagaaaatagattctcaacgagatttcactgtggcttctccagcagaatttgttactcgctttgggggaaataaagtgattgagaaggttcttattgctaacaatggcattgcagcagtgaaatgcatgcggtctatccgtaggtggtcttatgaaatgtttcgaaatgaacgtgcaattagattcgttgtcatggtcacacctgaagaccttaaagccaatgcagaatacattaagatggcagatcactatgtgccagtgcctggaggaccaaacaacaacaactatgcaaatgtggaattaattcttgatattgctaaaaggatcccagtacaagcagtgtgggctggctggggtcatgcttctgagaatcccaaactaccggaacttctcttgaaaaatggcattgccttcatgggtcctccaagccaggccatgtgggctttaggggataagattgcatcttccatagtggctcaaactgcaggtatcccaactcttccctggagcggcagtggtcttcgtgtggactggcaggaaaatgatttttcaaaacgtatcttaaatgttccccaggagctatatgaaaaaggttatgtgaaagatgtggatgatgggctacaggcagctgaggaagttggatatccagtaatgatcaaggcctcagagggaggaggagggaagggaattagaaaagtcaacaatgcagatgacttccctaatctcttcagacaggttcaagctgaagttcctggatctcccatatttgtgatgagactagccaaacaatctcgtcatctggaggtgcagatcttagcggaccaatatggcaatgctatctctttgtttggtcgtgattgctctgtacaacgcaggcatcagaagattattgaagaagcacctgctactattgctactccagcagtatttgaacacatggaacagtgtgcggtgaaacttgccaaaatggtgggttatgtgagtgctgggactgtggaatacctgtacagccaggatggcagcttctactttctggaattgaatcctcggctgcaggtagagcacccttgtacagagatggtggctgatgtcaatctccctgcagcacagctccagattgccatggggattcctctatatagaatcaaggatatccgtatgatgtatggggtatctccctggggtgattctcccattgattttgaagattctgcacacgttccttgtccaaggggccatgttattgctgctcggatcactagtgaaaatccagatgagggttttaagcccagctcaggaacagttcaggagctaaatttccgcagcaataagaatgtttggggatatttcagtgttgctgctgcagggggacttcatgaatttgctgattctcagtttggtcactgcttttcttggggagaaaacagagaagaggcaatttcaaacatggtggtggctttgaaggagctgtctattcggggtgactttcgaactacagttgaatacctgatcaaattgttagagactgaaagctttcagatgaacagaattgatactggctggctggacagactgatagcagaaaaagtacaggctgagcgacctgacaccatgttgggggttgtgtgtggtgccctccacgtggcagatgtgagcctgcggaatagcgtctctaacttccttcactccttagaaaggggtcaagtccttcctgctcatacacttctgaatacagtagatgttgaacttatctatgagggagtcaagtatgtacttaaggtgactcgacagtcccccaactcctatgtggtgatcatgaatggctcatgtgtagaagtagatgtacatcggctgagtgacggtggactgctcttgtcctatgatggcagcagttatactacgtatatgaaagaggaagtggatagatatcgcatcacaattggcaataaaacctgtgtgtttgagaaggaaaatgacccatcggtgatgcgctcaccttctgctgggaagttaatccagtacattgtagaagatggaggtcatgtgtttgccggccagtgctatgctgagattgaggtaatgaagatggtaatgaccttaacagctgtggagtctggctgtatccattacgtcaagcgacctggagcagctcttgaccctggctgtgtactagccaaaatgcaactggacaaccccagcaaggttcagcaggctgaacttcacacaggtagtctgccacggatccagagcacggcactcagaggcgagaaactccatcgagtgttccattatgtcctggataatctggtcaatgtaatgaatggatactgccttccagatcctttctttagcagcaaggtaaaagactgggtagagcgattgatgaaaaccctcagagatccctccctgcctctcctagaattgcaagatattatgaccagtgtgtctggccgcattccccccaatgtggagaagtctatcaagaaggaaatggctcagtatgctagcaacatcacatcagtcctctgtcagtttcccagccagcagattgcaaacatcctagatagccatgcagctacattgaaccggaaatctgaacgggaagtcttctttatgaatactcagagcattgttcagctggtacagaggtaccgaagtggcatccgaggccacatgaaggctgtggtgatggatctgctccggcagtacctgcgagtagagacacaattccagaatggtcactatgacaaatgtgtattcgccctccgagaagagaataaaagtgacatgaacactgtactgaactacatcttctctcacgctcaagtcaccaagaagaatcttctggtcacaatgcttattgatcagttgtgtggccgggaccctactctcactgatgagctgctgaatattctcacagagctaactcaactcagtaagaccaccaatgccaaagtagcacttcgagcacgccaggttcttattgcctcccatttgccatcatatgagcttcgccataaccaagtagagtctatcttcctatcagctattgacatgtatggacatcaattttgcattgagaacctgcagaaactcatcctatcagaaacatctatttttgatgtcctaccaaacttcttctatcacagcaaccaagtagtgaggatggcagctctggaggtgtatgttcgaagggcttatattgcctatgaacttaacagcgtacaacaccgccagcttaaggacaacacctgtgtggtggaattccagttcatgctgcccacatctcatccaaacagagggaacatccctacgctaaacagaatgtccttctcctccaacctcaaccactatggcatgacccatgtagctagtgtcagcgatgtactgttggacaactcattcactccaccttgtcagcggatgggcggaatggtctcttttcggacttttgaagattttgtcaggatctttgatgaagtgatgggctgcttctctgactccccaccccagagtcccacattccctgaggcaggtcacacgtctctttatgatgaggataaggttcccagggatgaaccaattcacattctcaatgtggctatcaagactgactgtgatattgaggatgacaggctggcagctatgttcagagaatttacccagcaaaataaagctaccctggttgaccatgggatccggcgccttactttcctggttgcacaaaaggatttcagaaagcaggtcaactatgaggtggatcggagatttcatagagaattccctaaattttttacattccgagcaagggataagtttgaggaggatcgtatctatcgtcatctggagcctgctctggctttccagttagagctgaaccggatgagaaattttgacctcactgccattccatgtgctaatcacaagatgcacctgtatctcggggcagccaaggtggaagtgggcacagaagtgacagactacaggttctttgttcgtgcaatcatcaggcattctgatctggtcaccaaggaagcttcttttgaatatctgcaaaatgaaggggagcggctactcctggaagccatggatgagttggaagttgcttttaacaatacaaatgtccgcactgactgtaaccacatcttcctcaactttgtgcccacggttatcatggacccatcaaagattgaggaatccgtgcggagcatggtaatgcggtatggaagtcgcctgtggaaattgcgcgtcctccaggcagaactgaaaatcaacattcgcctgacgccaactggaaaagcaattcccatccgcctcttcctgacaaacgagtctggctattacttggatatcagcctatacaaggaagtgactgactccaggacagcacagatcatgtttcaggcatatggagacaaacagggaccactgcatggaatgttaatcaatactccatatgtgaccaaagacctgctgcaatcaaagaggttccaggcacaatccttagggacaacatacatatatgatatcccagagatgtttcggcagattggcatggtagcttggaaaatgacctttaaaagtcctgaatatccagaaggccgagatatcattgttattggcaatgacatcacataccgaattgggtcctttgggcctcaagaggatttgttatttctcagagcttccgaacttgctagggcagaaggtattccacgcatctatgtatcagccaacagtggagcaagaatcggactggcagaagaaattcgccatatgtttcatgtggcctgggtagatcctgaggatccttacaagggatacaggtatttatatctgactcctcaagattataagagagtcagtgctctcaactctgtccattgtgaacacgtggaagatgaaggagaatccaggtacaagataacagatattattgggaaagaagagggaattggacccgagaaccttcgaggttctggaatgattgctggagaatcctcattggcctataatgagatcattaccatcagcctggtgacgtgccgggccattgggattggggcttaccttgtccggctgggacagagaaccatccaggttgagaattctcacttaattctaacaggagctggagccctcaacaaagtcctcgggcgggaagtgtacacctccaataaccagctggggggcatccagattatgcacaacaatggggtgacccactgcactgtgtgtgatgactttgaaggggttttcactgtcctgcactggctgtcttacatgcccaagagcgtgcacagttcagttcctcttctgaactcaaaggatcctatagacagaatcatcgagtttgttcccacaaagaccccatacgatcctcgatggatgctagcaggccgtcctcacccaacccaaaaaggtcagtggttgagtggcttttttgactatggatctttctcagagattatgcagccctgggcacagactgtggtggttggtagagccaggctaggaggaatacctgtgggagttgttgctgtagaaacccgaacagtagaactaagtatcccagctgatccagcaaacctggattctgaagccaagataatccagcaggctggccaggtttggttcccagattctgcgtttaagacatatcaggccatcaaggacttcaaccgggaagggctgcctctgatggtctttgccaactggagaggcttctctggtggaatgaaagatatgtacgaccaagtgctgaagtttggtgcttacattgtggatggcttgagggagtgctgccagcctgtgctggtttacattcctccccaggctgagctgcggggtggctcctgggtggtgattgactcctccatcaacccccggcacatggagatgtatgctgaccgagaaagcaggggatctgttctggagccagaagggacagtagaaatcaaattccgcagaaaggatctggtgaaaaccatgcgtcgggtggacccagtctacatccacttggctgagcgattggggaccccagagctaagcacagctgagcggaaggagttggagaacaagttgaaggagcgggaggaattcctaattcccatttaccatcaggtagccgtgcagtttgctgacttgcacgacacaccaggccggatgcaggagaagggtgttattagcgatatcctggattggaaaacatcccgtaccttcttctactggcggctgaggcgtcttctgctggaggacctggtcaagaagaaaatccacaatgccaaccctgagctgactgatggccagattcaagccatgttaaggcgctggtttgtggaagtggaaggaacagtgaaggcttatgtttgggacaataataaggatctggcggagtggctagagaaacagctgacagaggaggatggtgttcactcggtaatagaggaaaacatcaaatgcatcagcagagactacgtcctcaagcaaatccgcagcttggtccaggccaatccagaggttgccatggattccatcatccatatgacgcagcacatatcacccactcagcgagcagaagtcatacggatcctctccacaatggattccccttccacgtaggaagagcttcctgcctgtccctgccctgtctctggagaaaagggctagagctgccttttacaactgtaaccactgtaatgagaaggcacaggagacccagcactggagtcaaatggcattttacttcctctcgtttcaggttatgcatgacatcctgggatgtaagatcacagaatccccctccagcccaccagtcacacctaccccattcagtatttattaccctggccaggcctagtcctccactccctgcacaggactgagaaggcaatgaaaggtacaaacatgtaccatgaggtcttactaaccaaagtagggctgcccctcctgtcctgacagccccttggcctcccagcatggggaagcgtgaggagttgcccagcagtgagcagcccccctcactcctggccccatgagccgcagccacaggcagcagaggagggctaaggagaggaggaagcctcaagtccattgtttattaccccgactcttagcccagcacacagtaggcactggagaggaatgattcccagtttaaccacactacggtaccttttatgaagaaaaattagagcataaaatctactacaagctccataggaactcaaagatgagggcaaaactgtgagccaagaagcagagaaagaaaatagaaccagttattcttgatttaggggacctcaaccttgggttcagtctctgaggacaaagggaaaggtagttgttggcctgcctctcgcctgcacgtcactgctggactagctgtcgcatgtggctgggagctgcaaggccagtgcttgaggggccccagcagttccacaggtggtgaagcctgagttggcagaggaggagccagaagagaactgccctttctgcactggtggaaactagttatttatgccatgtggagagccagtgagatagatagatagtctgtttgttttgaggacttggaaagttgttcctatgaagcctggagcttggatggttttgagaggttaatggtgcctccacactcactcttccctagttccaggattactgtcctagcagctaacggttctactctcttccccagagtgtagacaggcagcaggtctccccacagctctgaaaggaccctggtgacagctacaccctcagcaccaggagctggccttcctgatgagggaggcttccaggaaacacagaatccacatgaccttaagattatttacaactcagtcatggtgctgctgtcctccaggcttactggcccctcctgactggcatcaggggcttcctcaggtggtggagagagtttactttcaacaactagtttattcaagaaaagaacttactgattcctctgttcctaaagcaagagtggcaggtgatcagggctggtgtagcatccggttcctttagtgcagctaactgcatttgtcactgatgaccaaggaggaaatcactaagacatttgagaagcagtggtatgaacgttcttggacaagccacagttctgagccttaaccctgtagtttgcacacaagaacgagctccacctccccttcttcaggaggaatctgtgcggatagattggctggacttttcaatggttctgggttgcaggtgggcactgtatggctgggtatggagcggacagcccccaggagtcagagcctcagcccggctgccctggtggaaggtacaggtgttcagcaccttcagaaaagggcataaagtggtgggggacaattctcagtccaggaaaatgcattgaccattgctggctatttgcttacctagtaagaattggattcatttttgaccagattattcttctatgcttttttgcaataaatcaaatcccacatatctacaagtggtatgaagtcctgcaccccccaggaggcctgtccaggcatgtcttcagaggcagggtgggttacactcatttacctcccctctccccaccaaattatgacacaaacgagtatgtttcctctctagaaccctgtaatgcctcctcccccatccccagagctccttactgtaggtcttaccctggacaaggattttttcaagttggaggcacagaacatgagcaatctgacattcccacagcccctcaaacatgcaaggctactaaggcaggaggagtataaatgatggatattgaccaagacctgcttggacggagaccgccatattatctgttctcttcgttcacaaaacagccttcacttgtctcagaatttgatggacacatactgtgatgagcaggagcttcagatgcactctttacacattttgttgaaataaacctctacatttgt

SEQ ID NO: 190 - DNA, 1627 bp, Homo sapiens
  source 1..1627: mol_type = genomic DNA
gccctcttggccttttcccggtccccgccgcgcgcctgctgctgtccccgtgcccgaggactgggaggatggggctgagccgcttgcctgacttttgatccgaccagtaatcactttgcccgtgtggcgcgtggcccgttgcctgaggcttcctggcgcgtggggctgtttggtcccctccggagtgcggtgaggcgggccgagccgggactgcctgggtttggggataacgttcccatctccacccctgttgcagcaagggaaattgaggctgagggaactgggcccagggacggcgagccgtggctgcctctccagtccgggccccgaagggctgctcgtggatgaaccagactgattttaaggggtgaagagggtgcgtttcaatcagatgcttctggaacgtcgaaattgtcttctttggaaagaaccatcccctctttgggcttcagaggcccaaattgaggcgcaatgatgagaggatgtggtggtctactctgatgtcaatcttgagggctagggtcttgctatgtcacccagcctggagtggaattgtgtgatcaagactcactgaagcctccaactcctgggctcaagcaatcctcccacctcagccacccaagtagctgggactacaggctggagtgcaatggcatgatcttggctcactgcaacctccgcctcccggattcaacggattctcctgcctcagcctcctgagtagctgggattataggtgcctgccacaacacccaggaccagacttatgaagtggccttcctgaggagattttctgaccttatggtatgaagttccttcaggctcttaattctggataaactggagtgattaacaagagcaaagagacatagtattcagataaggactttgtgtcttatttttcttttatatcacaactggagccacagttgtgggcaaggcactgactttcttgatgaattctgtccatctgtaaagcagctatatatcccactggaggctttgcctctcagagacaacgtgaagacggataagcaggcatcaggagcagagtggcctctcagctggtcagattctccgaagaaggatcctctaggctgggcacggtggctcacacctataatcccagcactttgggaggccgaggcaggtggatcacgaggtcaggagttcgaggccagcctggccaatatggtctttctggaagtggatatctactcagacagtaagaattataagagctgtaagagctcattttggaggaataatggatgaaccatctcccttggcccaacctctggagctgaaccagcactctcgattcataataggttctgtgtctgaagataactcagaggatgagatcagcaacctggtgaagttggacctactggaggagaaggagggctccttgtcacctgcttctgttggctcagatacactctctgatttggggatctctagcctacaggatggcttggccttgcacataaggtccagcatgtctggcttgcacctagtaaagcagggccgagacagaaagaaaatagattctcaacgagatttcactgtggcttctccagcagaatttgttactcgctttgggggaaataaagtgattgagaag

SEQ ID NO: 191 - DNA, 10657 bp, Homo sapiens
  source 1..10657: mol_type = genomic DNA
ggcccccgccgggtgctgagcgcccgccaccgccctcttggccttttcccggtccccgccgcgcgcctgctgctgtccccgtgcccgaggactgggaggatggggctgagccgcttgcctgacttttgatccgaccagtaatcactttgcccgtgtggcgcgtggcccgttgcctgaggcttcctggcgcgtggggctgtttggtcccctccggagtgcggtgaggcgggccgagccgggactgcctgggtttggggataacgttcccatctccacccctgttgcagcaagggaaattgaggctgagggaactgggcccagggacggcgagccgtggctgcctctccagtccgggccccgaagggctgctcgtggatgaaccagactgattttaaggggtgaagagggtgcgtttcaatcagatgcttctggaacgtcgaaattgtcttctttggaaagaaccatcccctctttgggcttcagaggcccaaattgaggcgcaatgatgagaggatgtggtggtctactctgatgtcaatcttgagggctagggtcttgctatgtcacccagcctggagtggaattgtgtgatcaagactcactgaagcctccaactcctgggctcaagcaatcctcccacctcagccacccaagtagctgggactacaggctggagtgcaatggcatgatcttggctcactgcaacctccgcctcccggattcaacggattctcctgcctcagcctcctgagtagctgggattataggtgcctgccacaacacccaggaccagacttatgaagtggccttcctgaggagattttctgaccttatggtatgaagttccttcaggctcttaattctggataaactggagtgattaacaagagcaaagagacatagtattcagataaggactttgtgtcttatttttcttttatatcacaactggagccacagttgtgggcaaggcactgactttcttgatgaattctgtccatctgtaaagcagctatatatcccactggaggctttgcctctcagagacaacgtgaagacggataagcaggcatcaggagcagagtggcctctcagctggtcagattctccgaagaaggatcctctaggctgggcacggtggctcacacctataatcccagcactttgggaggccgaggcaggtggatcacgaggtcaggagttcgaggccagcctggccaatatggtctttctggaagtggatatctactcagacagtaagaattataagagctgtaagagctcattttggaggaataatggatgaaccatctcccttggcccaacctctggagctgaaccagcactctcgattcataataggttctgtgtctgaagataactcagaggatgagatcagcaacctggtgaagttggacctactggaggagaaggagggctccttgtcacctgcttctgttggctcagatacactctctgatttggggatctctagcctacaggatggcttggccttgcacataaggtccagcatgtctggcttgcacctagtaaagcagggccgagacagaaagaaaatagattctcaacgagatttcactgtggcttctccagcagaatttgttactcgctttgggggaaataaagtgattgagaaggttcttattgctaacaatggcattgcagcagtgaaatgcatgcggtctatccgtaggtggtcttatgaaatgtttcgaaatgaacgtgcaattagattcgttgtcatggtcacacctgaagaccttaaagccaatgcagaatacattaagatggcagatcactatgtgccagtgcctggaggaccaaacaacaacaactatgcaaatgtggaattaattcttgatattgctaaaaggatcccagtacaagcagtgtgggctggctggggtcatgcttctgagaatcccaaactaccggaacttctcttgaaaaatggcattgccttcatgggtcctccaagccaggccatgtgggctttaggggataagattgcatcttccatagtggctcaaactgcaggtatcccaactcttccctggagcggcagtggtcttcgtgtggactggcaggaaaatgatttttcaaaacgtatcttaaatgttccccaggagctatatgaaaaaggttatgtgaaagatgtggatgatgggctacaggcagctgaggaagttggatatccagtaatgatcaaggcctcagagggaggaggagggaagggaattagaaaagtcaacaatgcagatgacttccctaatctcttcagacaggttcaagctgaagttcctggatctcccatatttgtgatgagactagccaaacaatctcgtcatctggaggtgcagatcttagcggaccaatatggcaatgctatctctttgtttggtcgtgattgctctgtacaacgcaggcatcagaagattattgaagaagcacctgctactattgctactccagcagtatttgaacacatggaacagtgtgcggtgaaacttgccaaaatggtgggttatgtgagtgctgggactgtggaatacctgtacagccaggatggcagcttctactttctggaattgaatcctcggctgcaggtagagcacccttgtacagagatggtggctgatgtcaatctccctgcagcacagctccagattgccatggggattcctctatatagaatcaaggatatccgtatgatgtatggggtatctccctggggtgattctcccattgattttgaagattctgcacacgttccttgtccaaggggccatgttattgctgctcggatcactagtgaaaatccagatgagggttttaagcccagctcaggaacagttcaggagctaaatttccgcagcaataagaatgtttggggatatttcagtgttgctgctgcagggggacttcatgaatttgctgattctcagtttggtcactgcttttcttggggagaaaacagagaagaggcaatttcaaacatggtggtggctttgaaggagctgtctattcggggtgactttcgaactacagttgaatacctgatcaaattgttagagactgaaagctttcagatgaacagaattgatactggctggctggacagactgatagcagaaaaagtacaggctgagcgacctgacaccatgttgggggttgtgtgtggtgccctccacgtggcagatgtgagcctgcggaatagcgtctctaacttccttcactccttagaaaggggtcaagtccttcctgctcatacacttctgaatacagtagatgttgaacttatctatgagggagtcaagtatgtacttaaggtgactcgacagtcccccaactcctatgtggtgatcatgaatggctcatgtgtagaagtagatgtacatcggctgagtgacggtggactgctcttgtcctatgatggcagcagttatactacgtatatgaaagaggaagtggatagatatcgcatcacaattggcaataaaacctgtgtgtttgagaaggaaaatgacccatcggtgatgcgctcaccttctgctgggaagttaatccagtacattgtagaagatggaggtcatgtgtttgccggccagtgctatgctgagattgaggtaatgaagatggtaatgaccttaacagctgtggagtctggctgtatccattacgtcaagcgacctggagcagctcttgaccctggctgtgtactagccaaaatgcaactggacaaccccagcaaggttcagcaggctgaacttcacacaggtagtctgccacggatccagagcacggcactcagaggcgagaaactccatcgagtgttccattatgtcctggataatctggtcaatgtaatgaatggatactgccttccagatcctttctttagcagcaaggtaaaagactgggtagagcgattgatgaaaaccctcagagatccctccctgcctctcctagaattgcaagatattatgaccagtgtgtctggccgcattccccccaatgtggagaagtctatcaagaaggaaatggctcagtatgctagcaacatcacatcagtcctctgtcagtttcccagccagcagattgcaaacatcctagatagccatgcagctacattgaaccggaaatctgaacgggaagtcttctttatgaatactcagagcattgttcagctggtacagaggtaccgaagtggcatccgaggccacatgaaggctgtggtgatggatctgctccggcagtacctgcgagtagagacacaattccagaatggtcactatgacaaatgtgtattcgccctccgagaagagaataaaagtgacatgaacactgtactgaactacatcttctctcacgctcaagtcaccaagaagaatcttctggtcacaatgcttattgatcagttgtgtggccgggaccctactctcactgatgagctgctgaatattctcacagagctaactcaactcagtaagaccaccaatgccaaagtagcacttcgagcacgccaggttcttattgcctcccatttgccatcatatgagcttcgccataaccaagtagagtctatcttcctatcagctattgacatgtatggacatcaattttgcattgagaacctgcagaaactcatcctatcagaaacatctatttttgatgtcctaccaaacttcttctatcacagcaaccaagtagtgaggatggcagctctggaggtgtatgttcgaagggcttatattgcctatgaacttaacagcgtacaacaccgccagcttaaggacaacacctgtgtggtggaattccagttcatgctgcccacatctcatccaaacagagggaacatccctacgctaaacagaatgtccttctcctccaacctcaaccactatggcatgacccatgtagctagtgtcagcgatgtactgttggacaactcattcactccaccttgtcagcggatgggcggaatggtctcttttcggacttttgaagattttgtcaggatctttgatgaagtgatgggctgcttctctgactccccaccccagagtcccacattccctgaggcaggtcacacgtctctttatgatgaggataaggttcccagggatgaaccaattcacattctcaatgtggctatcaagactgactgtgatattgaggatgacaggctggcagctatgttcagagaatttacccagcaaaataaagctaccctggttgaccatgggatccggcgccttactttcctggttgcacaaaaggatttcagaaagcaggtcaactatgaggtggatcggagatttcatagagaattccctaaattttttacattccgagcaagggataagtttgaggaggatcgtatctatcgtcatctggagcctgctctggctttccagttagagctgaaccggatgagaaattttgacctcactgccattccatgtgctaatcacaagatgcacctgtatctcggggcagccaaggtggaagtgggcacagaagtgacagactacaggttctttgttcgtgcaatcatcaggcattctgatctggtcaccaaggaagcttcttttgaatatctgcaaaatgaaggggagcggctactcctggaagccatggatgagttggaagttgcttttaacaatacaaatgtccgcactgactgtaaccacatcttcctcaactttgtgcccacggttatcatggacccatcaaagattgaggaatccgtgcggagcatggtaatgcggtatggaagtcgcctgtggaaattgcgcgtcctccaggcagaactgaaaatcaacattcgcctgacgccaactggaaaagcaattcccatccgcctcttcctgacaaacgagtctggctattacttggatatcagcctatacaaggaagtgactgactccaggacagcacagatcatgtttcaggcatatggagacaaacagggaccactgcatggaatgttaatcaatactccatatgtgaccaaagacctgctgcaatcaaagaggttccaggcacaatccttagggacaacatacatatatgatatcccagagatgtttcggcagtccctgatcaaactctgggagtctatgtccactcaagcatttcttccatctccccctctgccttctgacatgctgacttacactgaactggtactggatgatcaaggtcagctggtccacatgaacaggcttccaggaggaaatgagattggcatggtagcttggaaaatgacctttaaaagtcctgaatatccagaaggccgagatatcattgttattggcaatgacatcacataccgaattgggtcctttgggcctcaagaggatttgttatttctcagagcttccgaacttgctagggcagaaggtattccacgcatctatgtatcagccaacagtggagcaagaatcggactggcagaagaaattcgccatatgtttcatgtggcctgggtagatcctgaggatccttacaagggatacaggtatttatatctgactcctcaagattataagagagtcagtgctctcaactctgtccattgtgaacacgtggaagatgaaggagaatccaggtacaagataacagatattattgggaaagaagagggaattggacccgagaaccttcgaggttctggaatgattgctggagaatcctcattggcctataatgagatcattaccatcagcctggtgacgtgccgggccattgggattggggcttaccttgtccggctgggacagagaaccatccaggttgagaattctcacttaattctaacaggagctggagccctcaacaaagtcctcgggcgggaagtgtacacctccaataaccagctggggggcatccagattatgcacaacaatggggtgacccactgcactgtgtgtgatgactttgaaggggttttcactgtcctgcactggctgtcttacatgcccaagagcgtgcacagttcagttcctcttctgaactcaaaggatcctatagacagaatcatcgagtttgttcccacaaagaccccatacgatcctcgatggatgctagcaggccgtcctcacccaacccaaaaaggtcagtggttgagtggcttttttgactatggatctttctcagagattatgcagccctgggcacagactgtggtggttggtagagccaggctaggaggaatacctgtgggagttgttgctgtagaaacccgaacagtagaactaagtatcccagctgatccagcaaacctggattctgaagccaagataatccagcaggctggccaggtttggttcccagattctgcgtttaagacatatcaggccatcaaggacttcaaccgggaagggctgcctctgatggtctttgccaactggagaggcttctctggtggaatgaaagatatgtacgaccaagtgctgaagtttggtgcttacattgtggatggcttgagggagtgctgccagcctgtgctggtttacattcctccccaggctgagctgcggggtggctcctgggtggtgattgactcctccatcaacccccggcacatggagatgtatgctgaccgagaaagcaggggatctgttctggagccagaagggacagtagaaatcaaattccgcagaaaggatctggtgaaaaccatgcgtcgggtggacccagtctacatccacttggctgagcgattggggaccccagagctaagcacagctgagcggaaggagttggagaacaagttgaaggagcgggaggaattcctaattcccatttaccatcaggtagccgtgcagtttgctgacttgcacgacacaccaggccggatgcaggagaagggtgttattagcgatatcctggattggaaaacatcccgtaccttcttctactggcggctgaggcgtcttctgctggaggacctggtcaagaagaaaatccacaatgccaaccctgagctgactgatggccagattcaagccatgttaaggcgctggtttgtggaagtggaaggaacagtgaaggcttatgtttgggacaataataaggatctggcggagtggctagagaaacagctgacagaggaggatggtgttcactcggtaatagaggaaaacatcaaatgcatcagcagagactacgtcctcaagcaaatccgcagcttggtccaggccaatccagaggttgccatggattccatcatccatatgacgcagcacatatcacccactcagcgagcagaagtcatacggatcctctccacaatggattccccttccacgtaggaagagcttcctgcctgtccctgccctgtctctggagaaaagggctagagctgccttttacaactgtaaccactgtaatgagaaggcacaggagacccagcactggagtcaaatggcattttacttcctctcgtttcaggttatgcatgacatcctgggatgtaagatcacagaatccccctccagcccaccagtcacacctaccccattcagtatttattaccctggccaggcctagtcctccactccctgcacaggactgagaaggcaatgaaaggtacaaacatgtaccatgaggtcttactaaccaaagtagggctgcccctcctgtcctgacagccccttggcctcccagcatggggaagcgtgaggagttgcccagcagtgagcagcccccctcactcctggccccatgagccgcagccacaggcagcagaggagggctaaggagaggaggaagcctcaagtccattgtttattaccccgactcttagcccagcacacagtaggcactggagaggaatgattcccagtttaaccacactacggtaccttttatgaagaaaaattagagcataaaatctactacaagctccataggaactcaaagatgagggcaaaactgtgagccaagaagcagagaaagaaaatagaaccagttattcttgatttaggggacctcaaccttgggttcagtctctgaggacaaagggaaaggtagttgttggcctgcctctcgcctgcacgtcactgctggactagctgtcgcatgtggctgggagctgcaaggccagtgcttgaggggccccagcagttccacaggtggtgaagcctgagttggcagaggaggagccagaagagaactgccctttctgcactggtggaaactagttatttatgccatgtggagagccagtgagatagatagatagtctgtttgttttgaggacttggaaagttgttcctatgaagcctggagcttggatggttttgagaggttaatggtgcctccacactcactcttccctagttccaggattactgtcctagcagctaacggttctactctcttccccagagtgtagacaggcagcaggtctccccacagctctgaaaggaccctggtgacagctacaccctcagcaccaggagctggccttcctgatgagggaggcttccaggaaacacagaatccacatgaccttaagattatttacaactcagtcatggtgctgctgtcctccaggcttactggcccctcctgactggcatcaggggcttcctcaggtggtggagagagtttactttcaacaactagtttattcaagaaaagaacttactgattcctctgttcctaaagcaagagtggcaggtgatcagggctggtgtagcatccggttcctttagtgcagctaactgcatttgtcactgatgaccaaggaggaaatcactaagacatttgagaagcagtggtatgaacgttcttggacaagccacagttctgagccttaaccctgtagtttgcacacaagaacgagctccacctccccttcttcaggaggaatctgtgcggatagattggctggacttttcaatggttctgggttgcaggtgggcactgtatggctgggtatggagcggacagcccccaggagtcagagcctcagcccggctgccctggtggaaggtacaggtgttcagcaccttcagaaaagggcataaagtggtgggggacaattctcagtccaggaaaatgcattgaccattgctggctatttgcttacctagtaagaattggattcatttttgaccagattattcttctatgcttttttgcaataaatcaaatcccacatatctacaagtggtatgaagtcctgcaccccccaggaggcctgtccaggcatgtcttcagaggcagggtgggttacactcatttacctcccctctccccaccaaattatgacacaaacgagtatgtttcctctctagaaccctgtaatgcctcctcccccatccccagagctccttactgtaggtcttaccctggacaaggattttttcaagttggaggcacagaacatgagcaatctgacattcccacagcccctcaaacatgcaaggctactaaggcaggaggagtataaatgatggatattgaccaagacctgcttggacggagaccgccatattatctgttctcttcgttcacaaaacagccttcacttgtctcagaatttgatggacacatactgtgatgagcaggagcttcagatgcactctttacacattttgttgaaataaacctctacatttgt

SEQ ID NO: 192 - DNA, 1380 bp, Homo sapiens
  source 1..1380: mol_type = genomic DNA
ggcagccaggagaggcagtggagcttttctccgttgactgtcagaagaaagtgactgttgttgaaaatgtttgctgcaactaaaggagagctgctaagatctactttctagttaaacaagcttttatatttctccccggctcctctcagttcccttgggaaatcaactaattgtgtgtgtaagctaagtgtgtggaggagagaagatgcaaaaaggaagagaaaggtggggaaagaaggaaattgggaacaattagacaaaaagactatagtttgaggccatcaggagtattctagtctgactgaagccaggcagaaggcacagtatctcttgtcctcctgggttttaagcagctgcaacaggaggaggaactgcggcttgtgtttacaaggccgaaatctgaagaaaaagcttccattcttttcccatcttgatatggagggttctccagaggaaaataaggaaatgagatattacatgcttcaaagactttgaaatactcgtgggatatgaagtggaggtgcctagagggttgaagataatgaggacagatgaagaaatgtttgattgtgccatacttacagttgctgattttcaaggtccagcatgtctggcttgcacctagtaaagcagggccgagacagaaagaaaatagattctcaacgagatttcactgtggcttctccagcagaatttgttactcgctttgggggaaataaagtgattgagaaggttcttattgctaacaatggcattgcagcagtgaaatgcatgcggtctatccgtaggtggtcttatgaaatgtttcgaaatgaacgtgcaattagattcgttgtcatggtcacacctgaagaccttaaagccaatgcagaatacattaagatggcagatcactatgtgccagtgcctggaggaccaaacaacaacaactatgcaaatgtggaattaattcttgatattgctaaaaggatcccagtacaagcagtgtgggctggctggggtcatgcttctgagaatcccaaactaccggaacttctcttgaaaaatggcattgccttcatgggtcctccaagccaggccatgtgggctttaggggataagattgcatcttccatagtggctcaaactgcaggtatcccaactcttccctggagcggcagtggtcttcgtgtggactggcaggaaaatgatttttcaaaacgtatcttaaatgttccccaggagctatatgaaaaaggttatgtgaaagatgtggatgatgggctacaggcagctgaggaagttggatatccagtaatgatcaaggcctcagagggaggaggagggaagggaattagaaaagtcaacaatgcagatgacttccctaatctcttcagacag

SEQ ID NO: 193 - DNA, 341 bp, Homo sapiens
  source 1..341: mol_type = genomic DNA
aggcactgactttcttgatgaattctgtccatctgtaaagcagctatatatcccactggaggctttgcctctcagagacaacgtgaagacggataagcaggcatcaggagcagagtggcctctcaggtctttctggaagtggatatctactcagacagtaagaattataagagctgtaagagctcattttggaggaataatggatgaaccatctcccttggcccaacctctggagctgaaccagcactctcgattcataataggttctgtgtctgaagataactcagaggatgagatcagcaacctggtgaagttggacctactggaggagaaggagggct

SEQ ID NO: 194 - DNA, 3779 bp, Homo sapiens
  source 1..3779: mol_type = genomic DNA
aggaattcccaatgagaggcgatggggggaagtttgggcaactcggcctggccaatggagagcctcgggagggctctgccccttccccccgcccccgcccgcctcggctcccgcagcgctagtgtgtccgcctagttcagtgtgcgtggagattaggtccaagcgcccgcccagaggcaggcagtccgcgagcccagccgccgctgtcgccgccagtagcagccttcgccagcagcgccgcggcggaaccgggcgcaggggagcgagcccggccccgccagcccagcccagcccagccctactccctccccacgccagggcagcagccgttgctcagagagaaggtggaggaagaaatccagaccctagcacgcgcgcaccatcatggaccattatgattctcagcaaaccaacgattacatgcagccagaagaggactgggaccgggacctgctcctggacccggcctgggagaagcagcagagaaagacattcacggcatggtgtaactcccacctccggaaggcggggacacagatcgagaacatcgaagaggacttccgggatggcctgaagctcatgctgctgctggaggtcatctcaggtgaacgcttggccaagccagagcgaggcaagatgagagtgcacaagatctccaacgtcaacaaggccctggatttcatagccagcaaaggcgtcaaactggtgtccatcggagccgaagaaatcgtggatgggaatgtgaagatgaccctgggcatgatctggaccatcatcctgcgctttgccatccaggacatctccgtggaagagacttcagccaaggaagggctgctcctgtggtgtcagagaaagacagccccttacaaaaatgtcaacatccagaacttccacataagctggaaggatggcctcggcttctgtgctttgatccaccgacaccggcccgagctgattgactacgggaagctgcggaaggatgatccactcacaaatctgaatacggcttttgacgtggcagagaagtacctggacatccccaagatgctggatgccgaagacatcgttggaactgcccgaccggatgagaaagccatcatgacttacgtgtctagcttctaccacgccttctctggagcccagaaggcggagacagcagccaatcgcatctgcaaggtgttggccgtcaaccaggagaacgagcagcttatggaagactacgagaagctggccagtgatctgttggagtggatccgccgcacaatcccgtggctggagaaccgggtgcccgagaacaccatgcatgccatgcaacagaagctggaggacttccgggactaccggcgcctgcacaagccgcccaaggtgcaggagaagtgccagctggagatcaacttcaacacgctgcagaccaagctgcggctcagcaaccggcctgccttcatgccctctgagggcaggatggtctcggacatcaacaatgcctggggctgcctggagcaggtggagaagggctatgaggagtggttgctgaatgagatccggaggctggagcgactggaccacctggcagagaagttccggcagaaggcctccatccacgaggcctggactgacggcaaagaggccatgctgcgacagaaggactatgagaccgccaccctctcggagatcaaggccctgctcaagaagcatgaggccttcgagagtgacctggctgcccaccaggaccgtgtggagcagattgccgccatcgcacaggagctcaatgagctggactattatgactcacccagtgtcaacgcccgttgccaaaagatctgtgaccagtgggacaatctgggggccctaactcagaagcgaagggaagctctggagcggaccgagaaactgctggagaccattgaccagctgtacttggagtatgccaagcgggctgcacccttcaacaactggatggagggggccatggaggacctgcaggacaccttcattgtgcacaccattgaggagatccagggactgaccacagcccatgagcagttcaaggccaccctccctgatgccgacaaggagcgcctggccatcctgggcatccacaatgaggtgtccaagattgtccagacctaccacgtcaatatggcgggcaccaacccctacacaaccatcacgcctcaggagatcaatggcaaatgggaccacgtgcggcagctggtgcctcggagggaccaagctctgacggaggagcatgcccgacagcagcacaatgagaggctacgcaagcagtttggagcccaggccaatgtcatcgggccctggatccagaccaagatggaggagatcgggaggatctccattgagatgcatgggaccctggaggaccagctcagccacctgcggcagtatgagaagagcatcgtcaactacaagccaaagattgatcagctggagggcgaccaccagctcatccaggaggcgctcatcttcgacaacaagcacaccaactacaccatggagcacatccgtgtgggctgggagcagctgctcaccaccatcgccaggaccatcaatgaggtagagaaccagatcctgacccgggatgccaagggcatcagccaggagcagatgaatgagttccgggcctccttcaaccactttgaccgggatcactccggcacactgggtcccgaggagttcaaagcctgcctcatcagcttgggttatgatattggcaacgacccccagggagaagcagaatttgcccgcatcatgagcattgtggaccccaaccgcctgggggtagtgacattccaggccttcattgacttcatgtcccgcgagacagccgacacagatacagcagaccaagtcatggcttccttcaagatcctggctggggacaagaactacattaccatggacgagctgcgccgcgagctgccacccgaccaggctgagtactgcatcgcgcggatggccccctacaccggccccgactccgtgccaggtgctctggactacatgtccttctccacggcgctgtacggcgagagtgacctctaatccaccccgcccggccgccctcgtcttgtgcgccgtgccctgccttgcacctccgccgtcgcccatctcctgcctgggttcggtttcagctcccagcctccacccgggtgagctggggcccacgtggcatcgatcctccctgcccgcgaagtgacagtttacaaaattattttctgcaaaaaagaaaaaaaagttacgttaaaaaccaaaaaactacatattttattatagaaaaagtattttttctccaccagacaaatggaaaaaaagaggaaagattaactatttgcaccgaaatgtcttgttttgttgcgacataggaaaataaccaagcacaaagttatattccatcctttttactgatttttttttcttctatctgttccatctgctgtattcatttctccaatctcatgtccattttggtgtgggagtcggggtagggggtactcttgtcaaaaggcacattggtgcatgtgtgtttgctagctcacttgtccatgaaaatattttatgatattaaagaaaatcttttgaaatggctgttttttaaggaagagaatttatgtggcttctcatttttaaatcccctcagaggtgtgactagtctctttatcagcacacacttaaaaaatttttaatattgtctattaaaaataggacaaacttggagagtatggacaactttgatattgcttggcacagatggtattaaa

SEQ ID NO: 195 - DNA, 3464 bp, Homo sapiens
  source 1..3464: mol_type = genomic DNA
cgctgtcgccgccagtagcagccttcgccagcagcgccgcggcggaaccgggcgcaggggagcgagcccggccccgccagcccagcccagcccagccctactccctccccacgccagggcagcagccgttgctcagagagaaggtggaggaagaaatccagaccctagcacgcgcgcaccatcatggaccattatgattctcagcaaaccaacgattacatgcagccagaagaggactgggaccgggacctgctcctggacccggcctgggagaagcagcagagaaagacattcacggcatggtgtaactcccacctccggaaggcggggacacagatcgagaacatcgaagaggacttccgggatggcctgaagctcatgctgctgctggaggtcatctcaggtgaacgcttggccaagccagagcgaggcaagatgagagtgcacaagatctccaacgtcaacaaggccctggatttcatagccagcaaaggcgtcaaactggtgtccatcggagccgaagaaatcgtggatgggaatgtgaagatgaccctgggcatgatctggaccatcatcctgcgctttgccatccaggacatctccgtggaagagacttcagccaaggaagggctgctcctgtggtgtcagagaaagacagccccttacaaaaatgtcaacatccagaacttccacataagctggaaggatggcctcggcttctgtgctttgatccaccgacaccggcccgagctgattgactacgggaagctgcggaaggatgatccactcacaaatctgaatacggcttttgacgtggcagagaagtacctggacatccccaagatgctggatgccgaagacatcgttggaactgcccgaccggatgagaaagccatcatgacttacgtgtctagcttctaccacgccttctctggagcccagaaggcggagacagcagccaatcgcatctgcaaggtgttggccgtcaaccaggagaacgagcagcttatggaagactacgagaagctggccagtgatctgttggagtggatccgccgcacaatcccgtggctggagaaccgggtgcccgagaacaccatgcatgccatgcaacagaagctggaggacttccgggactaccggcgcctgcacaagccgcccaaggtgcaggagaagtgccagctggagatcaacttcaacacgctgcagaccaagctgcggctcagcaaccggcctgccttcatgccctctgagggcaggatggtctcggacatcaacaatgcctggggctgcctggagcaggtggagaagggctatgaggagtggttgctgaatgagatccggaggctggagcgactggaccacctggcagagaagttccggcagaaggcctccatccacgaggcctggactgacggcaaagaggccatgctgcgacagaaggactatgagaccgccaccctctcggagatcaaggccctgctcaagaagcatgaggccttcgagagtgacctggctgcccaccaggaccgtgtggagcagattgccgccatcgcacaggagctcaatgagctggactattatgactcacccagtgtcaacgcccgttgccaaaagatctgtgaccagtgggacaatctgggggccctaactcagaagcgaagggaagctctggagcggaccgagaaactgctggagaccattgaccagctgtacttggagtatgccaagcgggctgcacccttcaacaactggatggagggggccatggaggacctgcaggacaccttcattgtgcacaccattgaggagatccagggactgaccacagcccatgagcagttcaaggccaccctccctgatgccgacaaggagcgcctggccatcctgggcatccacaatgaggtgtccaagattgtccagacctaccacgtcaatatggcgggcaccaacccctacacaaccatcacgcctcaggagatcaatggcaaatgggaccacgtgcggcagctggtgcctcggagggaccaagctctgacggaggagcatgcccgacagcagcacaatgagaggctacgcaagcagtttggagcccaggccaatgtcatcgggccctggatccagaccaagatggaggagatcgggaggatctccattgagatgcatgggaccctggaggaccagctcagccacctgcggcagtatgagaagagcatcgtcaactacaagccaaagattgatcagctggagggcgaccaccagctcatccaggaggcgctcatcttcgacaacaagcacaccaactacaccatggagcacatccgtgtgggctgggagcagctgctcaccaccatcgccaggaccatcaatgaggtagagaaccagatcctgacccgggatgccaagggcatcagccaggagcagatgaatgagttccgggcctccttcaaccactttgaccgggatcactccggcacactgggtcccgaggagttcaaagcctgcctcatcagcttgggttatgatattggcaacgacccccagaagaagacaggcatgatggacacggatgatttccgcgcctgcctgatctccatgggttacaacatgggagaagcagaatttgcccgcatcatgagcattgtggaccccaaccgcctgggggtagtgacattccaggccttcattgacttcatgtcccgcgagacagccgacacagatacagcagaccaagtcatggcttccttcaagatcctggctggggacaagaactacattaccatggacgagctgcgccgcgagctgccacccgaccaggctgagtactgcatcgcgcggatggccccctacaccggccccgactccgtgccaggtgctctggactacatgtccttctccacggcgctgtacggcgagagtgacctctaatccaccccgcccggccgccctcgtcttgtgcgccgtgccctgccttgcacctccgccgtcgcccatctcctgcctgggttcggtttcagctcccagcctccacccgggtgagctggggcccacgtggcatcgatcctccctgcccgcgaagtgacagtttacaaaattattttctgcaaaaaagaaaaaaaagttacgttaaaaaccaaaaaactacatattttattatagaaaaagtattttttctccaccagacaaatggaaaaaaagaggaaagattaactatttgcaccgaaatgtcttgttttgttgcgacataggaaaataaccaagcacaaagttatattccatcctttttactgatttttttttcttctatctgttccatctgctgtattcatttctccaatctcatgtccattttggtgtgggagtcggggtagggggtactcttgtcaaaaggcacattggtgcatgtgtgtttgctagctcacttgtccatgaaaatattttatgatattaaagaaaatcttttg

SEQ ID NO: 196 - DNA, 3043 bp, Homo sapiens
  source 1..3043: mol_type = genomic DNA
aggcagtccgcgagcccagccgccgctgtcgccgccagtagcagccttcgccagcagcgccgcggcggaaccgggcgcaggggagcgagcccggccccgccagcccagcccagcccagccctactccctccccacgccagggcagcagccgttgctcagagagaaggtggaggaagaaatccagaccctagcacgcgcgcaccatcatggaccattatgattctcagcaaaccaacgattacatgcagccagaagaggactgggaccgggacctgctcctggacccggcctgggagaagcagcagagaaagacattcacggcatggtgtaactcccacctccggaaggcggggacacagatcgagaacatcgaagaggacttccgggatggcctgaagctcatgctgctgctggaggtcatctcaggtgaacgcttggccaagccagagcgaggcaagatgagagtgcacaagatctccaacgtcaacaaggccctggatttcatagccagcaaaggcgtcaaactggtgtccatcggagccgaagaaatcgtggatgggaatgtgaagatgaccctgggcatgatctggaccatcatcctgcgctttgccatccaggacatctccgtggaagagacttcagccaaggaagggctgctcctgtggtgtcagagaaagacagccccttacaaaaatgtcaacatccagaacttccacataagctggaaggatggcctcggcttctgtgctttgatccaccgacaccggcccgagctgattgactacgggaagctgcggaaggatgatccactcacaaatctgaatacggcttttgacgtggcagagaagtacctggacatccccaagatgctggatgccgaagacatcgttggaactgcccgaccggatgagaaagccatcatgacttacgtgtctagcttctaccacgccttctctggagcccagaaggcggagacagcagccaatcgcatctgcaaggtgttggccgtcaaccaggagaacgagcagcttatggaagactacgagaagctggccagtgatctgttggagtggatccgccgcacaatcccgtggctggagaaccgggtgcccgagaacaccatgcatgccatgcaacagaagctggaggacttccgggactaccggcgcctgcacaagccgcccaaggtgcaggagaagtgccagctggagatcaacttcaacacgctgcagaccaagctgcggctcagcaaccggcctgccttcatgccctctgagggcaggatggtctcggacatcaacaatgcctggggctgcctggagcaggtggagaagggctatgaggagtggttgctgaatgagatccggaggctggagcgactggaccacctggcagagaagttccggcagaaggcctccatccacgaggcctggactgacggcaaagaggccatgctgcgacagaaggactatgagaccgccaccctctcggagatcaaggccctgctcaagaagcatgaggccttcgagagtgacctggctgcccaccaggaccgtgtggagcagattgccgccatcgcacaggagctcaatgagctggactattatgactcacccagtgtcaacgcccgttgccaaaagatctgtgaccagtgggacaatctgggggccctaactcagaagcgaagggaagctctggagcggaccgagaaactgctggagaccattgaccagctgtacttggagtatgccaagcgggctgcacccttcaacaactggatggagggggccatggaggacctgcaggacaccttcattgtgcacaccattgaggagatccagggactgaccacagcccatgagcagttcaaggccaccctccctgatgccgacaaggagcgcctggccatcctgggcatccacaatgaggtgtccaagattgtccagacctaccacgtcaatatggcgggcaccaacccctacacaaccatcacgcctcaggagatcaatggcaaatgggaccacgtgcggcagctggtgcctcggagggaccaagctctgacggaggagcatgcccgacagcagcacaatgagaggctacgcaagcagtttggagcccaggccaatgtcatcgggccctggatccagaccaagatggaggagatcgggaggatctccattgagatgcatgggaccctggaggaccagctcagccacctgcggcagtatgagaagagcatcgtcaactacaagccaaagattgatcagctggagggcgaccaccagctcatccaggaggcgctcatcttcgacaacaagcacaccaactacaccatggagcacatccgtgtgggctgggagcagctgctcaccaccatcgccaggaccatcaatgaggtagagaaccagatcctgacccgggatgccaagggcatcagccaggagcagatgaatgagttccgggcctccttcaaccactttgaccggaagaagacaggcatgatggacacggatgatttccgcgcctgcctgatctccatgggttacaacatgggagaagcagaatttgcccgcatcatgagcattgtggaccccaaccgcctgggggtagtgacattccaggccttcattgacttcatgtcccgcgagacagccgacacagatacagcagaccaagtcatggcttccttcaagatcctggctggggacaagaactacattaccatggacgagctgcgccgcgagctgccacccgaccaggctgagtactgcatcgcgcggatggccccctacaccggccccgactccgtgccaggtgctctggactacatgtccttctccacggcgctgtacggcgagagtgacctctaatccaccccgcccggccgccctcgtcttgtgcgccgtgccctgccttgcacctccgccgtcgcccatctcctgcctgggttcggtttcagctcccagcctccacccgggtgagctggggcccacgtggcatcgatcctccctgcccgcgaagtgacagtttacaaaattatttt

SEQ ID NO: 197 - DNA, 4963 bp, Homo sapiens
  source 1..4963: mol_type = genomic DNA
gcggcggcggctcgggcagaggggcgggagctgaggcgggagcggacaggctggtgggcgagcgagaggcggcggaatggtggactaccacgcggcgaaccagtcgtaccagtacggccccagcagcgcgggcaatggcgctggcggcgggggcagcatgggcgactacatggcccaggaggacgactgggaccgggacctgctgctggacccggcctgggagaagcagcagcgcaagaccttcacggcatggtgcaactcccacctgcggaaggcaggcacacagatcgagaacattgatgaggacttccgagacgggctcaagctcatgctgctcctggaggtcatatcaggggagcggttacctaagccggagcgggggaagatgagagtgcacaaaatcaacaatgtgaacaaagcgctggactttattgccagcaaaggcgtcaagctggtctccatcggggcagaagagattgtggacggcaacgcaaagatgaccctgggaatgatctggaccatcatccttaggttcgccatccaggacatctccgtggaagagacctcggccaaggaagggctccttctctggtgccagagaaagacagccccgtataagaacgtcaatgtgcagaacttccacatcagctggaaggatggtcttgccttcaatgccctgatccaccggcacagaccagagctgattgagtatgacaagctgaggaaggacgaccctgtcaccaacctgaacaatgccttcgaagtggctgagaaatacctcgacatccccaagatgctggatgcagaggacatcgtgaacacggcccggcccgacgagaaggccataatgacctatgtgtccagcttctaccatgccttttcaggagcgcagaaggctgaaactgccgccaaccggatctgtaaggtgctggctgtcaaccaagagaacgagcacctgatggaggactacgagaagctggccagcgacctcctggagtggatccggcgcaccatcccctggctggaggaccgtgtgccccaaaagactatccaggagatgcagcagaagctggaggacttccgcgactaccggcgtgtgcacaagccgcccaaggtgcaggagaagtgccagctggagatcaacttcaacacgctgcagaccaagctgcgcctcagcaaccggcccgccttcatgccctccgagggcaagatggtctcggacatcaacaatggctggcagcacttggagcaggctgagaagggctacgaggagtggctgctgaatgagatccgcaggctggagcggctcgaccacctggcagagaagttccggcagaaggcctccatccacgaggcctggactgacgggaaggaagccatgctgaagcaccgggactacgagacggccacactatcggacatcaaagccctcattcgcaagcacgaggccttcgagagcgacctggctgcgcaccaggaccgcgtggagcagatcgccgccattgcccaggagctcaacgagctggattactacgactcccacaatgtcaacacccggtgccagaagatctgtgaccagtgggacgccctcggctctctgacacatagtcgcagggaagccctggagaaaacagagaagcagctggaggccatcgaccagctgcacctggaatacgccaagcgcgcggcccccttcaacaactggatggagagcgccatggaggacctccaggacatgttcatcgtccataccatcgaggagattgagggcctgatctcagcccatgaccagttcaagtccaccctgccggacgccgatagggagcgcgaggccatcctggccatccacaaggaggcccagaggatcgctgagagcaaccacatcaagctgtcgggcagcaacccctacaccaccgtcaccccgcaaatcatcaactccaagtgggagaaggtgcagcagctggtgccaaaacgggaccatgccctcctggaggagcagagcaagcagcagtccaacgagcacctgcgccgccagttcgccagccaggccaatgttgtggggccctggatccagaccaagatggaggagatcgggcgcatctccattgagatgaacgggaccctggaggaccagctgagccacctgaagcagtatgaacgcagcatcgtggactacaagcccaacctggacctgctggagcagcagcaccagctcatccaggaggccctcatcttcgacaacaagcacaccaactataccatggagcacatccgcgtgggctgggagcagctgctcaccaccattgcccgcaccatcaacgaggtggagaaccagatcctcacccgcgacgccaagggcatcagccaggagcagatgcaggagttccgggcgtccttcaaccacttcgacaaggatcatggcggggcgctggggcccgaggagttcaaggcctgcctcatcagcctgggctacgacgtggagaacgaccggcagggtgaggccgagttcaaccgcatcatgagcctggtcgaccccaaccatagcggccttgtgaccttccaagccttcatcgacttcatgtcgcgggagaccaccgacacggacacggctgaccaggtcatcgcttccttcaaggtcttagcaggggacaagaacttcatcacagctgaggagctgcggagagagctgccccccgaccaggccgagtactgcatcgcccgcatggcgccataccagggccctgacgccgtgcccggtgccctcgactacaagtccttctccacggccttgtatggcgagagcgacctgtgaggccccagagacctgacccaacacccccgacggcctccaggaggggcctgggcagccccacagtcccattcctccactctgtatctatgcaaagcactctctgcagtcctccggggtgggtgggtgggcagggaggggctggggcaggctctctcctctctctctttgtgggttggccaggaggttcccccgaccaggttggggagacttggggccagcgcttctggtctggtaaatatgtatgatgtgttgtgcttttttaaccaaggaggggccagtggattcccacagcacaaccggtcccttccatgccctgggatgcctcaccacacccaggtctcttcctttgctctgaggtcccttcaaggcctccccaatccaggccaaagccccatgtgccttgtccaggaactgcctgggccatgcgaggggccagcagagggcgccaccaccacctgacggctggggacccacccagcccctctcccctctctgctccagactcacttgccattgccaggagatggccccaacaagcaccccgcttttgcagcagaggagctgagttggcagaccgggcccccctgaaccgcaccccatcccaccagccccggccttgctttgtctggcctcacgtgtctcagattttctaagaaccaaaaaaaaaaaaggaaaaaaaacacaaaacaacaaaaaccaaaaaaaaaaaaaatcacaaaaacaaaaaaactataaaaaagaaagaattaaaaactttcagagaattactatttactttattaacttacggatttattatataaatatatattcacctagcaacatatctctgccgtctctcctgctctcataatgaagacatagccgattctctgcccgggccccttgctgatgctcctccgggtctgcgtcgggcgtgggtctctggggaccctccagaggtggaggtgggctgatggcctggctgcctggtggttgatggttttgctccccctaccttttttttttgagtttattctgattgattttttttcttggtttctggataaaccaccctctggggacaggataataaaacatgtaatatttttaagaaggattcctgcagcatcatctttttttatttctcctgtgtctgtcctccaccttctaggagagccagggcagagctagcactgtcttaagctgtcaacgtggactagctcgtgtcatctgctcgagaagggctgtcgctgttcttgtttctgagtgaggagtacgcaggccagagtggtcacccggccgtgagcagtgagggccagagactagccccagacaggtggatgccagagagagtggcacccatgccaggcaaggcctagggaggtggtcttgctcagcaaccctgccctgagcagcaggtgcgcccatccggagatcctaggagaaggtggccacctccatccactaaggaagagaaggaagacagtggcttgaggcagggagctcgcaggacagagcctgagccaccctgtccctcccacctggctcacctgtctgtgggtcaggcagatgaccccctcacccccatccaggtgctggctgcagtggcctgtgcagagaggggcagggtgagtgcccaccagtccccgtaccccttccccccatgccccaccatgccggggtggtactcacagaagatgcaggtgaggtgggccacacaggacacgaaccgctcgaagtccacacgcagacggctatcccggtagcggctggtgagggtctgggtcagctggttgttcaggtggaagcctagggggaggctgcttctgagcccagtggcccacagggaacccaccttggcattgcatccccaccccacctcctcagggaggacatgaatgccacagggtgtcacaccccaactctgccccatcccggcagggtgagtacaggctgatcccttcaatcctctgggcctgtttcctcatccatcaaacggactaagacagccccgaccccatagggtgtgtgaagacagaacgctcaggacagcgtctgacacgtgactcgatgtgtgggtactgttactccttaaatcctgtggggctttctccttgccagtgggcactggaggatatttctgtgcagcaaaaaatatagtcaatccca

SEQ ID NO: 198 - DNA, 2102 bp, Homo sapiens
  source 1..2102: mol_type = genomic DNA
gcggcggaatggtggactaccacgcggcgaaccagtcgtaccagtacggccccagcagcgcgggcaatggcgctggcggcgggggcagcatgggcgactacatggcccaggaggacgactgggaccgggacctgctgctggacccggcctgggagaagcagcagcgcaaggctgaaactgccgccaaccggatctgtaaggtgctggctgtcaaccaagagaacgagcacctgatggaggactacgagaagctggccagcgacctcctggagtggatccggcgcaccatcccctggctggaggaccgtgtgccccaaaagactatccaggagatgcagcagaagctggaggacttccgcgactaccggcgtgtgcacaagccgcccaaggtgcaggagaagtgccagctggagatcaacttcaacacgctgcagaccaagctgcgcctcagcaaccggcccgccttcatgccctccgagggcaagatggtctcggacatcaacaatggctggcagcacttggagcaggctgagaagggctacgaggagtggctgctgaatgagatccgcaggctggagcggctcgaccacctggcagagaagttccggcagaaggcctccatccacgaggcctggactgacgggaaggaagccatgctgaagcaccgggactacgagacggccacactatcggacatcaaagccctcattcgcaagcacgaggccttcgagagcgacctggctgcgcaccaggaccgcgtggagcagatcgccgccattgcccaggagctcaacgagctggattactacgactcccacaatgtcaacacccggtgccagaagatctgtgaccagtgggacgccctcggctctctgacacatagtcgcagggaagccctggagaaaacagagaagcagctggaggccatcgaccagctgcacctggaatacgccaagcgcgcggcccccttcaacaactggatggagagcgccatggaggacctccaggacatgttcatcgtccataccatcgaggagattgagggcctgatctcagcccatgaccagttcaagtccaccctgccggacgccgatagggagcgcgaggccatcctggccatccacaaggaggcccagaggatcgctgagagcaaccacatcaagctgtcgggcagcaacccctacaccaccgtcaccccgcaaatcatcaactccaagtgggagaaggtgcagcagctggtgccaaaacgggaccatgccctcctggaggagcagagcaagcagcagtccaacgagcacctgcgccgccagttcgccagccaggccaatgttgtggggccctggatccagaccaagatggaggagatcgggcgcatctccattgagatgaacgggaccctggaggaccagctgagccacctgaagcagtatgaacgcagcatcgtggactacaagcccaacctggacctgctggagcagcagcaccagctcatccaggaggccctcatcttcgacaacaagcacaccaactataccatggagcacatccgcgtgggctgggagcagctgctcaccaccattgcccgcaccatcaacgaggtggagaaccagatcctcacccgcgacgccaagggcatcagccaggagcagatgcaggagttccgggcgtccttcaaccacttcgacaaggatcatggcggggcgctggggcccgaggagttcaaggcctgcctcatcagcctgggctacgacgtggagaacgaccggcagggtgaggccgagttcaaccgcatcatgagcctggtcgaccccaaccatagcggccttgtgaccttccaagccttcatcgacttcatgtcgcgggagaccaccgacacggacacggctgaccaggtcatcgcttccttcaaggtcttagcaggggacaagaacttcatcacagctgaggagctgcggagagagctgccccccgaccaggccgagtactgcatcgcccgcatggcgccataccagggccctgacgccgtgcccggtgccctcgactacaagtccttctccacggccttgtatggcgagagcgacctgtgaggccccagagacctg

SEQ ID NO: 199 - DNA, 1625 bp, Homo sapiens
  source 1..1625: mol_type = genomic DNA
agaggggcgggagctgaggcgggagcggacaggctggtgggcgagcgagaggcggcggaatggtggactaccacgcggcgaaccagtcgtaccagtacggccccagcagcgcgggcaatggcgctggcggcgggggcagcatgggcgactacatggcccaggaggacgactgggaccgggacctgctgctggacccggcctgggagaagcagcagcgcaagaccttcacggcatggtgcaactcccacctgcggaaggcaggcacacagatcgagaacattgatgaggacttccgagacgggctcaagctcatgctgctcctggaggttcacgagctggattactacgactcccacaatgtcaacacccggtgccagaagatctgtgaccagtgggacgccctcggctctctgacacatagtcgcagggaagccctggagaaaacagagaagcagctggaggccatcgaccagctgcacctggaatacgccaagcgcgcggcccccttcaacaactggatggagagcgccatggaggacctccaggacatgttcatcgtccataccatcgaggagattgagggcctgatctcagcccatgaccagttcaagtccaccctgccggacgccgatagggagcgcgaggccatcctggccatccacaaggaggcccagaggatcgctgagagcaaccacatcaagctgtcgggcagcaacccctacaccaccgtcaccccgcaaatcatcaactccaagtgggagaaggtgcagcagctggtgccaaaacgggaccatgccctcctggaggagcagagcaagcagcagtccaacgagcacctgcgccgccagttcgccagccaggccaatgttgtggggccctggatccagaccaagatggaggagatcgggcgcatctccattgagatgaacgggaccctggaggaccagctgagccacctgaagcagtatgaacgcagcatcgtggactacaagcccaacctggacctgctggagcagcagcaccagctcatccaggaggccctcatcttcgacaacaagcacaccaactataccatggagcacatccgcgtgggctgggagcagctgctcaccaccattgcccgcaccatcaacgaggtggagaaccagatcctcacccgcgacgccaagggcatcagccaggagcagatgcaggagttccgggcgtccttcaaccacttcgacaaggatcatggcggggcgctggggcccgaggagttcaaggcctgcctcatcagcctgggctacgacgtggagaacgaccggcagggtgaggccgagttcaaccgcatcatgagcctggtcgaccccaaccatagcggccttgtgaccttccaagccttcatcgacttcatgtcgcgggagaccaccgacacggacacggctgaccaggtcatcgcttccttcaaggtcttagcaggggacaagaacttcatcacagctgaggagctgcggagagagctgccccccgaccaggccgagtactgcatcgcccgcatggcgccataccagggccctgacgccgtgcccggtgccctcgactacaagtccttctccacggccttgtatggcgagagcgacctgtga

SEQ ID NO: 200 - DNA, 2171 bp, Homo sapiens
  source 1..2171: mol_type = genomic DNA
agaggggcgggagctgaggcgggagcggacaggctggtgggcgagcgagaggcggcggaatggtggactaccacgcggcgaaccagtcgtaccagtacggccccagcagcgcgggcaatggcgctggcggcgggggcagcatgggcgactacatggcccaggaggacgactgggaccgggacctgctgctggacccggcctgggagaagcagcagcgcaagaccttcacggcatggtgcaactcccacctgcggaaggcaggcacacagatcgagaacattgatgaggacttccgagacgggctcaagctcatgctgctcctggaggtcatatcaggggagcggttacctaagccggagcgggggaagatgagagtgcacaaaatcaacaatgtgaacaaagcgctggactttattgccagcaaaggcgtcaagctggtctccatcggggcagaagagattgtggacggcaacgcaaagatgaccctgggaatgatctggaccatcatccttaggttcgccatccaggacatctccgtggaagagacctcggccaaggaagggctccttctctggtgccagagaaagacagccccgtataagaacgtcaatgtgcagaacttccacatcagctggaaggatggtcttgccttcaatgccctgatccaccggcacagaccagagctgattgagtatgacaagctgaggaaggacgaccctgtcaccaacctgaacaatgccttcgaagtggctgagaaatacctcgacatccccaagatgctggatgcagaggacatcgtgaacacggcccggcccgacgagaaggccataatgacctatgtgtccagcttctaccatgccttttcaggagcgcagaaggctgaaactgccgccaaccggatctgtaaggtgctggctgtcaaccaagagaacgagcacctgatggaggactacgagaagctggccagcgacctcctggagtggatccggcgcaccatcccctggctggaggaccgtgtgccccaaaagactatccaggagatgcagcagaagctggaggacttccgcgactaccggcgtgtgcacaagccgcccaaggtgcaggagaagtgccagctggagatcaacttcaacacgctgcagaccaagctgcgcctcagcaaccggcccgccttcatgccctccgagggcaagatggtctcggacatcaacaatggctggcagcacttggagcaggctgagaagggctacgaggagtggctgctgaatgagatccgcaggctggagcggctcgaccacctggcagagaagttccggcagaaggcctccatccacgaggcctggactgacgggaaggaagccatgctgaagcaccgggactacgagacggccacactatcggacatcaaagccctcattcgcaagcacgaggccttcgagagcgacctggctgcgcaccaggaccgcgtggagcagatcgccgccattgcccaggagctcaacgagctggattactacgactcccacaatgtcaacacccccgacggcctccaggaggggcctgggcagccccacagtcccattcctccactctgtatctatgcaaagcactctctgcagtcctccggggtgggtgggtgggcagggaggggctggggcaggctctctcctctctctctttgtgggttggccaggaggttcccccgaccaggttggggagacttggggccagcgcttctggtctggtaaatatgtatgatgtgttgtgcttttttaaccaaggaggggccagtggattcccacagcacaaccggtcccttccatgccctgggatgcctcaccacacccaggtctcttcctttgctctgaggtcccttcaaggcctccccaatccaggccaaagccccatgtgccttgtccaggaactgcctgggccatgcgaggggccagcagagggcgccaccaccacctgacggctggggacccacccagcccctctcccctctctgctccagactcacttgccattgccaggagatggccccaacaagcaccccgcttttgcagcagaggagctgagttggcagaccgggcccccctgaaccgcaccccatcccaccagccccggccttgctttgtctggcctcacgtgtctcagattttctaagaacc

SEQ ID NO: 201 - DNA, 3084 bp, Homo sapiens
  source 1..3084: mol_type = genomic DNA
aatagccctgccgcagcccatccagctggctcagagccgttccccatgcccgggtgtctccatcaccccagaaaacatgcaaaacagctcggcgcctctgtgttcctgactgtgaaatggggatagggctctgtgtcccaccagcgaggtgctggaagaggctcacgaggagctccagagggcagcctctagagcggcccgcggccactattattatcggcctttctattgtggagaggagtaaacagactcagagaggtcccgtggatttctcaaggtcacacagcgccccagcagcggagcaggaatgcaaacccaggatctccgccgcgagatccaccccggcgcccccgagtcccgcagttcccggcttcaggacaaccccttgccagaccttcactgcctggtgcaactcacacctgcgcaaggcaggcacccagatcgagaacatcgaggaagatttccgcaatggcctcaaactcatgctgctcctggaggtcatttcaggtgagaggctgcctaggccagataaaggcaagatgcgcttccacaaaatcgccaacgttaacaaggccctggacttcattgccagcaagggggttaaactggtgtccattggtgctgaagagattgttgacgggaacctgaagatgaccctgggcatgatctggaccatcatccttcgcttcgccatccaggacatctctgtggaagaaacctcagccaaggaaggcttgcttctgtggtgccagaggaagacagcaccgtaccgcaacgtcaacgtgcagaacttccacaccagctggaaggatggcctggccctctgtgccctcatccaccgacaccgccctgacctcatcgactacgccaaactgcgaaaggatgaccccatcggaaacctgaacactgcctttgaggtggcagagaaatacctggacatccccaagatgttggatgcagaagacattgtgaacaccccaaagccggatgagaaggccatcatgacctatgtgtcctgcttctaccatgcctttgccggggctgagcaggcagagacagctgccaacaggatctgcaaggtgctggcagtgaaccaggaaaacgagaagctgatggaggagtatgagaagcttgccagtgagctgctggagtggatccgccgcactgtcccatggctggagaaccgtgtgggtgagcccagcatgagtgccatgcagcgcaaactagaggactttcgggactaccggcgtctgcacaagccgccccgcattcaggaaaagtgccagctggagatcaacttcaacacactgcagaccaagttgcggctcagccaccggcctgccttcatgccctccgagggcaagctggtctcggacatcgccaacgcctggcgggggctggagcaggtggaaaagggctatgaggactggctgctctcggagatccggcgcctgcagcgactccagcacctggctgagaagttccggcagaaggcctccctgcacgaagcctggacccggggaaaggaggagatgctgagccagcgcgactacgattcggctttgctacaggaggtgcgggcgttgctgcggcgccacgaggcctttgagagcgacctggcggcgcaccaggaccgcgtggagcacattgccgcgctggcccaggagctcaatgagctggactaccacgaggcagcctcagtgaatagccgctgccaggccatctgcgatcagtgggacaacctgggcaccctgacccagaagaggcgggatgcgctagagcggatggagaagctcctggagaccattgaccggctgcaactggagtttgcccggcgggccgcgcccttcaacaactggctggatggtgccgtggaggacctgcaggacgtgtggctggtacactctgtggaggagacccagagcctgctgacagcgcacgatcagttcaaggcaacactgcccgaggctgactgagagcgaggtgccatcatgggcatccagggtgagatccagaagatctgccagacgtatgggctgcggccctgctccaccaatccctacatcaccctcagcccgcaggacatcaacaccaagtgggatatggtccgaaagctggtgcccagctgtgaccagacactgcaggaggagctggcacggcagcaggtaaacgagaggctccggcgacagtttgcggcccaggccaatgccattggaccctggatccaggcgaaggtggaggaagtggggcggctggcagcagggctagctggctctctggaggagcagatggctgggctacggcagcaggagcagaacattatcaactacaagactaacattgaccggctggagggtgaccaccagctgctgcaggagagcctggtgttcgacaataagcacaccgtctacagcatggagcacatccgcgtgggctgggagcagctgctcacctccattgcccgcaccatcaatgaagtggagaaccaggtactgacccgagacgccaagggactgagccaggagcagctcaacgagttccgagcatccttcaaccactttgacaggaagcagaatgggatgatggagcctgatgacttccgagcttgcctcatctccatgggctatgacctgggggaagtggagtttgctcgcatcatgaccatggtggaccccaacgcagctggggtggtgaccttccaggccttcatagacttcatgacccgagagacagccgagactgacacgactgagcaagttgtagcttccttcaagatcttggcaggagacaagaactacatcacccccgaggagctgcggcgcgagctccctgccaagcaggccgagtactgcatccgccgtatggtgccctacaagggatccggggccccggctggagccctggactacgtggccttctccagtgccctctatggggagagcgacctttgaccccaaccactgaggttctctatgcaagatggagagaggatgcaccctgtggctgatcccatccgtccctcggagcaagggcctaagagaaaagccagccaagtgcttctgaataaagatccctctctgggtc

SEQ ID NO: 202 - DNA, 704 bp, Homo sapiens
  source 1..704: mol_type = genomic DNA
gcgaagccaggagcccgatcgagatgatgatggttatgcagcccgagggtctgggggccggggaggggcgctttgcgggcggcggcgggggcggcgagtacatggaacaggaggaggactgggaccgcgacctgctgctggacccggcctgggagaagcagcagcggaaagaaaacgaaagctcagagagggaaagggactggcccaggatgcacagcaagtcagtggctgagctgagctgagacttgaatccagaaatacaaggctctgagacctaccctgactgaggagacaggactgtgccctacatcccccagagccagtcgtagggtttgagtgctgtcctctgcccctagaccttcactgcctggtgcaactcacacctgcgcaaggcaggcacccagatcgagaacatcgaggaagatttccgcaatggcctcaaactcatgctgctcctggaggtcatttcaggtgagaggctgcctaggccagataaaggcaagatgcgcttccacaaaatcgccaacgttaacaaggccctggacttcattgccagcaagggggttaaactggtgtccattggtgctgaagagattgttgacgggaacctgaagatgaccctgggcatgatctggaccatcatccttcgcttcgccatccaggacatctctgtggaagaaacctcagccaaggaaggcttgctt

SEQ ID NO: 203 - DNA, 2939 bp, Homo sapiens
  source 1..2939: mol_type = genomic DNA
agtgcgaattcgatctggggctgggctgggccctacttaatggggcccgggtgtccgagagcgtgccgagcggagcgaagccaggagcccgatcgagatgatgatggttatgcagcccgagggtctgggggccggggaggggcgctttgcgggcggcggcgggggcggcgagtacatggaacaggaggaggactgggaccgcgacctgctgctggacccggcctgggagaagcagcagcggaaaaccttcactgcctggtgcaactcacacctgcgcaaggcaggcacccagatcgagaacatcgaggaagatttccgcaatggcctcaaactcatgctgctcctggaggtcatttcaggtgagaggctgcctaggccagataaaggcaagatgcgcttccacaaaatcgccaacgttaacaaggccctggacttcattgccagcaagggggttaaactggtgtccattggtgctgaagagattgttgacgggaacctgaagatgaccctgggcatgatctggaccatcatccttcgcttcgccatccaggacatctctgtggaagaaacctcagccaaggaaggcttgcttctgtggtgccagaggaagacagcaccgtaccgcaacgtcaacgtgcagaacttccacaccagctggaaggatggcctggccctctgtgccctcatccaccgacaccgccctgacctcatcgactacgccaaactgcgaaaggatgaccccatcggaaacctgaacactgcctttgaggtggcagagaaatacctggacatccccaagatgttggatgcagaagacattgtgaacaccccaaagccggatgagaaggccatcatgacctatgtgtcctgcttctaccatgcctttgccggggctgagcaggcagagacagctgccaacaggatctgcaaggtgctggcagtgaaccaggaaaacgagaagctgatggaggagtatgagaagcttgccagtgagctgctggagtggatccgccgcactgtcccatggctggagaaccgtgtgggtgagcccagcatgagtgccatgcagcgcaaactagaggactttcgggactaccggcgtctgcacaagccgccccgcattcaggaaaagtgccagctggagatcaacttcaacacactgcagaccaagttgcggctcagccaccggcctgccttcatgccctccgagggcaagctggtctcggacatcgccaacgcctggcgggggctggagcaggtggaaaagggctatgaggactggctgctctcggagatccggcgcctgcagcgactccagcacctggctgagaagttccggcagaaggcctccctgcacgaagcctggacccggggaaaggaggagatgctgagccagcgcgactacgattcggctttgctacaggaggtgcgggcgttgctgcggcgccacgaggcctttgagagcgacctggcggcgcaccaggaccgcgtggagcacattgccgcgctggcccaggagctcaatgagctggactaccacgaggcagcctcagtgaatagccgctgccaggccatctgcgatcagtgggacaacctgggcaccctgacccagaagaggcgggatgcgctagagcggatggagaagctcctggagaccattgaccggctgcaactggagtttgcccggcgggccgcgcccttcaacaactggctggatggtgccgtggaggacctgcaggacgtgtggctggtacactctgtggaggagacccagagcctgctgacagcgcacgatcagttcaaggcaacactgcccgaggctgactgagagcgaggtgccatcatgggcatccagggtgagatccagaagatctgccagacgtatgggctgcggccctgctccaccaatccctacatcaccctcagcccgcaggacatcaacaccaagtgggatatggtccgaaagctggtgcccagctgtgaccagacactgcaggaggagctggcacggcagcaggtaaacgagaggctccggcgacagtttgcggcccaggccaatgccattggaccctggatccaggcgaaggtggaggaagtggggcggctggcagcagggctagctggctctctggaggagcagatggctgggctacggcagcaggagcagaacattatcaactacaagactaacattgaccggctggagggtgaccaccagctgctgcaggagagcctggtgttcgacaataagcacaccgtctacagcatggagcacatccgcgtgggctgggagcagctgctcacctccattgcccgcaccatcaatgaagtggagaaccaggtactgacccgagacgccaagggactgagccaggagcagctcaacgagttccgagcatccttcaaccactttgacaggaagcagaatgggatgatggagcctgatgacttccgagcttgcctcatctccatgggctatgacctgggggaagtggagtttgctcgcatcatgaccatggtggaccccaacgcagctggggtggtgaccttccaggccttcatagacttcatgacccgagagacagccgagactgacacgactgagcaagttgtagcttccttcaagatcttggcaggagacaagaactacatcacccccgaggagctgcggcgcgagctccctgccaagcaggccgagtactgcatccgccgtatggtgccctacaagggatccggggccccggctggagccctggactacgtggccttctccagtgccctctatggggagagcgacctttgaccccaaccactgaggttctctatgcaagatggagagaggatgcaccctgtggctgatcccatccgtccctcggagcaagggcctaagagaaaagccagccaagtgcttctgaataaagatccctctctgggtctct

SEQ ID NO: 204 - DNA, 4176 bp, Homo sapiens
  source 1..4176: mol_type = genomic DNA
gttgtcagtccgatctcgcgagagaggacggaagcctgtgggagcccgtggcctttaaagtgccgttcagccttttcctccaggggtgctttgtaaacacggctgtgctcagggctcgcgggtgaccgaaaggatcatgaactagtgacctggaaagggtactagatggaaacttgagaaaggactgcttattgataacagctaaggtattcctggaagcagagtaaataaagctcatggcccaccagctagaaagtattcttgccatgagaaaaagaatgtgataagttattcaacttatgaaattcaagttacatgtgaattctgccaggcaatacaaggacctgtggaatatgagtgatgacaaaccctttctatgtactgcgcctggatgtggccagcgttttaccaacgaggatcatttggctgtccataaacataaacatgagatgacactgaaatttggtccagcacgtaatgacagtgtcattgtggctgatcagaccccaacaccaacaagattcttgaaaaactgtgaagaagtgggtttgtttaatgagttggcgagtccatttgagaatgaattcaagaaagcttcagaagatgacattaaaaaaatgcctctagatttatcccctcttgcaacacctatcataagaagcaaaattgaggagccttctgttgtagaaacaactcaccaggatagtcctttacctcacccagagtctactaccagtgatgagaaggaagtaccattggcacaaactgcacagcccacatcagctattgttcgtccagcatcattacaggttcccaatgtgctgcttacaagttctgactcaagtgtaattattcagcaggcagtaccttcaccaacctcaagtactgtaatcacccaggcaccatcctctaacaggccaattgtccctgtaccaggcccatttcctcttctgttacatcttcctaatggacaaaccatgcctgttgctattcctgcatcaattacaagttctaatgtgcatgttccagctgcagtcccactcgttcgaccagtcaccatggtgcctagtgttccaggaatcccaggtccttcctctccccaaccagtacagtcagaagcaaaaatgagattaaaagctgctttgacccagcaacatcctccagttaccaatggtgatactgtcaaaggtcatggtagcggattggttaggactcagtcagaggaatctcgaccgcagtcattacaacagccagccacatccactacagaaactccggcttctccagctcacacaactccacagacccaaagtacaagtggtcgtcggagaagagcagctaacgaagatcctgatgaaaaaaggagaaagtttttagagcgaaatagagcagcagcttcaagatgccgacaaaaaaggaaagtctgggttcagtctttagagaagaaagctgaagacttgagttcattaaatggtcagctgcagagtgaagtcaccctgctgagaaatgaagtggcacagctgaaacagcttcttctggctcataaagattgccctgtaaccgccatgcagaagaaatctggctatcatactgctgataaagatgatagttcagaagacatttcagtgccgagtagtccacatacagaagctatacagcatagttcggtcagcacatccaatggagtcagttcaacctccaaggcagaagctgtagccacttcagtcctcacccagatggcggaccagagtacagagcctgctctttcacagatcgttatggctccttcctcccagtcacagccctcaggaagttgattaaaaacctgcagtacaacagttttagatactcattagtgacttcaaagggaaatcaaggaaagaccagtttccatttatgcgaaatctgtggttgtaaattttttttttttacttgaaattaaatttggctctaaagttggtgtagcagcagttgatcagactgaaaaacggtttttagtctctggaaaaagactgattttgctttttttataaatattattagatttattaatttttctgtgctcaatgtgtaaattgtattataattcattgtgatttatttcacttttaatttgctggtgttttaataaatgggggtgttactgaatctttcttcccacttccatttcttttgaccaccccttaaccctcaactgtgacggtagtagtattatcatttataccaaagttttgcatagtccctgttgactttgtaatgttaacggagtcataaaagcactaggcaagagaaagatagaaatttgcttttaatctttttgccttttattttgcacattatgcaaaaggaaaaacattaaagaacacttttttttaagtgagtgaaaacatggtaaagacatacagtgcttttatgcacattgttaagctaaatcaaggtcatttataatcattttccttttttatttaagattttaagtaaacaaattttagaattttcagcatttcaaaaatgattttatttttcaagtcttaaattcaatattttacacctatgttttgaggctaaaaatatgaaattatataatgtatgatacagggttatcaaatatctaataatttttgaaattagctcttgtttttggtttttttgttgttgtttttacagatttcaggttacaaactgcaaagtttatgcataattaagtatggtatggttgccagaaaagcctaaaattactacttagaaaatttaagactgtttacccccattgtcttgtacttgcgagctaacttgtactattcttgtgaaagcactgtcatcttttagtagcaaattttgataatgtttctcgtggaaaaaaaaatcagtatctatctttagaacaatgtaattataatgtgggaagtgtgcatgaatgagagagagtgtgtgtgtatctgtgtgtgtgtgcgcgtgtgtgtgtgtcttttaatagtttatgccagcaatctttgcttgaatgtttaacgatgccttcagtgtgatgctggccaatagatgattgcagtttaaaatgtcattattgtgcaggcttggataactaacattccatgatgtagcttgtttctgatgagatgattgtaggtacatttttctcattatccaatcatctgtgggatacttagttttctaatgtgccattatctatttttattctgcagttatgttcaaaatacagtacatattttaaaatagaataaattgttaaacataaaattttaaaagtagtagatgtgcgtaagaaaactttgtaaaatagttatgagtcctacccagtagcaacttctggcattcaagcaggattccactatgtaaatatctgtaatgcatttataataagttgtgtagtttgtcctgcatccatactacactatttgctaaagtctcagtgccatctcctaatgagactgacattttaaaagtctgtatggaatatccttgataattcaaggaaatatccctcctgcctaagttccaaactgggaaacattcaaattatataaatgacatttcaggactttaagtatgaagataatgggaattttattgttttgctttttaaaatgagagcatttttatttgataattttttttaaatttttaatttttaactaatttcattattttaaagtaatcagtttttcaaatcatgattttgatatcattattctaaggagttatctcaaaggcacaaaatatgaattctgcaagaaggctattttttattgtagtttgaatgggttaggaaaagcctcaatttttcactcttaagtccttcagtacatttttctttcatcttattacttatgcaagttaaggttctttggtaacagaattcttgcaactgtaaaataaaactacatagatgtaagaagtcatgtaaacggttaacaagcttaccaaggttagcaaaactttcattgtaaatcagtctgtactgagcaaataaaaatcattattagttgtataaacacaaattccattttgactttcaggatgtcatactacttctgtacctagcattttcagtccttatatttgcaatgttacacaaactgtactattttcttttatgtgcagtttgcatgagtaaaccatcagagaataaattctatctttaaattatgttcataa

SEQ ID NO: 205 - DNA, 4079 bp, Homo sapiens
  source 1..4079: mol_type = genomic DNA
gttgtcagtccgatctcgcgagagaggacggaagcctgtgggagcccgtggcctttaaagtgccgttcagccttttcctccaggggtgctttgtaaacacggctgtgctcagggctcgcgggtgaccgaaaggatcatgaactagtgacctggaaagggtactagatggaaacttgagaaaggactgcttattgataacagctaaggtattcctggaagcagagtaaataaagctcatggcccaccagctagaaagtattcttgccatgagaaaaagaatgtgataagttattcaacttatgaaattcaagttacatgtgaattctgccaggcaatacaaggacctgtggaatatgagtgatgacaaaccctttctatgtactgcgcctggatgtggccagatcagaccccaacaccaacaagattcttgaaaaactgtgaagaagtgggtttgtttaatgagttggcgagtccatttgagaatgaattcaagaaagcttcagaagatgacattaaaaaaatgcctctagatttatcccctcttgcaacacctatcataagaagcaaaattgaggagccttctgttgtagaaacaactcaccaggatagtcctttacctcacccagagtctactaccagtgatgagaaggaagtaccattggcacaaactgcacagcccacatcagctattgttcgtccagcatcattacaggttcccaatgtgctgcttacaagttctgactcaagtgtaattattcagcaggcagtaccttcaccaacctcaagtactgtaatcacccaggcaccatcctctaacaggccaattgtccctgtaccaggcccatttcctcttctgttacatcttcctaatggacaaaccatgcctgttgctattcctgcatcaattacaagttctaatgtgcatgttccagctgcagtcccactcgttcgaccagtcaccatggtgcctagtgttccaggaatcccaggtccttcctctccccaaccagtacagtcagaagcaaaaatgagattaaaagctgctttgacccagcaacatcctccagttaccaatggtgatactgtcaaaggtcatggtagcggattggttaggactcagtcagaggaatctcgaccgcagtcattacaacagccagccacatccactacagaaactccggcttctccagctcacacaactccacagacccaaagtacaagtggtcgtcggagaagagcagctaacgaagatcctgatgaaaaaaggagaaagtttttagagcgaaatagagcagcagcttcaagatgccgacaaaaaaggaaagtctgggttcagtctttagagaagaaagctgaagacttgagttcattaaatggtcagctgcagagtgaagtcaccctgctgagaaatgaagtggcacagctgaaacagcttcttctggctcataaagattgccctgtaaccgccatgcagaagaaatctggctatcatactgctgataaagatgatagttcagaagacatttcagtgccgagtagtccacatacagaagctatacagcatagttcggtcagcacatccaatggagtcagttcaacctccaaggcagaagctgtagccacttcagtcctcacccagatggcggaccagagtacagagcctgctctttcacagatcgttatggctccttcctcccagtcacagccctcaggaagttgattaaaaacctgcagtacaacagttttagatactcattagtgacttcaaagggaaatcaaggaaagaccagtttccatttatgcgaaatctgtggttgtaaattttttttttttacttgaaattaaatttggctctaaagttggtgtagcagcagttgatcagactgaaaaacggtttttagtctctggaaaaagactgattttgctttttttataaatattattagatttattaatttttctgtgctcaatgtgtaaattgtattataattcattgtgatttatttcacttttaatttgctggtgttttaataaatgggggtgttactgaatctttcttcccacttccatttcttttgaccaccccttaaccctcaactgtgacggtagtagtattatcatttataccaaagttttgcatagtccctgttgactttgtaatgttaacggagtcataaaagcactaggcaagagaaagatagaaatttgcttttaatctttttgccttttattttgcacattatgcaaaaggaaaaacattaaagaacacttttttttaagtgagtgaaaacatggtaaagacatacagtgcttttatgcacattgttaagctaaatcaaggtcatttataatcattttccttttttatttaagattttaagtaaacaaattttagaattttcagcatttcaaaaatgattttatttttcaagtcttaaattcaatattttacacctatgttttgaggctaaaaatatgaaattatataatgtatgatacagggttatcaaatatctaataatttttgaaattagctcttgtttttggtttttttgttgttgtttttacagatttcaggttacaaactgcaaagtttatgcataattaagtatggtatggttgccagaaaagcctaaaattactacttagaaaatttaagactgtttacccccattgtcttgtacttgcgagctaacttgtactattcttgtgaaagcactgtcatcttttagtagcaaattttgataatgtttctcgtggaaaaaaaaatcagtatctatctttagaacaatgtaattataatgtgggaagtgtgcatgaatgagagagagtgtgtgtgtatctgtgtgtgtgtgcgcgtgtgtgtgtgtcttttaatagtttatgccagcaatctttgcttgaatgtttaacgatgccttcagtgtgatgctggccaatagatgattgcagtttaaaatgtcattattgtgcaggcttggataactaacattccatgatgtagcttgtttctgatgagatgattgtaggtacatttttctcattatccaatcatctgtgggatacttagttttctaatgtgccattatctatttttattctgcagttatgttcaaaatacagtacatattttaaaatagaataaattgttaaacataaaattttaaaagtagtagatgtgcgtaagaaaactttgtaaaatagttatgagtcctacccagtagcaacttctggcattcaagcaggattccactatgtaaatatctgtaatgcatttataataagttgtgtagtttgtcctgcatccatactacactatttgctaaagtctcagtgccatctcctaatgagactgacattttaaaagtctgtatggaatatccttgataattcaaggaaatatccctcctgcctaagttccaaactgggaaacattcaaattatataaatgacatttcaggactttaagtatgaagataatgggaattttattgttttgctttttaaaatgagagcatttttatttgataattttttttaaatttttaatttttaactaatttcattattttaaagtaatcagtttttcaaatcatgattttgatatcattattctaaggagttatctcaaaggcacaaaatatgaattctgcaagaaggctattttttattgtagtttgaatgggttaggaaaagcctcaatttttcactcttaagtccttcagtacatttttctttcatcttattacttatgcaagttaaggttctttggtaacagaattcttgcaactgtaaaataaaactacatagatgtaagaagtcatgtaaacggttaacaagcttaccaaggttagcaaaactttcattgtaaatcagtctgtactgagcaaataaaaatcattattagttgtataaacacaaattccattttgactttcaggatgtcatactacttctgtacctagcattttcagtccttatatttgcaatgttacacaaactgtactattttcttttatgtgcagtttgcatgagtaaaccatcagagaataaattctatctttaaattatgttcataa

SEQ ID NO: 206 - DNA, 801 bp, Homo sapiens
  source 1..801: mol_type = genomic DNA
gtgggagcccgtggcctttaaagtgccgttcagccttttcctccaggggtgctttgtaaacacggctgtgctcagggctcgcgggtgaccgaaaggatcatgaactagtgacctggaaagggtactagatggaaacttgagaaaggactgcttattgataacagctaaggtattcctggaagcagagtaaataaagctcatggcccaccagctagaaagtattcttgccatgagaaaaagaatgtgataagttattcaacttatgaaattcaagttacatgtgaattctgccaggcaatacaaggacctgtggaatatgagtgatgacaaaccctttctatgtactgcgcctggatgtggccagagtgaagtcaccctgctgagaaatgaagtggcacagctgaaacagcttcttctggctcataaagattgccctgtaaccgccatgcagaagaaatctggctatcatactgctgataaagatgatagttcagaagacatttcagtgccgagtagtccacatacagaagctatacagcatagttcggtcagcacatccaatggagtcagttcaacctccaaggcagaagctgtagccacttcagtcctcacccagatggcggaccagagtacagagcctgctctttcacagatcgttatggctccttcctcccagtcacagccctcaggaagttgattaaaaacctgcagtacaacagttttagatactcattagtgacttcaaagggaaatcaaggaaagaccagtttccatttatgcgaaatctgtggttgtaaattt

SEQ ID NO: 207 - DNA, 1919 bp, Homo sapiens
  source 1..1919: mol_type = genomic DNA
gtgggagcccgtggcctttaaagtgccgttcagccttttcctccaggggtgctttgtaaacacggctgtgctcagggctcgcgggtgaccgaaaggatcatgaactagtgacctggaaagggtactagatggaaacttgagaaaggactgcttattgataacagctaaggtattcctggaagcagagtaaataaagctcatggcccaccagctagaaagatttcctgaagaggtagtctgattggcttaactcgtattcttgccatgagaaaaagaatgtgataagttattcaacttatgaaattcaagttacatgtgaattctgccaggcaatacaaggacctgtggaatatgagtgatgacaaaccctttctatgtactgcgcctggatgtggccagcgttttaccaacgaggatcatttggctgtccataaacataaacatgagatgacactgaaatttggtccagcacgtaatgacagtgtcattgtggctgatcagaccccaacaccaacaagattcttgaaaaactgtgaagaagtgggtttgtttaatgagttggcgagtccatttgagaatgaattcaagaaagcttcagaagatgacattaaaaaaatgcctctagatttatcccctcttgcaacacctatcataagaagcaaaattgaggagccttctgttgtagaaacaactcaccaggatagtcctttacctcacccagagtctactaccagtgatgagaaggaagtaccattggcacaaactgcacagcccacatcagctattgttcgtccagcatcattacaggttcccaatgtgctgcttacaagttctgactcaagtgtaattattcagcaggcagtaccttcaccaacctcaagtactgtaatcacccaggcaccatcctctaacaggccaattgtccctgtaccaggcccatttcctcttctgttacatcttcctaatggacaaaccatgcctgttgctattcctgcatcaattacaagttctaatgtgcatgttccagctgcagtcccactcgttcgaccagtcaccatggtgcctagtgttccaggaatcccaggtccttcctctccccaaccagtacagtcagaagcaaaaatgagattaaaagctgctttgacccagcaacatcctccagttaccaatggtgatactgtcaaaggtcatggtagcggattggttaggactcagtcagaggaatctcgaccgcagtcattacaacagccagccacatccactacagaaactccggcttctccagctcacacaactccacagacccaaagtacaagtggtcgtcggagaagagcagctaacgaagatcctgatgaaaaaaggagaaagtttttagagcgaaatagagcagcagcttcaagatgccgacaaaaaaggaaagtctgggttcagtctttagagaagaaagctgaagacttgagttcattaaatggtcagctgcagagtgaagtcaccctgctgagaaatgaagtggcacagctgaaacagcttcttctggctcataaagattgccctgtaaccgccatgcagaagaaatctggctatcatactgctgataaagatgatagttcagaagacatttcagtgccgagtagtccacatacagaagctatacagcatagttcggtcagcacatccaatggagtcagttcaacctccaaggcagaagctgtagccacttcagtcctcacccagatggcggaccagagtacagagcctgctctttcacagatcgttatggctccttcctcccagtcacagccctcaggaagttgattaaaaacctgcagtacaacagttttagatactcattagtgacttcaaagggaaatcaaggaaagaccagtttccatttatgcgaaatctgtggttgtaaattt

SEQ ID NO: 208 - DNA, 2109 bp, Homo sapiens
  source 1..2109: mol_type = genomic DNA
gtcagtccgatctcgcgagagaggacggaagcctgtgggagcccgtggcctttaaagtgccgttcagccttttcctccaggggtgctttgtaaacacggctgtgctcagggctcgcgggtgaccgaaaggatcatgaactagtgacctggaaagggtactagatggaaacttgagaaaggactgcttattgataacagctaaggtattcctggaagcagagtaaataaagctcatggcccaccagctagaaagtattcttgccatgagaaaaagaatgtgataagttattcaacttatgaaattcaagttacatgtgaattctgccagatactgaattcattacttaaaaccacccagaagagaaacctccaggctcagatagcttcactggcaatacaaggacctgtggaatatgagtgatgacaaaccctttctatgtactgcgcctggatgtggccagatcagaccccaacaccaacaagattcttgaaaaactgtgaagaagtgggtttgtttaatgagttggcgagtccatttgagaatgaattcaagaaagcttcagaagatgacattaaaaaaatgcctctagatttatcccctcttgcaacacctatcataagaagcaaaattgaggagccttctgttgtagaaacaactcaccaggatagtcctttacctcacccagagtctactaccagtgatgagaaggaagtaccattggcacaaactgcacagcccacatcagctattgttcgtccagcatcattacaggttcccaatgtgctgcttacaagttctgactcaagtgtaattattcagcaggcagtaccttcaccaacctcaagtactgtaatcacccaggcaccatcctctaacaggccaattgtccctgtaccaggcccatttcctcttctgttacatcttcctaatggacaaaccatgcctgttgctattcctgcatcaattacaagttctaatgtgcatgttccagctgcagtcccactcgttcgaccagtcaccatggtgcctagtgttccaggaatcccaggtccttcctctccccaaccagtacagtcagaagcaaaaatgagattaaaagctgctttgacccagcaacatcctccagttaccaatggtgatactgtcaaaggtcatggtagcggattggttaggactcagtcagaggaatctcgaccgcagtcattacaacagccagccacatccactacagaaactccggcttctccagctcacacaactccacagacccaaagtacaagtggtcgtcggagaagagcagctaacgaagatcctgatgaaaaaaggagaaagtttttagagcgaaatagagcagcagcttcaagatgccgacaaaaaaggaaagtctgggttcagtctttagagaagaaagctgaagacttgagttcattaaatggtcagctgcagagtgaagtcaccctgctgagaaatgaagtggcacagctgaaacagcttcttctggctcataaagattgccctgtaaccgccatgcagaagaaatctggctatcatactgctgataaagatgatagttcagaagacatttcagtgccgagtagtccacatacagaagctatacagcatagttcggtcagcacatccaatggagtcagttcaacctccaaggcagaagctgtagccacttcagtcctcacccagatggcggaccagagtacagagcctgctctttcacagatcgttatggctccttcctcccagtcacagccctcaggaagttgattaaaaacctgcagtacaacagttttagatactcattagtgacttcaaagggaaatcaaggaaagaccagtttccatttatgcgaaatctgtggttgtaaattttttttttttacttgaaattaaatttggctctaaagttggtgtagcagcagttgatcagactgaaaaacggtttttagtctctggaaaaagactgattttgctttttttataaatattattagatttattaatttttctgtgctcaatgtgtaaattgtattataattcattgtgatttatttcacttttaatttgctggtgttttaataaatgggggtgttactg

SEQ ID NO: 209 - DNA, 1335 bp, Homo sapiens
  source 1..1335: mol_type = genomic DNA
gtgggagcccgtggcctttaaagtgccgttcagccttttcctccaggggtgctttgtaaacacggctgtgctcagggctcgcgggtgaccgaaaggatcatgaactagtgacctggaaagggtactagatggaaacttgagaaaggactgcttattgataacagctaaggtattcctggaagcagagtaaataaagctcatggcccaccagctagaaagtattcttgccatgagaaaaagaatgtgataagttattcaacttatgaaattcaagttacatgtgaattctgccaggcaatacaaggacctgtggaatatgagtgatgacaaaccctttctatgtactgcgcctggatgtggccagcgttttaccaacgaggatcatttggctgtccataaacataaacatgagatgacactgaaatttggtccagcacgtaatgacagtgtcattgtggctgatcagaccccaacaccaacaagattcttgaaaaactgtgaagaagtgggtttgtttaatgagttggcgagtccatttgagaatgaattcaagaaagcttcagaagatgacattaaaaaaatgcctctagatttatcccctcttgcaacacctatcataagaagcaaaattgaggagccttctgttgtagaaacaactcaccaggatagtcctttacctcacccagagtctactaccagtgatgagaaggaagtaccattggcacaaactgcacagcccacatcagctattgttcgtccagcatcattacaggttcccaatgtgctgcttacaagttctgactcaagtgtaattattcagcaggcagtaccttcaccaacctcaagtactgtaatcacccaggcaccatcctctaacaggccaattgtgtaagtgattcaggccaatcattgaacatatacatgaattaagtttgttttgtaatgatttttcctaagacatttgattattcaaactaagatcttagttttgtatgtgtgtgcatgcttcgaattttggaaaaagtacttgcgtagtcttctttaatataaatattaactaacagagtgggagataaatacaactaaaaacaaatatagaatgtgaatttaagatagtcttattttcatgctatttcacacaaaatataaaattactgcatcaccagattccatttctttcagttcttactggtagctcccaagagctctctgatgacagtttttctcattttacaaattggagattgtcctaagtaaatccataacttttctcttcttttcaatactgctacacaggttatgcatttaagatgcaattaaaaataattaaatttt

SEQ ID NO: 210 - DNA, 2113 bp, Homo sapiens
  source 1..2113: mol_type = genomic DNA
gtgggagcccgtggcctttaaagtgccgttcagccttttcctccaggggtgctttgtaaacacggctgtgctcagggctcgcgggtgaccgaaaggatcatgaactagtgacctggaaagggtactagatggaaacttgagaaaggactgcttattgataacagctaaggtattcctggaagcagagtaaataaagctcatggcccaccagctagaaagatttcctgaagaggtagtctgattggcttaactcgtattcttgccatgagaaaaagaatgtgataagttattcaacttatgaaattcaagttacatgtgaattctgccaggcaatacaaggacctgtggaatatgagtgatgacaaaccctttctatgtactgcgcctggatgtggccagcgttttaccaacgaggatcatttggctgtccataaacataaacatgagatgacactgaaatttggtccagcacgtaatgacagtgtcattgtggctgatcagaccccaacaccaacaagattcttgaaaaactgtgaagaagtgggtttgtttaatgagttggcgagtccatttgagaatgaattcaagaaagcttcagaagatgacattaaaaaaatgcctctagatttatcccctcttgcaacacctatcataagaagcaaaattgaggagccttctgttgtagaaacaactcaccaggatagtcctttacctcacccagagtctactaccagtgatgagaaggaagtaccattggcacaaactgcacagcccacatcagctattgttcgtccagcatcattacaggttcccaatgtgctgcttacaagttctgactcaagtgtaattattcagcaggcagtaccttcaccaacctcaagtactgtaatcacccaggcaccatcctctaacaggccaattgtccctgtaccaggcccatttcctcttctgttacatcttcctaatggacaaaccatgcctgttgctattcctgcatcaattacaagttctaatgtgcatgttccagctgcagtcccactcgttcgaccagtcaccatggtgcctagtgttccaggaatcccaggtccttcctctccccaaccagtacagtcagaagcaaaaatgagattaaaagctgctttgacccagcaacatcctccagttaccaatggtgatactgtcaaaggtcatggtagcggattggttaggactcagtcagaggaatctcgaccgcagtcattacaacagccagccacatccactacagaaactccggcttctccagctcacacaactccacagacccaaagtacaagtggtcgtcggagaagagcagctaacgaagatcctgatgaaaaaaggagaaagtttttagagcgaaatagagcagcagcttcaagatgccgacaaaaaaggaaagtctgggttcagtctttagagaagaaagctgaagacttgagttcattaaatggtcagctgcagtgaatatattgctcgtgaaaggtgccagattgacagctttggaaactgaaggactctaattatccacagaccagagtgaagtcaccctgctgagaaatgaagtggcacagctgaaacagcttcttctggctcataaagattgccctgtaaccgccatgcagaagaaatctggctatcatacaaatatttcttcagctctattccataaggcagtgggcacccagatgtttccatatgcatggttgtgccttcttttgacctattgcaggaaaatgaataatttttcttttttccacccagctgctgataaagatgatagttcagaagacatttcagtgccgagtagtccacatacagaagctatacagcatagttcggtcagcacatccaatggagtcagttcaacctccaaggcagaagctgtagccacttcagtcctcacccagatggcggaccagagtacagagcctgctctttcacagatcgttatggctccttcctcccagtcacagccctcaggaagttgattaaaaacctgcagtacaacagttttagatactcattagtgacttcaaagggaaatcaaggaaagaccagtttccatttatgcgaaatctgtggttgtaaattt

SEQ ID NO: 211 - DNA, 1966 bp, Homo sapiens
  source 1..1966: mol_type = genomic DNA
gtgggagcccgtggcctttaaagtgccgttcagccttttcctccaggggtgctttgtaaacacggctgtgctcagggctcgcgggtgaccgaaaggatcatgaactagtgacctggaaagggtactagatggaaacttgagaaaggactgcttattgataacagctaaggtattcctggaagcagagtaaataaagctcatggcccaccagctagaaagatttcctgaagaggtagtctgattggcttaactcgtattcttgccatgagaaaaagaatgtgataagttattcaacttatgaaattcaagttacatgtgaattctgccaggcaatacaaggacctgtggaatatgagtgatgacaaaccctttctatgtactgcgcctggatgtggccagcgttttaccaacgaggatcatttggctgtccataaacataaacatgagatgacactgaaatttggtccagcacgtaatgacagtgtcattgtggctgatcagaccccaacaccaacaagattcttgaaaaactgtgaagaagtgggtttgtttaatgagttggcgagtccatttgagaatgaattcaagaaagcttcagaagatgacattaaaaaaatgcctctagatttatcccctcttgcaacacctatcataagaagcaaaattgaggagccttctgttgtagaaacaactcaccaggatagtcctttacctcacccagagtctactaccagtgatgagaaggaagtaccattggcacaaactgcacagcccacatcagctattgttcgtccagcatcattacaggttcccaatgtgctgcttacaagttctgactcaagtgtaattattcagcaggcagtaccttcaccaacctcaagtactgtaatcacccaggcaccatcctctaacaggccaattgtctcgttcgaccagtcaccatggtgcctagtgttccaggaatcccaggtccttcctctccccaaccagtacagtcagaagcaaaaatgagattaaaagctgctttgacccagcaacatcctccagttaccaatggtgatactgtcaaaggtcatggtagcggattggttaggactcagtcagaggaatctcgaccgcagtcattacaacagccagccacatccactacagaaactccggcttctccagctcacacaactccacagacccaaagtacaagtggtcgtcggagaagagcagctaacgaagatcctgatgaaaaaaggagaaagtttttagagcgaaatagagcagcagcttcaagatgccgacaaaaaaggaaagtctgggttcagtctttagagaagaaagctgaagacttgagttcattaaatggtcagctgcagtgaatatattgctcgtgaaaggtgccagattgacagctttggaaactgaaggactctaattatccacagaccagagtgaagtcaccctgctgagaaatgaagtggcacagctgaaacagcttcttctggctcataaagattgccctgtaaccgccatgcagaagaaatctggctatcatacaaatatttcttcagctctattccataaggcagtgggcacccagatgtttccatatgcatggttgtgccttcttttgacctattgcagctgctgataaagatgatagttcagaagacatttcagtgccgagtagtccacatacagaagctatacagcatagttcggtcagcacatccaatggagtcagttcaacctccaaggcagaagctgtagccacttcagtcctcacccagatggcggaccagagtacagagcctgctctttcacagatcgttatggctccttcctcccagtcacagccctcaggaagttgattaaaaacctgcagtacaacagttttagatactcattagtgacttcaaagggaaatcaaggaaagaccagtttccatttatgcgaaatctgtggttgtaaattt

SEQ ID NO: 212 - DNA, 1919 bp, Homo sapiens; identical to SEQ ID NO: 207
  source 1..1919: mol_type = genomic DNA

SEQ ID NO: 213 - DNA, 1989 bp, Homo sapiens
  source 1..1989: mol_type = genomic DNA
gtgggagcccgtggcctttaaagtgccgttcagccttttcctccaggggtgctttgtaaacacggctgtgctcagggctcgcgggtgaccgaaaggatcatgaactagtgacctggaaagggtactagatggaaacttgagaaaggactgcttattgataacagctaaggtattcctggaagcagagtaaataaagctcatggcccaccagctagaaagtattcttgccatgagaaaaagaatgtgataagttattcaacttatgaaattcaagttacatgtgaattctgccaggcaatacaaggacctgtggaatatgagtgatgacaaaccctttctatgtactgcgcctggatgtggccagcgttttaccaacgaggatcatttggctgtccataaacataaacatgagatgacactgaaatttggtccagcacgtaatgacagtgtcattgtggctgatcagaccccaacaccaacaagattcttgaaaaactgtgaagaagtgggtttgtttaatgagttggcgagtccatttgagaatgaattcaagaaagcttcagaagatgacattaaaaaaatgcctctagatttatcccctcttgcaacacctatcataagaagcaaaattgaggagccttctgttgtagaaacaactcaccaggatagtcctttacctcacccagagtctactaccagtgatgagaaggaagtaccattggcacaaactgcacagcccacatcagctattgttcgtccagcatcattacaggttcccaatgtgctgcttacaagttctgactcaagtgtaattattcagcaggcagtaccttcaccaacctcaagtactgtaatcacccaggcaccatcctctaacaggccaattgtccctgtaccaggcccatttcctcttctgttacatcttcctaatggacaaaccatgcctgttgctattcctgcatcaattacaagttctaatgtgcatgttccagctgcagtcccactcgttcgaccagtcaccatggtgcctagtgttccaggaatcccaggtccttcctctccccaaccagtacagtcagaagcaaaaatgagattaaaagctgctttgacccagcaacatcctccagttaccaatggtgatactgtcaaaggtcatggtagcggattggttaggactcagtcagaggaatctcgaccgcagtcattacaacagccagccacatccactacagaaactccggcttctccagctcacacaactccacagacccaaagtacaagtggtcgtcggagaagagcagctaacgaagatcctgatgaaaaaaggagaaagtttttagagcgaaatagagcagcagcttcaagatgccgacaaaaaaggaaagtctgggttcagtctttagagaagaaagctgaagacttgagttcattaaatggtcagctgcagtgaatatattgctcgtgaaaggtgccagattgacagctttggaaactgaaggactctaattatccacagaccagagtgaagtcaccctgctgagaaatgaagtggcacagctgaaacagcttcttctggctcataaagattgccctgtaaccgccatgcagaagaaatctggctatcatactgctgataaagatgatagttcagaagacatttcagtgccgagtagtccacatacagaagctatacagcatagttcggtcagcacatccaatggagtcagttcaacctccaaggcagaagctgtagccacttcagtcctcacccagatggcggaccagagtacagagcctgctctttcacagatcgttatggctccttcctcccagtcacagccctcaggaagttgattaaaaacctgcagtacaacagttttagatactcattagtgacttcaaagggaaatcaaggaaagaccagtttccatttatgcgaaatctgtggttgtaaattttttttttttacttgaaattaaatttggctct

SEQ ID NO: 214 - DNA, 2081 bp, Homo sapiens
  source 1..2081: mol_type = genomic DNA
gtgggagcccgtggcctttaaagtgccgttcagccttttcctccaggggtgctttgtaaacacggctgtgctcagggctcgcgggtgaccgaaaggatcatgaactagtgacctggaaagggtactagatggaaacttgagaaaggactgcttattgataacagctaaggtattcctggaagcagagtaaataaagctcatggcccaccagctagaaagatttcctgaagaggtagtctgattggcttaactcgtattcttgccatgagaaaaagaatgtgataagttattcaacttatgaaattcaagttacatgtgaattctgccaggcaatacaaggacctgtggaatatgagtgatgacaaaccctttctatgtactgcgcctggatgtggccagcgttttaccaacgaggatcatttggctgtccataaacataaacatgagatgacactgaaatttggtccagcacgtaatgacagtgtcattgtggctgatcagaccccaacaccaacaagattcttgaaaaactgtgaagaagtgggtttgtttaatgagttggcgagtccatttgagaatgaattcaagaaagcttcagaagatgacattaaaaaaatgcctctagatttatcccctcttgcaacacctatcataagaagcaaaattgaggagccttctgttgtagaaacaactcaccaggatagtcctttacctcacccagagtctactaccagtgatgagaaggaagtaccattggcacaaactgcacagcccacatcagctattgttcgtccagcatcattacaggttcccaatgtgctgcttacaagttctgactcaagtgtaattattcagcaggcagtaccttcaccaacctcaagtactgtaatcacccaggcaccatcctctaacaggccaattgtccctgtaccaggcccatttcctcttctgttacatcttcctaatggacaaaccatgcctgttgctattcctgcatcaattacaagttctaatgtgcatgttccagctgcagtcccactcgttcgaccagtcaccatggtgcctagtgttccaggaatcccaggtccttcctctccccaaccagtacagtcagaagcaaaaatgagattaaaagctgctttgacccagcaacatcctccagttaccaatggtgatactgtcaaaggtcatggtagcggattggttaggactcagtcagaggaatctcgaccgcagtcattacaacagccagccacatccactacagaaactccggcttctccagctcacacaactccacagacccaaagtacaagtggtcgtcggagaagagcagctaacgaagatcctgatgaaaaaaggagaaagtttttagagcgaaatagagcagcagcttcaagatgccgacaaaaaaggaaagtctgggttcagtctttagagaagaaagctgaagacttgagttcattaaatggtcagctgcagtgaatatattgctcgtgaaaggtgccagattgacagctttggaaactgaaggactctaattatccacagaccagagtgaagtcaccctgctgagaaatgaagtggcacagctgaaacagcttcttctggctcataaagattgccctgtaaccgccatgcagaagaaatctggctatcatacaaatatttcttcagctctattccataaggcagtgggcacccagatgtttccatatgcatggttgtgccttcttttgacctattgcagctgctgataaagatgatagttcagaagacatttcagtgccgagtagtccacatacagaagctatacagcatagttcggtcagcacatccaatggagtcagttcaacctccaaggcagaagctgtagccacttcagtcctcacccagatggcggaccagagtacagagcctgctctttcacagatcgttatggctccttcctcccagtcacagccctcaggaagttgattaaaaacctgcagtacaacagttttagatactcattagtgacttcaaagggaaatcaaggaaagaccagtttccatttatgcgaaatctgtggttgtaaattt

SEQ ID NO: 215 - DNA, 1966 bp, Homo sapiens; identical to SEQ ID NO: 211
  source 1..1966: mol_type = genomic DNA

SEQ ID NO: 216 - DNA, 2081 bp, Homo sapiens; identical to SEQ ID NO: 214
  source 1..2081: mol_type = genomic DNA

SEQ ID NO: 217 - DNA, 3505 bp, Homo sapiens
  source 1..3505: mol_type = genomic DNA
aagcctgtgggagcccgtggcctttaaagtgccgttcagccttttcctccaggggtgctttgtaaacacggctgtgctcagggctcgcgggtgaccgaaaggatcatgaactagtgacctggaaagggtactagatggaaacttgagaaaggactgcttattgataacagctaaggtattcctggaagcagagtaaataaagctcatggcccaccagctagaaagtattcttgccatgagaaaaagaatgtgataagttattcaacttatgaaattcaagttacatgtgaattctgccaggcaatacaaggacctgtggaatatgagtgatgacaaaccctttctatgtactgcgcctggatgtggccagcgttttaccaacgaggatcatttggctgatcagaccccaacaccaacaagattcttgaaaaactgtgaagaagtgggtttgtttaatgagttggcgagtccatttgagaatgaattcaagaaagcttcagaagatgacattaaaaaaatgcctctagatttatcccctcttgcaacacctatcataagaagcaaaattgaggagccttctgttgtagaaacaactcaccaggatagtcctttacctcacccagagtctactaccagtgatgagaaggaagtaccattggcacaaactgcacagcccacatcagctattgttcgtccagcatcattacaggttcccaatgtgctgcttacaagttctgactcaagtgtaattattcagcaggcagtaccttcaccaacctcaagtactgtaatcacccaggcaccatcctctaacaggccaattgtccctgtaccaggcccatttcctcttctgttacatcttcctaatggacaaaccatgcctgttgctattcctgcatcaattacaagttctaatgtgcatgttccagctgcagtcccactcgttcgaccagtcaccatggtgcctagtgttccaggaatcccaggtccttcctctccccaaccagtacagtcagaagcaaaaatgagattaaaagctgctttgacccagcaacatcctccagttaccaatggtgatactgtcaaaggtcatggtagcggattggttaggactcagtcagaggaatctcgaccgcagtcattacaacagccagccacatccactacagaaactccggcttctccagctcacacaactccacagacccaaagtacaagtggtcgtcggagaagagcagctaacgaagatcctgatgaaaaaaggagaaagtttttagagcgaaatagagcagcagcttcaagatgccgacaaaaaaggaaagtctgggttcagtctttagagaagaaagctgaagacttgagttcattaaatggtcagctgcagagtgaagtcaccctgctgagaaatgaagtggcacagctgaaacagcttcttctggctcataaagattgccctgtaaccgccatgcagaagaaatctggctatcatactgctgataaagatgatagttcagaagacatttcagtgccgagtagtccacatacagaagctatacagcatagttcggtcagcacatccaatggagtcagttcaacctccaaggcagaagctgtagccacttcagtcctcacccagatggcggaccagagtacagagcctgctctttcacagatcgttatggctccttcctcccagtcacagccctcaggaagttgattaaaaacctgcagtacaacagttttagatactcattagtgacttcaaagggaaatcaaggaaagaccagtttccatttatgcgaaatctgtggttgtaaattttttttttttacttgaaattaaatttggctctaaagttggtgtagcagcagttgatcagactgaaaaacggtttttagtctctggaaaaagactgattttgctttttttataaatattattagatttattaatttttctgtgctcaatgtgtaaattgtattataattcattgtgatttatttcacttttaatttgctggtgttttaataaatgggggtgttactgaatctttcttcccacttccatttcttttgaccaccccttaaccctcaactgtgacggtagtagtattatcatttataccaaagttttgcatagtccctgttgactttgtaatgttaacggagtcataaaagcactaggcaagagaaagatagaaatttgcttttaatctttttgccttttattttgcacattatgcaaaaggaaaaacattaaagaacacttttttttaagtgagtgaaaacatggtaaagacatacagtgcttttatgcacattgttaagctaaatcaaggtcatttataatcattttccttttttatttaagattttaagtaaacaaattttagaattttcagcatttcaaaaatgattttatttttcaagtcttaaattcaatattttacacctatgttttgaggctaaaaatatgaaattatataatgtatgatacagggttatcaaatatctaataatttttgaaattagctcttgtttttggtttttttgttgttgtttttacagatttcaggttacaaactgcaaagtttatgcataattaagtatggtatggttgccagaaaactttgtaaaatagttatgagtcctacccagtagcaacttctggcattcaagcaggattccactatgtaaatatctgtaatgcatttataataagttgtgtagtttgtcctgcatccatactacactatttgctaaagtctcagtgccatctcctaatgagactgacattttaaaagtctgtatggaatatccttgataattcaaggaaatatccctcctgcctaagttccaaactgggaaacattcaaattatataaatgacatttcaggactttaagtatgaagataatgggaattttattgttttgctttttaaaatgagagcatttttatttgataattttttttaaatttttaatttttaactaatttcattattttaaagtaatcagtttttcaaatcatgattttgatatcattattctaaggagttatctcaaaggcacaaaatatgaattctgcaagaaggctattttttattgtagtttgaatgggttaggaaaagcctcaatttttcactcttaagtccttcagtacatttttctttcatcttattacttatgcaagttaaggttctttggtaacagaattcttgcaactgtaaaataaaactacatagatgtaagaagtcatgtaaacggttaacaagcttaccaaggttagcaaaactttcattgtaaatcagtctgtactgagcaaataaaaatcattattagttgtataaacacaaattccattttgactttcaggatgtcatactacttctgtacctagcattttcagtccttatatttgcaatgttacacaaactgtactattttcttttatgtgcagtttgcatgagtaaaccatcagagaataaattctatctttaaatt

SEQ ID NO: 218 - DNA, 5333 bp, Homo sapiens
  source 1..5333: mol_type = genomic DNA
gcgattcggctggctctgccacaccaccgcgcgcccccgctccgcccgcccctccgggcgcgtcttttccgggctcgcgctgagtcccgcctccgccggctgtccgggtgcgcgcgcgccgctgcggctttttctctggcctccgccgcgcgctcctcctcgtcccagcgctagcgggcacgcggttcctttttgcgagctttccgagtgccaggcgccggccggctgcgaagacgcggtgggccgcccctccgattgaaatcacagaagatattcgtgttcttcttaagagaaaaagaggacattttagctttctcagttgaaggcgtactttattgtcggcttccaaagattactaacttttatctgtatcactaagattgaactgccttggctgtactgctattcttactgctgcttctattattgccttcttcagcacaataaggctttcaaaagccaaagaataacaagaaataagcaccattttagaagcctttccactatgaaacttaagctaaatgtgctcaccattattttgctgcctgtccacttgttaataacaatatacagtgcccttatatttattccatggtattttcttaccaatgccaagaagaaaaacgctatggcaaagagaataaaagctaagcccacttcagacaaacctggaagtccatatcgctctgtcacacacttcgactcactagctgtaatagacatccctggagcagatactctggataaattatttgaccatgctgtatccaagtttgggaagaaggacagccttgggaccagggaaatcctaagtgaagaaaatgaaatgcagccaaatggaaaagtttttaagaagttaattcttgggaattataaatggatgaactatcttgaagtgaatcgcagagtgaataactttggtagtggactcactgcactgggactaaaaccaaagaacaccattgccatcttctgtgagaccagggccgaatggatgattgcagcacagacctgctttaagtacaactttcctcttgtgactttatatgccacacttggcaaagaagcagtagttcatgggctaaatgaatctgaggcttcctatctgattaccagtgttgaacttctggaaagtaaacttaagactgcattgttagatatcagttgtgttaaacatatcatttatgtggacaataaggctatcaataaagcagagtaccctgaaggatttgagattcacagcatgcaatcagtagaagagttgggatctaacccagaaaacttgggcattcctccaagtagaccaacgccttcagacatggccattgttatgtatactagtggttctactggccgacctaagggagtgatgatgcatcatagcaatttgatagctggaatgacaggccagtgtgaaagaatacctggactgggaccgaaggacacatatattggctacttgcctttggctcatgtgctagaactgacagcagagatatcttgctttacctatggctgcaggattggatattcttctccgcttacactctctgaccagtccagcaaaattaaaaaaggaagcaaaggagactgtactgtactgaagcccacacttatggctgctgttccggaaatcatggatagaatttataagaatgttatgagcaaagtccaagagatgaattatattcagaaaactctgttcaagatagggtatgattacaaattggaacagatcaaaaagggatatgatgcacctctttgcaatctgttactgtttaaaaaggtcaaggccctgctgggagggaatgtccgcatgatgctgtctggaggggccccgctatctcctcagacacaccgattcatgaatgtctgcttctgctgcccaattggccagggttatggactgacagaatcatgtggtgctgggacagttactgaagtaactgactatactactggcagagttggagcacctcttatttgctgtgaaattaagctaaaagactggcaagaaggcggttatacaattaatgacaagccaaaccccagaggtgaaatcgtaattggtggacagaacatctccatgggatattttaaaaatgaagagaaaacagcagaagattattctgtggatgaaaatggacaaaggtggttttgcactggtgatattggagaattccatcccgatggatgtttacagattatagatcgtaagaaagatctagtgaagttacaagcaggagagtatgtatctcttgggaaagtagaagctgcactgaagaattgtccacttattgacaacatctgtgcttttgccaaaagtgatcagtcctatgtgatcagttttgtggttcctaaccagaaaaggttgacacttttggcacaacagaaaggggtagaaggaacttgggttgatatctgcaataatcctgctatggaagctgaaatactgaaagaaattcgagaagctgcaaatgccatgaaattggagcgatttgaaattccaatcaaggttcgattaagcccagagccatggacccctgaaactggtttggtaactgatgctttcaaactgaaaaggaaggagctgaggaaccattacctcaaagacattgaacgaatgtatgggggcaaataaaatgttgttgtcttattgacagttgtgcaggaggtagcctggtggttttcaacctctagaattttaagcctttgttgaactgttagaatgtaaggtatatcattctaaagatagagtaaaaagaaaacaaaaccaaaagttattaaaattgttgtccggtttactttaacttagttttgcatagttctagtgcagctgaaattgaaaagttatttccctttagctgtgttattatagagcagaaattctgtttttaaaaattagcctaagatatacttgtttttgtaaagaaaaatatttaatgttgaacaaaataaattggagttggagtagaatgtagtttgaggaaatttgcagcttccaatgcctcttgtcttcctatttcagaagtttaaatattaagcatgacagaaaatatgtattaacactactcaaagcaaaagtgctgcagggctttaaaattctcttccaaccatttatcttgaaggaaaaattcaatagtaatataatacacaaaatcaaataataccttagaaggtattaagattataattgttgcataggttagatatagagtcattgtaatgttgtgaataattacagtgcctaaaataagaatagaacaacatatacaacaccaaaaaatatctagtaatatatttaaagggaaattgagctgctttttttgaaactttgagatctaaaaataactgtaattatttgaatgactaagaggaaagtacattttttgaaatgctgaaaattgcctttctgtgtttattcaaactgaaaagctgagaccaagagcaaggaaggtaaaaagttaacaggcaaacattttctcttagaaaaggtgataaaatcataagtatttggaattagaacccttgcacagcactgaacctgggaaagagatttaaactctgaatttatctttgataacagggattgattttaaaatgtacatgtattaaattacatttgtaatttaaggtctgtttgctgttgctgattttattcttgatcagtagtttgcatttcagaaagcctttcattttgctttaattttagcaaagcgggttataatgaatgacttccccaatatcttgcttgaacttacaggtgattaacttggatgagttttgggaagttaaagggaagaaaacactgttatcattttttcctgtttgggaagagcttagaaactggaaatactagatttgggagaagggcagagttacttgataagggactgatgtttgtgcagtaacttgggagtgtggtttctttttgaatctttaattaaaacctgggattatatatccctgataaatattcacacttgaaccatagttactgtaaaatgcaaaaaatcttaatactgttattctttgcactttttcttaatcattttttatatatatgcatatatatatgtgtgtgtgtgtgttgcttatgttgttttgtacagatgtgggccaccattgcaacaaaatacattctttttgctctaaaatatttatgaagaaaatacttaaatgttatgtatatggtggtaataagggaaaaatcaagtattataaacaagaatgaaggtttttgtaaagatttctgttcagcgttttgcaaggtaaaattttaggcaagttttccctgaagttatgtgtatgtgagtattctcattcttcccaacttgcctttgaagagtgaaataccattattatcaagtagactactgttcagcttttattcctgccctgctgtttatcccttaagaatgagtttcttagacttttccaatatgtgattttttttcccatttagaatggtgattttaaatgtgtgagtgcatgtactatcttatctcagatatttgcacccccaatctgcccccaactcccaaaagctagaacactgccaactgatctgttataggtcctttagaaacacataattaacacttaaggttgggtgctgctaattctttgcaaaaatccaaatattgttaagggaccagggagatgccactaccccttgattttccatctaaaaatatacatgtttatgtaaacaaatctttccatatccatagtgacttttcaagtatttaagcctaaagattttgatctcacatttttatacctgtttaaattgctcacagttattacatacacatcagccatcaactaaagttgtactttaaaaatttactacaatatgtacatttctaagtcaaacacttgtgacttttgctttaattccatgaatgttcctgcctccttgatatttgtatttattctttttttctctagagtagaggtataattgtgtgatatttcagaaatacagataaatgattcaaaaagtcacagttaaggagaatcatgtttctttgatcatgaataactgattagtaagtcttgcctatattttcctgatagcatatgacaaatgtttctaaggtaacaagatgagaacagataaagattgtgtggtgttttggatttggagagaaatattttaatttttaaatgcagttacaaattataatgtattcatatttgtactttctgttaaaatgcatgattgcagaattgtttagattttgtgtttattcttgatgaaaagctttgtttgttcttgtttttaagtttgcactcaaatcttaagaaataaatccacccatgttatc

SEQ ID NO: 219 - DNA, 5032 bp, Homo sapiens
  source 1..5032: mol_type = genomic DNA
gtctgcagccagcgattcggctggctctgccacaccaccgcgcgcccccgctccgcccgcccctccgggcgcgtcttttccgggctcgcgctgagtcccgcctccgccggctgtccgggtgcgcgcgcgccgctgcggctttttctctggcctccgccgcgcgctcctcctcgtcccagcgctagcgggcacgcggttcctttttgcgagctttccgagtgccaggcgccggccggctgcgaagacgcggtgggccgcccctccgattgaaatcacagaagatattcgtgttcttcttaagagaaaaagaggacatttaaaaacgctatggcaaagagaataaaagctaagcccacttcagacaaacctggaagtccatatcgctctgtcacacacttcgactcactagctgtaatagacatccctggagcagatactctggataaattatttgaccatgctgtatccaagtttgggaagaaggacagccttgggaccagggaaatcctaagtgaagaaaatgaaatgcagccaaatggaaaagtttttaagaagttaattcttgggaattataaatggatgaactatcttgaagtgaatcgcagagtgaataactttggtagtggactcactgcactgggactaaaaccaaagaacaccattgccatcttctgtgagaccagggccgaatggatgattgcagcacagacctgctttaagtacaactttcctcttgtgactttatatgccacacttggcaaagaagcagtagttcatgggctaaatgaatctgaggcttcctatctgattaccagtgttgaacttctggaaagtaaacttaagactgcattgttagatatcagttgtgttaaacatatcatttatgtggacaataaggctatcaataaagcagagtaccctgaaggatttgagattcacagcatgcaatcagtagaagagttgggatctaacccagaaaacttgggcattcctccaagtagaccaacgccttcagacatggccattgttatgtatactagtggttctactggccgacctaagggagtgatgatgcatcatagcaatttgatagctggaatgacaggccagtgtgaaagaatacctggactgggaccgaaggacacatatattggctacttgcctttggctcatgtgctagaactgacagcagagatatcttgctttacctatggctgcaggattggatattcttctccgcttacactctctgaccagtccagcaaaattaaaaaaggaagcaaaggagactgtactgtactgaagcccacacttatggctgctgttccggaaatcatggatagaatttataagaatgttatgagcaaagtccaagagatgaattatattcagaaaactctgttcaagatagggtatgattacaaattggaacagatcaaaaagggatatgatgcacctctttgcaatctgttactgtttaaaaaggtcaaggccctgctgggagggaatgtccgcatgatgctgtctggaggggccccgctatctcctcagacacaccgattcatgaatgtctgcttctgctgcccaattggccagggttatggactgacagaatcatgtggtgctgggacagttactgaagtaactgactatactactggcagagttggagcacctcttatttgctgtgaaattaagctaaaagactggcaagaaggcggttatacaattaatgacaagccaaaccccagaggtgaaatcgtaattggtggacagaacatctccatgggatattttaaaaatgaagagaaaacagcagaagattattctgtggatgaaaatggacaaaggtggttttgcactggtgatattggagaattccatcccgatggatgtttacagattatagatcgtaagaaagatctagtgaagttacaagcaggagagtatgtatctcttgggaaagtagaagctgcactgaagaattgtccacttattgacaacatctgtgcttttgccaaaagtgatcagtcctatgtgatcagttttgtggttcctaaccagaaaaggttgacacttttggcacaacagaaaggggtagaaggaacttgggttgatatctgcaataatcctgctatggaagctgaaatactgaaagaaattcgagaagctgcaaatgccatgaaattggagcgatttgaaattccaatcaaggttcgattaagcccagagccatggacccctgaaactggtttggtaactgatgctttcaaactgaaaaggaaggagctgaggaaccattacctcaaagacattgaacgaatgtatgggggcaaataaaatgttgttgtcttattgacagttgtgcaggaggtagcctggtggttttcaacctctagaattttaagcctttgttgaactgttagaatgtaaggtatatcattctaaagatagagtaaaaagaaaacaaaaccaaaagttattaaaattgttgtccggtttactttaacttagttttgcatagttctagtgcagctgaaattgaaaagttatttccctttagctgtgttattatagagcagaaattctgtttttaaaaattagcctaagatatacttgtttttgtaaagaaaaatatttaatgttgaacaaaataaattggagttggagtagaatgtagtttgaggaaatttgcagcttccaatgcctcttgtcttcctatttcagaagtttaaatattaagcatgacagaaaatatgtattaacactactcaaagcaaaagtgctgcagggctttaaaattctcttccaaccatttatcttgaaggaaaaattcaatagtaatataatacacaaaatcaaataataccttagaaggtattaagattataattgttgcataggttagatatagagtcattgtaatgttgtgaataattacagtgcctaaaataagaatagaacaacatatacaacaccaaaaaatatctagtaatatatttaaagggaaattgagctgctttttttgaaactttgagatctaaaaataactgtaattatttgaatgactaagaggaaagtacattttttgaaatgctgaaaattgcctttctgtgtttattcaaactgaaaagctgagaccaagagcaaggaaggtaaaaagttaacaggcaaacattttctcttagaaaaggtgataaaatcataagtatttggaattagaacccttgcacagcactgaacctgggaaagagatttaaactctgaatttatctttgataacagggattgattttaaaatgtacatgtattaaattacatttgtaatttaaggtctgtttgctgttgctgattttattcttgatcagtagtttgcatttcagaaagcctttcattttgctttaattttagcaaagcgggttataatgaatgacttccccaatatcttgcttgaacttacaggtgattaacttggatgagttttgggaagttaaagggaagaaaacactgttatcattttttcctgtttgggaagagcttagaaactggaaatactagatttgggagaagggcagagttacttgataagggactgatgtttgtgcagtaacttgggagtgtggtttctttttgaatctttaattaaaacctgggattatatatccctgataaatattcacacttgaaccatagttactgtaaaatgcaaaaaatcttaatactgttattctttgcactttttcttaatcattttttatatatatgcatatatatatgtgtgtgtgtgtgttgcttatgttgttttgtacagatgtgggccaccattgcaacaaaatacattctttttgctctaaaatatttatgaagaaaatacttaaatgttatgtatatggtggtaataagggaaaaatcaagtattataaacaagaatgaaggtttttgtaaagatttctgttcagcgttttgcaaggtaaaattttaggcaagttttccctgaagttatgtgtatgtgagtattctcattcttcccaacttgcctttgaagagtgaaataccattattatcaagtagactactgttcagcttttattcctgccctgctgtttatcccttaagaatgagtttcttagacttttccaatatgtgattttttttcccatttagaatggtgattttaaatgtgtgagtgcatgtactatcttatctcagatatttgcacccccaatctgcccccaactcccaaaagctagaacactgccaactgatctgttataggtcctttagaaacacataattaacacttaaggttgggtgctgctaattctttgcaaaaatccaaatattgttaagggaccagggagatgccactaccccttgattttccatctaaaaatatacatgtttatgtaaacaaatctttccatatccatagtgacttttcaagtatttaagcctaaagattttgatctcacatttttatacctgtttaaattgctcacagttattacatacacatcagccatcaactaaagttgtactttaaaaatttactacaatatgtacatttctaagtcaaacacttgtgacttttgctttaattccatgaatgttcctgcctccttgatatttgtatttattctttttttctctagagtagaggtataattgtgtgatatttcagaaatacagataaatgattcaaaaagtcacagttaaggagaatcatgtttctttgatcatgaataactgattagtaagtcttgcctatattttcctgatagcatatgacaaatgtttctaaggtaacaagatgagaacagataaagattgtgtggtgttttggatttggagagaaatattttaatttttaaatgcagttacaaattataatgtattcatatttgtactttctgttaaaatgcatgattgcagaattgtttagattttgtgtttattcttgatgaaaagctttgtttgttcttgtttttaagtttgcactcaaatcttaagaaataaatccacccatgttatc

SEQ ID NO: 220 - DNA, 5225 bp, Homo sapiens
  source 1..5225: mol_type = genomic DNA
ctccgccggctgtccgggtgcgcgcgcgccgctgcggctttttctctggcctccgccgcgcgctcctcctcgtcccagcgctagcgggcacgcggttcctttttgcgagctttccgagtgccaggcgccggccggctgcgaagacgcggtgggccgcccctccgattgaaatcacagaagatattcgtgttcttcttaagagaaaaagaggacatttgcgtactttattgtcggcttccaaagattactaacttttatctgtatcactaagattgaactgccttggctgtactgctattcttactgctgcttctattattgccttcttcagcacaataaggctttcaaaagccaaagaataacaagaaataagcaccattttagaagcctttccactatgaaacttaagctaaatgtgctcaccattattttgctgcctgtccacttgttaataacaatatacagtgcccttatatttattccatggtattttcttaccaatgccaagaagaaaaacgctatggcaaagagaataaaagctaagcccacttcagacaaacctggaagtccatatcgctctgtcacacacttcgactcactagctgtaatagacatccctggagcagatactctggataaattatttgaccatgctgtatccaagtttgggaagaaggacagccttgggaccagggaaatcctaagtgaagaaaatgaaatgcagccaaatggaaaagtttttaagaagttaattcttgggaattataaatggatgaactatcttgaagtgaatcgcagagtgaataactttggtagtggactcactgcactgggactaaaaccaaagaacaccattgccatcttctgtgagaccagggccgaatggatgattgcagcacagacctgctttaagtacaactttcctcttgtgactttatatgccacacttggcaaagaagcagtagttcatgggctaaatgaatctgaggcttcctatctgattaccagtgttgaacttctggaaagtaaacttaagactgcattgttagatatcagttgtgttaaacatatcatttatgtggacaataaggctatcaataaagcagagtaccctgaaggatttgagattcacagcatgcaatcagtagaagagttgggatctaacccagaaaacttgggcattcctccaagtagaccaacgccttcagacatggccattgttatgtatactagtggttctactggccgacctaagggagtgatgatgcatcatagcaatttgatagctggaatgacaggccagtgtgaaagaatacctggactgggaccgaaggacacatatattggctacttgcctttggctcatgtgctagaactgacagcagagatatcttgctttacctatggctgcaggattggatattcttctccgcttacactctctgaccagtccagcaaaattaaaaaaggaagcaaaggagactgtactgtactgaagcccacacttatggctgctgttccggaaatcatggatagaatttataagaatgttatgagcaaagtccaagagatgaattatattcagaaaactctgttcaagatagggtatgattacaaattggaacagatcaaaaagggatatgatgcacctctttgcaatctgttactgtttaaaaaggtcaaggccctgctgggagggaatgtccgcatgatgctgtctggaggggccccgctatctcctcagacacaccgattcatgaatgtctgcttctgctgcccaattggccagggttatggactgacagaatcatgtggtgctgggacagttactgaagtaactgactatactactggcagagttggagcacctcttatttgctgtgaaattaagctaaaagactggcaagaaggcggttatacaattaatgacaagccaaaccccagaggtgaaatcgtaattggtggacagaacatctccatgggatattttaaaaatgaagagaaaacagcagaagattattctgtggatgaaaatggacaaaggtggttttgcactggtgatattggagaattccatcccgatggatgtttacagattatagatcgtaagaaagatctagtgaagttacaagcaggagagtatgtatctcttgggaaagtagaagctgcactgaagaattgtccacttattgacaacatctgtgcttttgccaaaagtgatcagtcctatgtgatcagttttgtggttcctaaccagaaaaggttgacacttttggcacaacagaaaggggtagaaggaacttgggttgatatctgcaataatcctgctatggaagctgaaatactgaaagaaattcgagaagctgcaaatgccatgaaattggagcgatttgaaattccaatcaaggttcgattaagcccagagccatggacccctgaaactggtttggtaactgatgctttcaaactgaaaaggaaggagctgaggaaccattacctcaaagacattgaacgaatgtatgggggcaaataaaatgttgttgtcttattgacagttgtgcaggaggtagcctggtggttttcaacctctagaattttaagcctttgttgaactgttagaatgtaaggtatatcattctaaagatagagtaaaaagaaaacaaaaccaaaagttattaaaattgttgtccggtttactttaacttagttttgcatagttctagtgcagctgaaattgaaaagttatttccctttagctgtgttattatagagcagaaattctgtttttaaaaattagcctaagatatacttgtttttgtaaagaaaaatatttaatgttgaacaaaataaattggagttggagtagaatgtagtttgaggaaatttgcagcttccaatgcctcttgtcttcctatttcagaagtttaaatattaagcatgacagaaaatatgtattaacactactcaaagcaaaagtgctgcagggctttaaaattctcttccaaccatttatcttgaaggaaaaattcaatagtaatataatacacaaaatcaaataataccttagaaggtattaagattataattgttgcataggttagatatagagtcattgtaatgttgtgaataattacagtgcctaaaataagaatagaacaacatatacaacaccaaaaaatatctagtaatatatttaaagggaaattgagctgctttttttgaaactttgagatctaaaaataactgtaattatttgaatgactaagaggaaagtacattttttgaaatgctgaaaattgcctttctgtgtttattcaaactgaaaagctgagaccaagagcaaggaaggtaaaaagttaacaggcaaacattttctcttagaaaaggtgataaaatcataagtatttggaattagaacccttgcacagcactgaacctgggaaagagatttaaactctgaatttatctttgataacagggattgattttaaaatgtacatgtattaaattacatttgtaatttaaggtctgtttgctgttgctgattttattcttgatcagtagtttgcatttcagaaagcctttcattttgctttaattttagcaaagcgggttataatgaatgacttccccaatatcttgcttgaacttacaggtgattaacttggatgagttttgggaagttaaagggaagaaaacactgttatcattttttcctgtttgggaagagcttagaaactggaaatactagatttgggagaagggcagagttacttgataagggactgatgtttgtgcagtaacttgggagtgtggtttctttttgaatctttaattaaaacctgggattatatatccctgataaatattcacacttgaaccatagttactgtaaaatgcaaaaaatcttaatactgttattctttgcactttttcttaatcattttttatatatatgcatatatatatgtgtgtgtgtgtgttgcttatgttgttttgtacagatgtgggccaccattgcaacaaaatacattctttttgctctaaaatatttatgaagaaaatacttaaatgttatgtatatggtggtaataagggaaaaatcaagtattataaacaagaatgaaggtttttgtaaagatttctgttcagcgttttgcaaggtaaaattttaggcaagttttccctgaagttatgtgtatgtgagtattctcattcttcccaacttgcctttgaagagtgaaataccattattatcaagtagactactgttcagcttttattcctgccctgctgtttatcccttaagaatgagtttcttagacttttccaatatgtgattttttttcccatttagaatggtgattttaaatgtgtgagtgcatgtactatcttatctcagatatttgcacccccaatctgcccccaactcccaaaagctagaacactgccaactgatctgttataggtcctttagaaacacataattaacacttaaggttgggtgctgctaattctttgcaaaaatccaaatattgttaagggaccagggagatgccactaccccttgattttccatctaaaaatatacatgtttatgtaaacaaatctttccatatccatagtgacttttcaagtatttaagcctaaagattttgatctcacatttttatacctgtttaaattgctcacagttattacatacacatcagccatcaactaaagttgtactttaaaaatttactacaatatgtacatttctaagtcaaacacttgtgacttttgctttaattccatgaatgttcctgcctccttgatatttgtatttattctttttttctctagagtagaggtataattgtgtgatatttcagaaatacagataaatgattcaaaaagtcacagttaaggagaatcatgtttctttgatcatgaataactgattagtaagtcttgcctatattttcctgatagcatatgacaaatgtttctaaggtaacaagatgagaacagataaagattgtgtggtgttttggatttggagagaaatattttaatttttaaatgcagttacaaattataatgtattcatatttgtactttctgttaaaatgcatgattgcagaattgtttagattttgtgtttattcttgatgaaaagctttgtttgttcttgtttttaagtttgcactcaaatcttaagaaataaatccacccatgttatc

SEQ ID NO: 221 - DNA, 506 bp, Homo sapiens
  source 1..506: mol_type = genomic DNA
gtcccagcgctagcgggcacgcggttcctttttgcgagctttccgagtgccaggcgccggccggctgcgaagacgcggtgggccgcccctccgattgaaatcacagaagatattcgtgttcttcttaagagaaaaagaggacattttagctttctcagttgaaggcgtactttattgtcggcttccaaagattactaacttttatctgtatcactaagattgaactgccttggctgtactgctattcttactgctgcttctattattgccttcttcagcacaataaggctttcaaaagccaaagaataacaagaaataagcaccattttagaagcctttccactatgaaacttaagctaaatgtgctcaccattattttgctgcctgtccacttgttaataacaatatacagtgcccttatatttattccatggtattttcttaccaatgccaagaagaaaaacgctatggcaaagagaataaaagctaagcccacttcagacaaa

SEQ ID NO: 222 - DNA, 802 bp, Homo sapiens
  source 1..802: mol_type = genomic DNA
tccgggctcgcgctgagtcccgcctccgccggctgtccgggtgcgcgcgcgccgctgcggctttttctctggcctccgccgcgcgctcctcctcgtcccagcgctagcgggcacgcggttcctttttgcgagctttccgagtgccaggcgccggccggctgcgaagacgcggtgggccgcccctccggcgtactttattgtcggcttccaaagattactaacttttatctgtatcactaagattgaactgccttggctgtactgctattcttactgctgcttctattattgccttcttcagcacaataaggctttcaaaagccaaagaataacaagaaataagcaccattttagaagcctttccactatgaaacttaagctaaatgtgctcaccattattttgctgcctgtccacttgttaataacaatatacagtgcccttatatttattccatggtattttcttaccaatgccaagaagaaaaacgctatggcaaagagaataaaagctaagcccacttcagacaaacctggaagtccatatcgctctgtcacacacttcgactcactagctgtaatagacatccctggagcagatactctggataaattatttgaccatgctgtatccaagtttgggaagaaggacagccttgggaccagggaaatcctaagtgaagaaaatgaaatgcagccaaatggaaaagtttttaagaagttaattcttgggaattataaatggatgaactatcttgaagtgaatcgcagagtgaataactttggtagtggactcactgcactg

SEQ ID NO: 223 - DNA, 573 bp, Homo sapiens
  source 1..573: mol_type = genomic DNA
acgcggttcctttttgcgagctttccgagtgccaggcgccggccggctgcgaagacgcggtgggccgcccctccgattgaaatcacagaagatattcgtgttcttcttaagagaaaaagaggacatttcacaataaggctttcaaaagccaaagaataacaagaaataagcaccattttagaagcctttccactatgaaacttaagctaaatgtgctcaccattattttgctgcctgtccacttgttaataacaatatacagtgcccttatatttattccatggtattttcttaccaatgccaagaagaaaaacgctatggcaaagagaataaaagctaagcccacttcagacaaacctggaagtccatatcgctctgtcacacacttcgactcactagctgtaatagacatccctggagcagatactctggataaattatttgaccatgctgtatccaagtttgggaagaaggacagccttgggaccagggaaatcctaagtgaagaaaatgaaatgcagccaaatggaaaagtttttaagaagttaattcttgggaattataaatggatga

SEQ ID NO: 224 - DNA, 587 bp, Homo sapiens
  source 1..587: mol_type = genomic DNA
actctagagcattaaaagtgtcttcaacatggcagctgaggtgctttctttgctgggaaaagctgcaaagagactggcagaatggcgacttcaggagttaatacctctccagaagaaaaacgctatggcaaagagaataaaagctaagcccacttcagacaaacctggaagtccatatcgctctgtcacacacttcgactcactagctgtaatagacatccctggagcagatactctggataaattatttgaccatgctgtatccaagtttgggaagaaggacagccttgggaccagggaaatcctaagtgaagaaaatgaaatgcagccaaatggaaaagtttttaagaagttaattcttgggaattataaatggatgaactatcttgaagtgaatcgcagagtgaataactttggtagtggactcactgcactgggactaaaaccaaagaacaccattgccatcttctgtgagaccagggccgaatggatgattgcagcacagacctgctttaagtacaactttcctcttgtgactttatatgccacacttggcaaagaagcagtagttcatgggctaaatgaat

SEQ ID NO: 225 - DNA, 637 bp, Homo sapiens
  source 1..637: mol_type = genomic DNA
tccgggctcgcgctgagtcccgcctccgccggctgtccgggtgcgcgcgcgccgctgcggctttttctctggcctccgccgcgcgctcctcctcgtcccagcgctagcgggcacgcggttcctttttgcgagctttccgagtgccaggcgccggccggctgcgaagacgcggtgggccgcccctccgcacaataaggctttcaaaagccaaagaataacaagaaataagcaccattttagaagcctttccactatgaaacttaagctaaatgtgctcaccattattttgctgcctgtccacttgttaataacaatatacagtgcccttatatttattccatggtattttcttaccaatgccaagaagaaaaacgctatggcaaagagaataaaagctaagcccacttcagacaaacctggaagtccatatcgctctgtcacacacttcgactcactagctgtaatagacatccctggagcagatactctggataaattatttgaccatgctgtatccaagtttgggaagaaggacagccttgggaccagggaaatcctaagtgaagaaaatgaaatgcagccaaatggaaaagtttttaagaagttaattcttgggaattataaatggatgaactat

SEQ ID NO: 226 - DNA, 4349 bp, Homo sapiens
  source 1..4349: mol_type = genomic DNA
acctgcacttctgggggcgtcgagcctggcggtagaatcttcccagtaggcggcgcgggagggaaaagaggattgaggggctaggccgggcggatcccgtcctcccccgatgtgagcagttttccgaaaccccgtcaggcgaaggctgcccagagaggtggagtcggtagcggggccgggaacatgaggcagtctctcctattcctgaccagcgtggttcctttcgtgctggcgccgcgacctccggatgacccgggcttcggcccccaccagagactcgagaagcttgattctttgctctcagactacgatattctctctttatctaatatccagcagcattcggtaagaaaaagagatctacagacttcaacacatgtagaaacactactaactttttcagctttgaaaaggcattttaaattatacctgacatcaagtactgaacgtttttcacaaaatttcaaggtcgtggtggtggatggtaaaaacgaaagcgagtacactgtaaaatggcaggacttcttcactggacacgtggttggtgagcctgactctagggttctagcccacataagagatgatgatgttataatcagaatcaacacagatggggccgaatataacatagagccactttggagatttgttaatgataccaaagacaaaagaatgttagtttataaatctgaagatatcaagaatgtttcacgtttgcagtctccaaaagtgtgtggttatttaaaagtggataatgaagagttgctcccaaaagggttagtagacagagaaccacctgaagagcttgttcatcgagtgaaaagaagagctgacccagatcccatgaagaacacgtgtaaattattggtggtagcagatcatcgcttctacagatacatgggcagaggggaagagagtacaactacaaattacttaatagagctaattgacagagttgatgacatctatcggaacacttcatgggataatgcaggttttaaaggctatggaatacagatagagcagattcgcattctcaagtctccacaagaggtaaaacctggtgaaaagcactacaacatggcaaaaagttacccaaatgaagaaaaggatgcttgggatgtgaagatgttgctagagcaatttagctttgatatagctgaggaagcatctaaagtttgcttggcacaccttttcacataccaagattttgatatgggaactcttggattagcttatgttggctctcccagagcaaacagccatggaggtgtttgtccaaaggcttattatagcccagttgggaagaaaaatatctatttgaatagtggtttgacgagcacaaagaattatggtaaaaccatccttacaaaggaagctgacctggttacaactcatgaattgggacataattttggagcagaacatgatccggatggtctagcagaatgtgccccgaatgaggaccagggagggaaatatgtcatgtatcccatagctgtgagtggcgatcacgagaacaataagatgttttcaaactgcagtaaacaatcaatctataagaccattgaaagtaaggcccaggagtgttttcaagaacgcagcaataaagtttgtgggaactcgagggtggatgaaggagaagagtgtgatcctggcatcatgtatctgaacaacgacacctgctgcaacagcgactgcacgttgaaggaaggtgtccagtgcagtgacaggaacagtccttgctgtaaaaactgtcagtttgagactgcccagaagaagtgccaggaggcgattaatgctacttgcaaaggcgtgtcctactgcacaggtaatagcagtgagtgcccgcctccaggaaatgctgaagatgacactgtttgcttggatcttggcaagtgtaaggatgggaaatgcatccctttctgcgagagggaacagcagctggagtcctgtgcatgtaatgaaactgacaactcctgcaaggtgtgctgcagggacctttctggccgctgtgtgccctatgtcgatgctgaacaaaagaacttatttttgaggaaaggaaagccctgtacagtaggattttgtgacatgaatggcaaatgtgagaaacgagtacaggatgtaattgaacgattttgggatttcattgaccagctgagcatcaatacttttggaaagtttttagcagacaacatcgttgggtctgtcctggttttctccttgatattttggattcctttcagcattcttgtccattgtgtggataagaaattggataaacagtatgaatctctgtctctgtttcaccccagtaacgtcgaaatgctgagcagcatggattctgcatcggttcgcattatcaaaccctttcctgcgccccagactccaggccgcctgcagcctgcccctgtgatcccttcggcgccagcagctccaaaactggaccaccagagaatggacaccatccaggaagaccccagcacagactcacatatggacgaggatgggtttgagaaggaccccttcccaaatagcagcacagctgccaagtcatttgaggatctcacggaccatccggtcaccagaagtgaaaaggctgcctcctttaaactgcagcgtcagaatcgtgttgacagcaaagaaacagagtgctaatttagttctcagctcttctgacttaagtgtgcaaaatatttttatagatttgacctacaaatcaatcacagcttgtattttgtgaagactgggaagtgacttagcagatgctggtcatgtgtttgaacttcctgcaggtaaacagttcttgtgtggtttggcccttctccttttgaaaaggtaaggtgaaggtgaatctagcttattttgaggctttcaggttttagtttttaaaatatcttttgacctgtggtgcaaaagcagaaaatacagctggattgggttatgaatatttacgtttttgtaaattaatcttttatattgataacagcactgactagggaaatgatcagtttttttttatacactgtaatgaaccgctgaatatgaggcatttggcatttatttgtgatgacaactggaatagttttttttttttttttttttttttgccttcaactaaaaacaaaggagataaatctagtatacattgtctctaaattgtgggtctatttctagttattacccagagtttttatgtagcagggaaaatatatatctaaatttagaaatcatttgggttaatatggctcttcataattctaagactaatgctctctagaaacctaaccacctaccttacagtgagggctatacatggtagccagttgaatttatggaatctaccaactgtttagggccctgatttgctgggcagtttttctgtattttataagtatcttcatgtatccctgttactgatagggatacatgctcttagaaaattcactattggctgggagtggtggctcatgcctgtaatcccagcacttggagaggctgaggttgcgccactacactccagcctgggtgacagagtgagactctgcctcaaaaaaaaaaaaaaaaaaaaaaaattcactatctacaaacctagaatatttaaaatacaaagattgcctgttttcaaacactattgaataagagggtgagatatttcttaacaacaacaacaacaaaaaaaacaggttgttttgaatgtgatgagccagccaggagatagaatactacctgcccttagggttgggggctgtccccacaagacttgatacttcagaaaccctttttattgacccacaagcagatatttgaattacttcttactttattgctccaggattctggatgggctgcatttactgtgtgaaggataaaaatcattagcctggattctgatttctataaattgccattaaaagctttttttcccctaagaactgaaatgtgctcaccagccaaaacattttaacttgtaaattttgagggcagttaaccaaacctgtgactaatcatatctcctcctaccccccatttccaaggacatttgttactcagatacttgttatactaatacttgaacttgtaccttatggtatttgctatcttttaactagtcatgatattcttatactttagttacacttttggaatttgatacaaggttgagtggggtgtgtgggtgtatgtatgagtgaaacagttctcaaaagaatgtaagaaaaaccatttttataaaattgtgactttttaaaaacatagtctttgtcatttatagaattaacaagctgctcagggtatattttatagctgtagcactgatatctgcattaataaatactgtcgaaacacaa

SEQ ID NO: 227 - DNA, 1881 bp, Homo sapiens
  source 1..1881: mol_type = genomic DNA
cgccacctgcacttctgggggcgtcgagcctggcggtagaatcttcccagtaggcggcgcgggagggaaaagaggattgaggggctaggccgggcggatcccgtcctcccccgatgtgagcagttttccgaaaccccgtcaggcgaaggctgcccagagaggtggagtcggtagcggggccgggaacatgaggcagtctctcctattcctgaccagcgtggttcctttcgtgctggcgccgcgacctccggatgacccgggcttcggcccccaccagagactcgagaagcttgattctttgctctcagactacgatattctctctttatctaatatccagcagcattcggtaagaaaaagagatctacagacttcaacacatgtagaaacactactaactttttcagctttgaaaaggcattttaaattatacctgacatcaagtactgaacgtttttcacaaaatttcaaggtcgtggtggtggatggtaaaaacgaaagcgagtacactgtaaaatggcaggacttcttcactggacacgtggttggtgagcctgactctagggttctagcccacataagagatgatgatgttataatcagaatcaacacagatggggccgaatataacatagagccactttggagatttgttaatgataccaaagacaaaagaatgttagtttataaatctgaagatatcaagaatgtttcacgtttgcagtctccaaaagtgtgtggttatttaaaagtggataatgaagagttgctcccaaaagggttagtagacagagaaccacctgaagagcttgttcatcgagtgaaaagaagagctgacccagatcccatgaagaacacgtgtaaattattggtggtagcagatcatcgcttctacagatacatgggcagaggggaagagagtacaactacaaattacttaatacacacagatagagctaattgacagagttgatgacatctatcggaacacttcatgggataatgcaggttttaaaggctatggaatacagatagagcagttattatttgaataggtaacatgtacacagtacaaaagccagtgaaaagtaagtctctgcagcctgtttattgtcaaaccagttcctttccccaaagacattcatgtcactagtttcatatgtatctttctagagatgtcgtatgcaggtatagtgtatgtatatgtctgtatttgacacaacggtgctatgcagtacacttttacaccttgctttttcatttcacagtatgttggagagtacttcatgttcatgcatgtaaagctgcttcacttgttttattataaatagctgcatcatgtttgagtttcagggaacctgtaaattttctttttgctttaggcatttggaaccagtcgaagaaacaggaataatataggagattaaaacattaacttctttacatctgatgaaggatggattggagggtgtggtttagatgtgtatcatggtgggcttctaagtagttctatcccagatttgaccttgaccagccaccatcaaaactgcagagtccaccccagtaaacttaccacacagtggcagaggagaccagaatgggccttctctgcaggcaggcaggcaggcaggcaggcagagagactcacagaaactctgagctgagcatggtttccttctttatctcacacttactaatgggagcctttgttacttttttttttcttctttgcaggtttaatatgaatttgtctgaaatgcctgtataaggagaagactctattcttagccttttattcctttgatgcacaaagagatgtatattttattattctttcctgagttgtcgactgtagtcgtaataaatattttaggctcctgt

SEQ ID NO: 228 - DNA, 6327 bp, Homo sapiens
  source 1..6327: mol_type = genomic DNA
ggcccggcggcagcccccgcagtcgctgaagcggccgcgcccgccgggggagggagtagccgctggggaggctccaagttggcggagcggcgaggacccctggactcctctgcgtcccgccccgggagtggctgcgaggctaggcgagccgggaaagggggcgccgcccagccccgagccccgcgccccgtgccccgagcccggagccccctgcccgccgcggcaccatgcgcgccgagccggcgtgaccggctccgcccgcggccgccccgcagctagcccggcgctctcgccggccacacggagcggcgcccgggagctatgagccatgaagccgcccggcagcagctcgcggcagccgcccctggcgggctgcagccttgccggcgcttcctgcggcccccaacgcggccccgccggctcggtgcctgccagcgccccggcccgcacgccgccctgccgcctgcttctcgtccttctcctgctgcctccgctcgccgcctcgtcccggccccgcgcctggggggctgctgcgcccagcgctccgcattggaatgaaactgcagaaaaaaatttgggagtcctggcagatgaagacaatacattgcaacagaatagcagcagtaatatcagttacagcaatgcaatgcagaaagaaatcacactgccttcaagactcatatattacatcaaccaagactcggaaagcccttatcacgttcttgacacaaaggcaagacaccagcaaaaacataataaggctgtccatctggcccaggcaagcttccagattgaagccttcggctccaaattcattcttgacctcatactgaacaatggtttgttgtcttctgattatgtggagattcactacgaaaatgggaaaccacagtactctaagggtggagagcactgttactaccatggaagcatcagaggcgtcaaagactccaaggtggctctgtcaacctgcaatggacttcatggcatgtttgaagatgataccttcgtgtatatgatagagccactagagctggttcatgatgagaaaagcacaggtcgaccacatataatccagaaaaccttggcaggacagtattctaagcaaatgaagaatctcactatggaaagaggtgaccagtggccctttctctctgaattacagtggttgaaaagaaggaagagagcagtgaatccatcacgtggtatatttgaagaaatgaaatatttggaacttatgattgttaatgatcacaaaacgtataagaagcatcgctcttctcatgcacataccaacaactttgcaaagtccgtggtcaaccttgtggattctatttacaaggagcagctcaacaccagggttgtcctggtggctgtagagacctggactgagaaggatcagattgacatcaccaccaaccctgtgcagatgctccatgagttctcaaaataccggcagcgcattaagcagcatgctgatgctgtgcacctcatctcgcgggtgacatttcactataagagaagcagtctgagttactttggaggtgtctgttctcgcacaagaggagttggtgtgaatgagtatggtcttccaatggcagtggcacaagtattatcgcagagcctggctcaaaaccttggaatccaatgggaaccttctagcagaaagccaaaatgtgactgcacagaatcctggggtggctgcatcatggaggaaacaggggtgtcccattctcgaaaattttcaaagtgcagcattttggagtatagagactttttacagagaggaggtggagcctgccttttcaacaggccaacaaagctatttgagcccacggaatgtggaaatggatacgtggaagctggggaggagtgtgattgtggttttcatgtggaatgctatggattatgctgtaagaaatgttccctctccaacggggctcactgcagcgacgggccctgctgtaacaatacctcatgtctttttcagccacgagggtatgaatgccgggatgctgtgaacgagtgtgatattactgaatattgtactggagactctggtcagtgcccaccaaatcttcataagcaagacggatatgcatgcaatcaaaatcagggccgctgctacaatggcgagtgcaagaccagagacaaccagtgtcagtacatctggggaacaaaggctgcagggtctgacaagttctgctatgaaaagctgaatacagaaggcactgagaagggaaactgcgggaaggatggagaccggtggattcagtgcagcaaacatgatgtgttctgtggattcttactctgtaccaatcttactcgagctccacgtattggtcaacttcagggtgagatcattccaacttccttctaccatcaaggccgggtgattgactgcagtggtgcccatgtagttttagatgatgatacggatgtgggctatgtagaagatggaacgccatgtggcccgtctatgatgtgtttagatcggaagtgcctacaaattcaagccctaaatatgagcagctgtccactcgattccaagggtaaagtctgttcgggccatggggtgtgtagtaatgaagccacctgcatttgtgatttcacctgggcagggacagattgcagtatccgggatccagttaggaaccttcacccccccaaggatgaaggacccaagggtcctagtgccaccaatctcataataggctccatcgctggtgccatcctggtagcagctattgtccttgggggcacaggctggggatttaaaaatgtcaagaagagaaggttcgatcctactcagcaaggccccatctgaatcagctgcgctggatggacaccgccttgcactgttggattctgggtatgacatactcgcagcagtgttactggaactattaagtttgtaaacaaaacctttgggtggtaatgactacggagctaaagttggggtgacaaggatggggtaaaagaaaactgtctcttttggaaataatgtcaaagaacacctttcaccacctgtcagtaaacgggggagggggcaaaagaccatgctataaaaagaactgttccagaatcttttttttccctaatggacgaaggaacaacacacacacaaaaattaaatgcaataaaggaatcattaaaaaaaatagtaaatgattttttttccctcagcctgctggcacttaatatcttctaaatgatttggcatgatttttttttctttactaccgatgacaaactccagtggcatgaagatctaattttcaaaagggtaaaaactgcatggcatatatacaacaagctagcaagccaattctcagcaaaacctgcaacagaattcctaaagtgaagatgacagatgaacacaaagaagctgcctgggcctcttcacttaaacatgtccccacaccccatcctctcggagccccacttcttaccccccacctcccaccctctataatccccactccccattggagaccaggccagggcagaactccacggaccttgctcttgttgattcactttccccattgtgttttctcctggactgagcatcctttggaaatgggagctggaatttgaacaatgatgctattgtatagttcttttataaatgtaaatatggaaataagagattttgacacatcattttcacttgtctgtattgagatattttccttgtaaaggttctctgtaaacttgagttgattttttgctccccatcttttttgtttcttgtctctctttctctgtctctgtccttctctcttgtaacgtgttatacaatgactcttgggcttgcttaaaaagacagatatagccacagatgcagggagtttgggcacaaaacacgtgcagtttaaagttggtgtgcgttaaaccaaaaataaaaggggggacataaacaacaaaataacccatatcaaagacacaaaattatgtaaatggaaatatatgtactaagtttcgaaaattttttgatgtcattataaacctatgtaaataatgtaagaaagtagacaccctttcagattaatcacaaaagtgccaagctcatgattttggttttcggttttgacaattttctttccctgtctttaatgtgaaaggaggataaacttaaagccttaaataaaaaaatttttttaaatgttaaaagcttggaaaaaattaagctttccattttatttgtatttgttagtgtcaatatttcatccatgctcattttcctgcctcaaaatatatatggtagaaccctattggaaaagtggtaatgggaatagaaggagcagttacctttgtatccgcattgttaaaataggcttttatgctgtgctgtgctttcaagaaaccttgtttgacctctggcattttactgatcagtggaccgttgcactggattataatgggattctactatatacaaatccacattgttcttctccctccagccagatttgcagatgtaatctgggctttccaagtccctctgagtttccttcacttttactgatttttttcttctaaatatggtcaagatagcttctgtcacatgttaagtaaataagctgaagaaatttggtcccggctttgttttaatgtacaaaccggtatgtgatcacttcagtgagcatccctctatagatgggctttagtaaagactgtcccaaagagcccctacttctctaatgcccccccccttttttttttaggaaaagaacatgcagttttactcatcacttcttcatgacaccaaatccattgctaggtttagctcctggtcccttttcagcaagattcatgttatccgtcttacaactttgattttggaaagtattatgtcctaaaaatgcactgcttaacacagtggggtttttttcccccgaggtgtctttaactggggaagtaccacaaacatagagcagagactttaatttctatattctacaatagaccatcaccaaacatcttatcatgttgttgctttctgagtaataggtgctacgcaggtaggcgggctttctctaggactaggtgtacgtttattttgtaataacagggctatctacaaggcctctcagccttactcctggcttcataggacacaggtagcatccctctagtcattggcaatggctctttcagctcggaggaagcttggaggaaactcagattacttggtatcttttcctgttgctgcattgcttagtgtttccttgttgctgggtcctactctctagtagatactaaactgctgtgaagtacaccatacacatttcactaagattccagagccaccttggtgacataacagaaacaaaatcatgttggttacaaaacaaattaaatctctattgttaacttttaagcatttcacaaacaacattgtaaatgtgcgatgttacgttttaaatcagaccacagtggtccccaaatattatgtacatatggcaaatgtcagtgtaactttttgttacactggcaatttcataggtaatcgaacctatgctccaatgttaaattatttgtgtatatgtaaaatacacaagctttaagctatgtgtgtatgaatatgaaagttaatgcaaccatatcaattgtaaaaatggattataattatttttgatggtattaggttatgtagtttcaaactctttgctgtattttgttttgcacctgccattcatttgctaatttttgtggcgtggagattcttttttattaatttgagctcacagcacaagtgtatcactgtttaatgttacccaacaagagttagtgttaagtgatgatcaagttcccatttcacctgctctacttttgctgcattaattaatgacacccggatgaggagacgtgcgctaacttcattgctcatctgggatagtgcatgagcccattgaattagagctgctcctactagataactgagcagtacacataagtgcatgttatgaaacatgaatcacatagagcagtggagttttaccaagtggtgtgtgtggtttttgttttttactatgcaaagatgggaaatgcacaaacttttcaaagactagtgtctgaagaactttacaaacaatacttgaaccctttctttaaagttatcccatcatgttttatagtcattgttgcttccattgttagtttccattttcaagtgctttgtaattttttaagtgcactacctgaaattttgtttgaaattaataaattcattcgtatcttgttggctgcctatgaatggagattcagtagtcattgtatgcatctttaagtcaaatgtgtattaaaactttcgttaacgta

SEQ ID NO: 229 - DNA, 2714 bp, Homo sapiens
  source 1..2714: mol_type = genomic DNA
atgaagccgcccggcagcagctcgcggcagccgcccctggcgggctgcagccttgccggcgcttcctgcggcccccaacgcggccccgccggctcggtgcctgccagcgccccggcccgcacgccgccctgccgcctgcttctcgtccttctcctgctgcctccgctcgccgcctcgtcccggccccgcgcctggggggctgctgcgcccagcgctccgcattggaatgaaactgcagaaaaaaatttgggagtcctggcagatgaagacaatacattgcaacagaatagcagcagtaatatcagttacagcaatgcaatgcagaaagaaatcacactgccttcaagactcatatattacatcaaccaagactcggaaagcccttatcacgttcttgacacaaaggcaagacaccagcaaaaacataataaggctgtccatctggcccaggcaagcttccagattgaagccttcggctccaaattcattcttgacctcatactgaacaatggtttgttgtcttctgattatgtggagattcactacgaaaatgggaaaccacagtactctaagggtggagagcactgttactaccatggaagcatcagaggcgtcaaagactccaaggtggctctgtcaacctgcaatggacttcatggcatgtttgaagatgataccttcgtgtatatgatagagccactagagctggttcatgatgagaaaagcacaggtcgaccacatataatccagaaaaccttggcaggacagtattctaagcaaatgaagaatctcactatggaaagaggtgaccagtggccctttctctctgaattacagtggttgaaaagaaggaagagagcagtgaatccatcacgtggtatatttgaagaaatgaaatatttggaacttatgattgttaatgatcacaaaacgtataagaagcatcgctcttctcatgcacataccaacaactttgcaaagtccgtggtcaaccttgtggattctatttacaaggagcagctcaacaccagggttgtcctggtggctgtagagacctggactgagaaggatcagattgacatcaccaccaaccctgtgcagatgctccatgagttctcaaaataccggcagcgcattaagcagcatgctgatgctgtgcacctcatctcgcgggtgacatttcactataagagaagcagtctgagttactttggaggtgtctgttctcgcacaagaggagttggtgtgaatgagtatggtcttccaatggcagtggcacaagtattatcgcagagcctggctcaaaaccttggaatccaatgggaaccttctagcagaaagccaaaatgtgactgcacagaatcctggggtggctgcatcatggaggaaacaggggtgtcccattctcgaaaattttcaaagtgcagcattttggagtatagagactttttacagagaggaggtggagcctgccttttcaacaggccaacaaagctatttgagcccacggaatgtggaaatggatacgtggaagctggggaggagtgtgattgtggttttcatgtggaatgctatggattatgctgtaagaaatgttccctctccaacggggctcactgcagcgacgggccctgctgtaacaatacctcatgtctttttcagccacgagggtatgaatgccgggatgctgtgaacgagtgtgatattactgaatattgtactggagactctggtcagtgcccaccaaatcttcataagcaagacggatatgcatgcaatcaaaatcagggccgctgctacaatggcgagtgcaagaccagagacaaccagtgtcagtacatctggggaacaaaggctgcagggtctgacaagttctgctatgaaaagctgaatacagaaggcactgagaagggaaactgcgggaaggatggagaccggtggattcagtgcagcaaacatgatgtgttctgtggattcttactctgtaccaatcttactcgagctccacgtattggtcaacttcagggtgagatcattccaacttccttctaccatcaaggccgggtgattgactgcagtggtgcccatgtagttttagatgatgatacggatgtgggctatgtagaagatggaacgccatgtggcccgtctatgatgtgtttagatcggaagtgcctacaaattcaagccctaaatatgagcagctgtccactcgattccaagggtaaagtctgttcgggccatggggtgtgtagtaatgaagccacctgcatttgtgatttcacctgggcagggacagattgcagtatccgggatccagttaggaaccttcacccccccaaggatgaaggacccaaggtgaatatggccacaagcaggctaataggggccgtggccggcaccattctggccctgggggtgatttttggaggcacagggtggggaatagaaaatgtcaagaagagaaggttcgatcctactcagcaaggccccatctgaatcagctgcgctggatggacaccgccttgcactgttggattctgggtatgacatactcgcagcagtgttactggaactattaagtttgtaaacaaaacctttgggtggtaatgactacggagctaaagttggggtgacaaggatggggtaaaagaaaactgtctcttttggaaataatgtcaaagaacacctttcaccacctgtcagtaaacggg

SEQ ID NO: 230 - DNA, 2988 bp, Homo sapiens
  source 1..2988: mol_type = genomic DNA
tagcccggcgctctcgccggccacacggagcggcgcccgggagctatgagccatgaagccgcccggcagcagctcgcggcagccgcccctggcgggctgcagccttgccggcgcttcctgcggcccccaacgcggccccgccggctcggtgcctgccagcgccccggcccgcacgccgccctgccgcctgcttctcgtccttctcctgctgcctccgctcgccgcctcgtcccggccccgcgcctggggggctgctgcgcccagcgctccgcattggaatgaaactgcagaaaaaaatttgggagtcctggcagatgaagacaatacattgcaacagaatagcagcagtaatatcagttacagcaatgcaatgcagaaagaaatcacactgccttcaagactcatatattacatcaaccaagactcggaaagcccttatcacgttcttgacacaaaggcaagacaccagcaaaaacataataaggctgtccatctggcccaggcaagcttccagattgaagccttcggctccaaattcattcttgacctcatactgaacaatggtttgttgtcttctgattatgtggagattcactacgaaaatgggaaaccacagtactctaagggtggagagcactgttactaccatggaagcatcagaggcgtcaaagactccaaggtggctctgtcaacctgcaatggacttcatggcatgtttgaagatgataccttcgtgtatatgatagagccactagagctggttcatgatgagaaaagcacaggtcgaccacatataatccagaaaaccttggcaggacagtattctaagcaaatgaagaatctcactatggaaagaggtgaccagtggccctttctctctgaattacagtggttgaaaagaaggaagagagcagtgaatccatcacgtggtatatttgaagaaatgaaatatttggaacttatgattgttaatgatcacaaaacgtataagaagcatcgctcttctcatgcacataccaacaactttgcaaagtccgtggtcaaccttgtggattctatttacaaggagcagctcaacaccagggttgtcctggtggctgtagagacctggactgagaaggatcagattgacatcaccaccaaccctgtgcagatgctccatgagttctcaaaataccggcagcgcattaagcagcatgctgatgctgtgcacctcatctcgcgggtgacatttcactataagagaagcagtctgagttactttggaggtgtctgttctcgcacaagaggagttggtgtgaatgagtatggtcttccaatggcagtggcacaagtattatcgcagagcctggctcaaaaccttggaatccaatgggaaccttctagcagaaagccaaaatgtgactgcacagaatcctggggtggctgcatcatggaggaaacaggggtgtcccattctcgaaaattttcaaagtgcagcattttggagtatagagactttttacagagaggaggtggagcctgccttttcaacaggccaacaaagctatttgagcccacggaatgtggaaatggatacgtggaagctggggaggagtgtgattgtggttttcatgtggaatgctatggattatgctgtaagaaatgttccctctccaacggggctcactgcagcgacgggccctgctgtaacaatacctcatgtctttttcagccacgagggtatgaatgccgggatgctgtgaacgagtgtgatattactgaatattgtactggagactctggtcagtgcccaccaaatcttcataagcaagacggatatgcatgcaatcaaaatcagggccgctgctacaatggcgagtgcaagaccagagacaaccagtgtcagtacatctggggaacaaaggctgcagggtctgacaagttctgctatgaaaagctgaatacagaaggcactgagaagggaaactgcgggaaggatggagaccggtggattcagtgcagcaaacatgatgtgttctgtggattcttactctgtaccaatcttactcgagctccacgtattggtcaacttcagggtgagatcattccaacttccttctaccatcaaggccgggtgattgactgcagtggtgcccatgtagttttagatgatgatacggatgtgggctatgtagaagatggaacgccatgtggcccgtctatgatgtgtttagatcggaagtgcctacaaattcaagccctaaatatgagcagctgtccactcgattccaagggtaaagtctgttcgggccatggggtgtgtagtaatgaagccacctgcatttgtgatttcacctgggcagggacagattgcagtatccgggatccagttaggaaccttcacccccccaaggatgaaggacccaaggaaatgtcaagaagagaaggttcgatcctactcagcaaggccccatctgaatcagctgcgctggatggacaccgccttgcactgttggattctgggtatgacatactcgcagcagtgttactggaactattaagtttgtaaacaaaacctttgggtggtaatgactacggagctaaagttggggtgacaaggatggggtaaaagaaaactgtctcttttggaaataatgtcaaagaacacctttcaccacctgtcagtaaacgggggagggggcaaaagaccatgctataaaaagaactgttccagaatcttttttttccctaatggacgaaggaacaacacacacacaaaaattaaatgcaataaaggaatcattaaaaaaaatagtaaatgattttttttccctcagcctgctggcacttaatatcttctaaatgatttggcatgatttttttttctttactaccgatgacaaactccagtggcatgaagatctaattttcaaaagggtaaaaactgcatggcatatatacaacaagctagcaagccaattctcagcaaaacctgcaacagaattc

SEQ ID NO: 231 - DNA, 2486 bp, Homo sapiens
  source 1..2486: mol_type = genomic DNA
acacggagcggcgcccgggagctatgagccatgaagccgcccggcagcagctcgcggcagccgcccctggcgggctgcagccttgccggcgcttcctgcggcccccaacgcggccccgccggctcggtgcctgccagcgccccgcagctccgcattggaatgaaactgcagaaaaaaatttgggagtcctggcagatgaagacaatacattgcaacagaatagcagcagtaatatcagttacagcaatgcaatgcagaaagaaatcacactgccttcaagactcatatattacatcaaccaagactcggaaagcccttatcacgttcttgacacaaaggcaagacaccagcaaaaacataataaggctgtccatctggcccaggcaagcttccagattgaagccttcggctccaaattcattcttgacctcatactgaacaatggtttgttgtcttctgattatgtggagattcactacgaaaatgggaaaccacagtactctaagggtggagagcactgttactaccatggaagcatcagaggcgtcaaagactccaaggtggctctgtcaacctgcaatggacttcatggcatgtttgaagatgataccttcgtgtatatgatagagccactagagctggttcatgatgagaaaagcacaggtcgaccacatataatccagaaaaccttggcaggacagtattctaagcaaatgaagaatctcactatggaaagaggtgaccagtggccctttctctctgaattacagtggttgaaaagaaggaagagagcagtgaatccatcacgtggtatatttgaagaaatgaaatatttggaacttatgattgttaatgatcacaaaacgtataagaagcatcgctcttctcatgcacataccaacaactttgcaaagtccgtggtcaaccttgtggattctatttacaaggagcagctcaacaccagggttgtcctggtggctgtagagacctggactgagaaggatcagattgacatcaccaccaaccctgtgcagatgctccatgagttctcaaaataccggcagcgcattaagcagcatgctgatgctgtgcacctcatctcgcgggtgacatttcactataagagaagcagtctgagttactttggaggtgtctgttctcgcacaagaggagttggtgtgaatgagtatggtcttccaatggcagtggcacaagtattatcgcagagcctggctcaaaaccttggaatccaatgggaaccttctagcagaaagccaaaatgtgactgcacagaatcctggggtggctgcatcatggaggaaacaggggtgtcccattctcgaaaattttcaaagtgcagcattttggagtatagagactttttacagagaggaggtggagcctgccttttcaacaggccaacaaagctatttgagcccacggaatgtggaaatggatacgtggaagctggggaggagtgtgattgtggttttcatgtggaatgctatggattatgctgtaagaaatgttccctctccaacggggctcactgcagcgacgggccctgctgtaacaatacctcatgtctttttcagccacgagggtatgaatgccgggatgctgtgaacgagtgtgatattactgaatattgtactggagactctggtcagtgcccaccaaatcttcataagcaagacggatatgcatgcaatcaaaatcagggccgctgctacaatggcgagtgcaagaccagagacaaccagtgtcagtacatctggggaacaaaggctgcagggtctgacaagttctgctatgaaaagctgaatacagaaggcactgagaagggaaactgcgggaaggatggagaccggtggattcagtgcagcaaacatgatgtgttctgtggattcttactctgtaccaatcttactcgagctccacgtattggtcaacttcagggtgagatcattccaacttccttctaccatcaaggccgggtgattgactgcagtggtgcccatgtagttttagatgatgatacggatgtgggctatgtagaagatggaacgccatgtggcccgtctatgatgtgtttagatcggaagtgcctacaaattcaagccctaaatatgagcagctgtccactcgattccaaggatgaaggacccaaggcctgttttctgaagcggacgaagtgcaaatcatatccaaagcatagaaaatgtcaagaagagaaggttcgatcctactcagcaaggccccatctgaatcagctgcgctggatggacaccgccttgcactgttggattctgggtatgacatactcgcagcagtgttactggaactattaagtttgtaaacaaaacctttgggtggtaatgactacggagctaaagttggggtgacaaggatggggtaaaagaaaactgtctcttttggaaataatgtcaaagaacacctttcaccacctgtcagtaaacggggga

SEQ ID NO: 232 - DNA, 460 bp, Homo sapiens
  source 1..460: mol_type = genomic DNA
tacaaattcaagccctaaatatgagcagctgtccactcgattccaagggtaaagtctgttcgggccatggggtgtgtagtaatgaagccacctgcatttgtgatttcacctgggcagggacagattgcagtatccgggatccagttaggaaccttcacccccccaaggatgaaggacccaaggaaatgtcaagaagagaaggttcgatcctactcagcaaggccccatctgaatcagctgcgctggatggacaccgccttgcactgttggattctgggtatgacatactcgcagcagtgttactggaactattaagtttgtaaacaaaacctttgggtggtaatgactacggagctaaagttggggtgacaaggatggggtaaaagaaaactgtctcttttggaaataatgtcaaagaacacctttcaccacctgtcagtaaacgggggagggggcaaaa

SEQ ID NO: 233 - DNA, 10701 bp, Homo sapiens
  source 1..10701: mol_type = genomic DNA
ggagacagaatggaggtgctgccggactcggaaatggggtccaagggtagccaaggatggctgcagcttcatatgatcagttgttaaagcaagttgaggcactgaagatggagaactcaaatcttcgacaagagctagaagataattccaatcatcttacaaaactggaaactgaggcatctaatatgaaggaagtacttaaacaactacaaggaagtattgaagatgaagctatggcttcttctggacagattgatttattagagcgtcttaaagagcttaacttagatagcagtaatttccctggagtaaaactgcggtcaaaaatgtccctccgttcttatggaagccgggaaggatctgtatcaagccgttctggagagtgcagtcctgttcctatgggttcatttccaagaagagggtttgtaaatggaagcagagaaagtactggatatttagaagaacttgagaaagagaggtcattgcttcttgctgatcttgacaaagaagaaaaggaaaaagactggtattacgctcaacttcagaatctcactaaaagaatagatagtcttcctttaactgaaaatttttccttacaaacagatatgaccagaaggcaattggaatatgaagcaaggcaaatcagagttgcgatggaagaacaactaggtacctgccaggatatggaaaaacgagcacagcgaagaatagccagaattcagcaaatcgaaaaggacatacttcgtatacgacagcttttacagtcccaagcaacagaagcagagaggtcatctcagaacaagcatgaaaccggctcacatgatgctgagcggcagaatgaaggtcaaggagtgggagaaatcaacatggcaacttctggtaatggtcagggttcaactacacgaatggaccatgaaacagccagtgttttgagttctagtagcacacactctgcacctcgaaggctgacaagtcatctgggaaccaaggtggaaatggtgtattcattgttgtcaatgcttggtactcatgataaggatgatatgtcgcgaactttgctagctatgtctagctcccaagacagctgtatatccatgcgacagtctggatgtcttcctctcctcatccagcttttacatggcaatgacaaagactctgtattgttgggaaattcccggggcagtaaagaggctcgggccagggccagtgcagcactccacaacatcattcactcacagcctgatgacaagagaggcaggcgtgaaatccgagtccttcatcttttggaacagatacgcgcttactgtgaaacctgttgggagtggcaggaagctcatgaaccaggcatggaccaggacaaaaatccaatgccagctcctgttgaacatcagatctgtcctgctgtgtgtgttctaatgaaactttcatttgatgaagagcatagacatgcaatgaatgaactagggggactacaggccattgcagaattattgcaagtggactgtgaaatgtatgggcttactaatgaccactacagtattacactaagacgatatgctggaatggctttgacaaacttgacttttggagatgtagccaacaaggctacgctatgctctatgaaaggctgcatgagagcacttgtggcccaactaaaatctgaaagtgaagacttacagcaggttattgcgagtgttttgaggaatttgtcttggcgagcagatgtaaatagtaaaaagacgttgcgagaagttggaagtgtgaaagcattgatggaatgtgctttagaagttaaaaaggaatcaaccctcaaaagcgtattgagtgccttatggaatttgtcagcacattgcactgagaataaagctgatatatgtgctgtagatggtgcacttgcatttttggttggcactcttacttaccggagccagacaaacactttagccattattgaaagtggaggtgggatattacggaatgtgtccagcttgatagctacaaatgaggaccacaggcaaatcctaagagagaacaactgtctacaaactttattacaacacttaaaatctcatagtttgacaatagtcagtaatgcatgtggaactttgtggaatctctcagcaagaaatcctaaagaccaggaagcattatgggacatgggggcagttagcatgctcaagaacctcattcattcaaagcacaaaatgattgctatgggaagtgctgcagctttaaggaatctcatggcaaataggcctgcgaagtacaaggatgccaatattatgtctcctggctcaagcttgccatctcttcatgttaggaaacaaaaagccctagaagcagaattagatgctcagcacttatcagaaacttttgacaatatagacaatttaagtcccaaggcatctcatcgtagtaagcagagacacaagcaaagtctctatggtgattatgtttttgacaccaatcgacatgatgataataggtcagacaattttaatactggcaacatgactgtcctttcaccatatttgaatactacagtgttacccagctcctcttcatcaagaggaagcttagatagttctcgttctgaaaaagatagaagtttggagagagaacgcggaattggtctaggcaactaccatccagcaacagaaaatccaggaacttcttcaaagcgaggtttgcagatctccaccactgcagcccagattgccaaagtcatggaagaagtgtcagccattcatacctctcaggaagacagaagttctgggtctaccactgaattacattgtgtgacagatgagagaaatgcacttagaagaagctctgctgcccatacacattcaaacacttacaatttcactaagtcggaaaattcaaataggacatgttctatgccttatgccaaattagaatacaagagatcttcaaatgatagtttaaatagtgtcagtagtagtgatggttatggtaaaagaggtcaaatgaaaccctcgattgaatcctattctgaagatgatgaaagtaagttttgcagttatggtcaatacccagccgacctagcccataaaatacatagtgcaaatcatatggatgataatgatggagaactagatacaccaataaattatagtcttaaatattcagatgagcagttgaactctggaaggcaaagtccttcacagaatgaaagatgggcaagacccaaacacataatagaagatgaaataaaacaaagtgagcaaagacaatcaaggaatcaaagtacaacttatcctgtttatactgagagcactgatgataaacacctcaagttccaaccacattttggacagcaggaatgtgtttctccatacaggtcacggggagccaatggttcagaaacaaatcgagtgggttctaatcatggaattaatcaaaatgtaagccagtctttgtgtcaagaagatgactatgaagatgataagcctaccaattatagtgaacgttactctgaagaagaacagcatgaagaagaagagagaccaacaaattatagcataaaatataatgaagagaaacgtcatgtggatcagcctattgattatagtttaaaatatgccacagatattccttcatcacagaaacagtcattttcattctcaaagagttcatctggacaaagcagtaaaaccgaacatatgtcttcaagcagtgagaatacgtccacaccttcatctaatgccaagaggcagaatcagctccatccaagttctgcacagagtagaagtggtcagcctcaaaaggctgccacttgcaaagtttcttctattaaccaagaaacaatacagacttattgtgtagaagatactccaatatgtttttcaagatgtagttcattatcatctttgtcatcagctgaagatgaaataggatgtaatcagacgacacaggaagcagattctgctaataccctgcaaatagcagaaataaaagaaaagattggaactaggtcagctgaagatcctgtgagcgaagttccagcagtgtcacagcaccctagaaccaaatccagcagactgcagggttctagtttatcttcagaatcagccaggcacaaagctgttgaattttcttcaggagcgaaatctccctccaaaagtggtgctcagacacccaaaagtccacctgaacactatgttcaggagaccccactcatgtttagcagatgtacttctgtcagttcacttgatagttttgagagtcgttcgattgccagctccgttcagagtgaaccatgcagtggaatggtaagtggcattataagccccagtgatcttccagatagccctggacaaaccatgccaccaagcagaagtaaaacacctccaccacctcctcaaacagctcaaaccaagcgagaagtacctaaaaataaagcacctactgctgaaaagagagagagtggacctaagcaagctgcagtaaatgctgcagttcagagggtccaggttcttccagatgctgatactttattacattttgccacggaaagtactccagatggattttcttgttcatccagcctgagtgctctgagcctcgatgagccatttatacagaaagatgtggaattaagaataatgcctccagttcaggaaaatgacaatgggaatgaaacagaatcagagcagcctaaagaatcaaatgaaaaccaagagaaagaggcagaaaaaactattgattctgaaaaggacctattagatgattcagatgatgatgatattgaaatactagaagaatgtattatttctgccatgccaacaaagtcatcacgtaaagcaaaaaagccagcccagactgcttcaaaattacctccacctgtggcaaggaaaccaagtcagctgcctgtgtacaaacttctaccatcacaaaacaggttgcaaccccaaaagcatgttagttttacaccgggggatgatatgccacgggtgtattgtgttgaagggacacctataaacttttccacagctacatctctaagtgatctaacaatcgaatcccctccaaatgagttagctgctggagaaggagttagaggaggggcacagtcaggtgaatttgaaaaacgagataccattcctacagaaggcagaagtacagatgaggctcaaggaggaaaaacctcatctgtaaccatacctgaattggatgacaataaagcagaggaaggtgatattcttgcagaatgcattaattctgctatgcccaaagggaaaagtcacaagcctttccgtgtgaaaaagataatggaccaggtccagcaagcatctgcgtcttcttctgcacccaacaaaaatcagttagatggtaagaaaaagaaaccaacttcaccagtaaaacctataccacaaaatactgaatataggacacgtgtaagaaaaaatgcagactcaaaaaataatttaaatgctgagagagttttctcagacaacaaagattcaaagaaacagaatttgaaaaataattccaaggtcttcaatgataagctcccaaataatgaagatagagtcagaggaagttttgcttttgattcacctcatcattacacgcctattgaaggaactccttactgtttttcacgaaatgattctttgagttctctagattttgatgatgatgatgttgacctttccagggaaaaggctgaattaagaaaggcaaaagaaaataaggaatcagaggctaaagttaccagccacacagaactaacctccaaccaacaatcagctaataagacacaagctattgcaaagcagccaataaatcgaggtcagcctaaacccatacttcagaaacaatccacttttccccagtcatccaaagacataccagacagaggggcagcaactgatgaaaagttacagaattttgctattgaaaatactccggtttgcttttctcataattcctctctgagttctctcagtgacattgaccaagaaaacaacaataaagaaaatgaacctatcaaagagactgagccccctgactcacagggagaaccaagtaaacctcaagcatcaggctatgctcctaaatcatttcatgttgaagataccccagtttgtttctcaagaaacagttctctcagttctcttagtattgactctgaagatgacctgttgcaggaatgtataagctccgcaatgccaaaaaagaaaaagccttcaagactcaagggtgataatgaaaaacatagtcccagaaatatgggtggcatattaggtgaagatctgacacttgatttgaaagatatacagagaccagattcagaacatggtctatcccctgattcagaaaattttgattggaaagctattcaggaaggtgcaaattccatagtaagtagtttacatcaagctgctgctgctgcatgtttatctagacaagcttcgtctgattcagattccatcctttccctgaaatcaggaatctctctgggatcaccatttcatcttacacctgatcaagaagaaaaaccctttacaagtaataaaggcccacgaattctaaaaccaggggagaaaagtacattggaaactaaaaagatagaatctgaaagtaaaggaatcaaaggaggaaaaaaagtttataaaagtttgattactggaaaagttcgatctaattcagaaatttcaggccaaatgaaacagccccttcaagcaaacatgccttcaatctctcgaggcaggacaatgattcatattccaggagttcgaaatagctcctcaagtacaagtcctgtttctaaaaaaggcccaccccttaagactccagcctccaaaagccctagtgaaggtcaaacagccaccacttctcctagaggagccaagccatctgtgaaatcagaattaagccctgttgccaggcagacatcccaaataggtgggtcaagtaaagcaccttctagatcaggatctagagattcgaccccttcaagacctgcccagcaaccattaagtagacctatacagtctcctggccgaaactcaatttcccctggtagaaatggaataagtcctcctaacaaattatctcaacttccaaggacatcatcccctagtactgcttcaactaagtcctcaggttctggaaaaatgtcatatacatctccaggtagacagatgagccaacagaaccttaccaaacaaacaggtttatccaagaatgccagtagtattccaagaagtgagtctgcctccaaaggactaaatcagatgaataatggtaatggagccaataaaaaggtagaactttctagaatgtcttcaactaaatcaagtggaagtgaatctgatagatcagaaagacctgtattagtacgccagtcaactttcatcaaagaagctccaagcccaaccttaagaagaaaattggaggaatctgcttcatttgaatctctttctccatcatctagaccagcttctcccactaggtcccaggcacaaactccagttttaagtccttcccttcctgatatgtctctatccacacattcgtctgttcaggctggtggatggcgaaaactcccacctaatctcagtcccactatagagtataatgatggaagaccagcaaagcgccatgatattgcacggtctcattctgaaagtccttctagacttccaatcaataggtcaggaacctggaaacgtgagcacagcaaacattcatcatcccttcctcgagtaagcacttggagaagaactggaagttcatcttcaattctttctgcttcatcagaatccagtgaaaaagcaaaaagtgaggatgaaaaacatgtgaactctatttcaggaaccaaacaaagtaaagaaaaccaagtatccgcaaaaggaacatggagaaaaataaaagaaaatgaattttctcccacaaatagtacttctcagaccgtttcctcaggtgctacaaatggtgctgaatcaaagactctaatttatcaaatggcacctgctgtttctaaaacagaggatgtttgggtgagaattgaggactgtcccattaacaatcctagatctggaagatctcccacaggtaatactcccccggtgattgacagtgtttcagaaaaggcaaatccaaacattaaagattcaaaagataatcaggcaaaacaaaatgtgggtaatggcagtgttcccatgcgtaccgtgggtttggaaaatcgcctgaactcctttattcaggtggatgcccctgaccaaaaaggaactgagataaaaccaggacaaaataatcctgtccctgtatcagagactaatgaaagttctatagtggaacgtaccccattcagttctagcagctcaagcaaacacagttcacctagtgggactgttgctgccagagtgactccttttaattacaacccaagccctaggaaaagcagcgcagatagcacttcagctcggccatctcagatcccaactccagtgaataacaacacaaagaagcgagattccaaaactgacagcacagaatccagtggaacccaaagtcctaagcgccattctgggtcttaccttgtgacatctgtttaaaagagaggaagaatgaaactaagaaaattctatgttaattacaactgctatatagacattttgtttcaaatgaaactttaaaagactgaaaaattttgtaaataggtttgattcttgttagagggtttttgttctggaagccatatttgatagtatactttgtcttcactggtcttattttgggaggcactcttgatggttaggaaaaaaatagtaaagccaagtatgtttgtacagtatgttttacatgtatttaaagtagcatcccatcccaacttcctttaattattgcttgtcttaaaataatgaacactacagatagaaaatatgatatattgctgttatcaatcatttctagattataaactgactaaacttacatcagggaaaaattggtatttatgcaaaaaaaaatgtttttgtccttgtgagtccatctaacatcataattaatcatgtggctgtgaaattcacagtaatatggttcccgatgaacaagtttacccagcctgctttgctttactgcatgaatgaaactgatggttcaatttcagaagtaatgattaacagttatgtggtcacatgatgtgcatagagatagctacagtgtaataatttacactattttgtgctccaaacaaaacaaaaatctgtgtaactgtaaaacattgaatgaaactattttacctgaactagattttatctgaaagtaggtagaatttttgctatgctgtaatttgttgtatattctggtatttgaggtgagatggctgctcttttattaatgagacatgaattgtgtctcaacagaaactaaatgaacatttcagaataaattattgctgtatgtaaactgttactgaaattggtatttgtttgaagggtcttgtttcacatttgtattaataattgtttaaaatgcctcttttaaaagcttatataaatttttttcttcagcttctatgcattaagagtaaaattcctcttactgtaataaaaacaattgaagaagactgttgccacttaaccattccatgcgttggcacttatctattcctgaaatttcttttatgtgattagctcatcttgatttttaatatttttccacttaaacttttttttcttactccactggagctcagtaaaagtaaattcatgtaatagcaatgcaagcagcctagcacagactaagcattgagcataataggcccacataatttcctctttcttaatattatagaattctgtacttgaaattgattcttagacattgcagtctcttcgaggctttacagtgtaaactgtcttgccccttcatcttcttgttgcaactgggtctgacatgaacactttttatcaccctgtatgttagggcaagatctcagcagtgaagtataatcagcactttgccatgctcagaaaattcaaatcacatggaactttagaggtagatttaatacgattaagatattcagaagtatattttagaatccctgcctgttaaggaaactttatttgtggtaggtacagttctggggtacatgttaagtgtccccttatacagtggagggaagtcttccttcctgaaggaaaataaactgacacttattaactaagataatttacttaatatatcttccctgatttgttttaaaagatcagagggtgactgatgatacatgcatacatatttgttgaataaatgaaaatttatttttagtgataagattcatacactctgtatttggggagggaaaacctttttaagcatggtggggcactcagataggagtgaatacacctacctggtgccttgaaaatcacatcaagtagttaattatctaccccttacctgtgtttataacttccaggtaatgagaatgattttttttaaagctaaaatgccagtaaataaaagtgctatgacttgagctaagatatttgactccaatgcctgtactgtgtctactgcaccactttgtaaacacttcaatttactatctttgaaatgattgacctttaaatttttgccaaatgttatctgaaattgtctatgaataccatctacttctgttgttttcccaggcttccataaacaatggagatacatgca

SEQ ID NO: 234 - DNA, 11025 bp, Homo sapiens
  source 1..11025: mol_type = genomic DNA
acaagatggcggagggcaagtagcaagggggcggggtgtggccgccggaagcctagccgctgctcgggggggacctgcgggctcaggcccgggagctgcggaccgaggttggctcgatgctgttcccaggtactgttgttggctgttggtgaggaaggtgaagcactcagttgccttctcgggcctcggcgccccctatgtacgcctccctgggctcgggtccggtcgcccctttgcccgcttctgtaccaccctcagttctcgggtcctggagcaccggcggcagcaggagctgcgtccggcaggagacgaagagcccgggcggcgctcgtacttctggccactgggcgagcgtctggcaggtccaagggtagccaaggatggctgcagcttcatatgatcagttgttaaagcaagttgaggcactgaagatggagaactcaaatcttcgacaagagctagaagataattccaatcatcttacaaaactggaaactgaggcatctaatatgaaggaagtacttaaacaactacaaggaagtattgaagatgaagctatggcttcttctggacagattgatttattagagcgtcttaaagagcttaacttagatagcagtaatttccctggagtaaaactgcggtcaaaaatgtccctccgttcttatggaagccgggaaggatctgtatcaagccgttctggagagtgcagtcctgttcctatgggttcatttccaagaagagggtttgtaaatggaagcagagaaagtactggatatttagaagaacttgagaaagagaggtcattgcttcttgctgatcttgacaaagaagaaaaggaaaaagactggtattacgctcaacttcagaatctcactaaaagaatagatagtcttcctttaactgaaaatttttccttacaaacagatatgaccagaaggcaattggaatatgaagcaaggcaaatcagagttgcgatggaagaacaactaggtacctgccaggatatggaaaaacgagcacagcgaagaatagccagaattcagcaaatcgaaaaggacatacttcgtatacgacagcttttacagtcccaagcaacagaagcagagaggtcatctcagaacaagcatgaaaccggctcacatgatgctgagcggcagaatgaaggtcaaggagtgggagaaatcaacatggcaacttctggtaatggtcagggttcaactacacgaatggaccatgaaacagccagtgttttgagttctagtagcacacactctgcacctcgaaggctgacaagtcatctgggaaccaaggtggaaatggtgtattcattgttgtcaatgcttggtactcatgataaggatgatatgtcgcgaactttgctagctatgtctagctcccaagacagctgtatatccatgcgacagtctggatgtcttcctctcctcatccagcttttacatggcaatgacaaagactctgtattgttgggaaattcccggggcagtaaagaggctcgggccagggccagtgcagcactccacaacatcattcactcacagcctgatgacaagagaggcaggcgtgaaatccgagtccttcatcttttggaacagatacgcgcttactgtgaaacctgttgggagtggcaggaagctcatgaaccaggcatggaccaggacaaaaatccaatgccagctcctgttgaacatcagatctgtcctgctgtgtgtgttctaatgaaactttcatttgatgaagagcatagacatgcaatgaatgaactagggggactacaggccattgcagaattattgcaagtggactgtgaaatgtatgggcttactaatgaccactacagtattacactaagacgatatgctggaatggctttgacaaacttgacttttggagatgtagccaacaaggctacgctatgctctatgaaaggctgcatgagagcacttgtggcccaactaaaatctgaaagtgaagacttacagcaggttattgcgagtgttttgaggaatttgtcttggcgagcagatgtaaatagtaaaaagacgttgcgagaagttggaagtgtgaaagcattgatggaatgtgctttagaagttaaaaaggaatcaaccctcaaaagcgtattgagtgccttatggaatttgtcagcacattgcactgagaataaagctgatatatgtgctgtagatggtgcacttgcatttttggttggcactcttacttaccggagccagacaaacactttagccattattgaaagtggaggtgggatattacggaatgtgtccagcttgatagctacaaatgaggaccacaggcaaatcctaagagagaacaactgtctacaaactttattacaacacttaaaatctcatagtttgacaatagtcagtaatgcatgtggaactttgtggaatctctcagcaagaaatcctaaagaccaggaagcattatgggacatgggggcagttagcatgctcaagaacctcattcattcaaagcacaaaatgattgctatgggaagtgctgcagctttaaggaatctcatggcaaataggcctgcgaagtacaaggatgccaatattatgtctcctggctcaagcttgccatctcttcatgttaggaaacaaaaagccctagaagcagaattagatgctcagcacttatcagaaacttttgacaatatagacaatttaagtcccaaggcatctcatcgtagtaagcagagacacaagcaaagtctctatggtgattatgtttttgacaccaatcgacatgatgataataggtcagacaattttaatactggcaacatgactgtcctttcaccatatttgaatactacagtgttacccagctcctcttcatcaagaggaagcttagatagttctcgttctgaaaaagatagaagtttggagagagaacgcggaattggtctaggcaactaccatccagcaacagaaaatccaggaacttcttcaaagcgaggtttgcagatctccaccactgcagcccagattgccaaagtcatggaagaagtgtcagccattcatacctctcaggaagacagaagttctgggtctaccactgaattacattgtgtgacagatgagagaaatgcacttagaagaagctctgctgcccatacacattcaaacacttacaatttcactaagtcggaaaattcaaataggacatgttctatgccttatgccaaattagaatacaagagatcttcaaatgatagtttaaatagtgtcagtagtagtgatggttatggtaaaagaggtcaaatgaaaccctcgattgaatcctattctgaagatgatgaaagtaagttttgcagttatggtcaatacccagccgacctagcccataaaatacatagtgcaaatcatatggatgataatgatggagaactagatacaccaataaattatagtcttaaatattcagatgagcagttgaactctggaaggcaaagtccttcacagaatgaaagatgggcaagacccaaacacataatagaagatgaaataaaacaaagtgagcaaagacaatcaaggaatcaaagtacaacttatcctgtttatactgagagcactgatgataaacacctcaagttccaaccacattttggacagcaggaatgtgtttctccatacaggtcacggggagccaatggttcagaaacaaatcgagtgggttctaatcatggaattaatcaaaatgtaagccagtctttgtgtcaagaagatgactatgaagatgataagcctaccaattatagtgaacgttactctgaagaagaacagcatgaagaagaagagagaccaacaaattatagcataaaatataatgaagagaaacgtcatgtggatcagcctattgattatagtttaaaatatgccacagatattccttcatcacagaaacagtcattttcattctcaaagagttcatctggacaaagcagtaaaaccgaacatatgtcttcaagcagtgagaatacgtccacaccttcatctaatgccaagaggcagaatcagctccatccaagttctgcacagagtagaagtggtcagcctcaaaaggctgccacttgcaaagtttcttctattaaccaagaaacaatacagacttattgtgtagaagatactccaatatgtttttcaagatgtagttcattatcatctttgtcatcagctgaagatgaaataggatgtaatcagacgacacaggaagcagattctgctaataccctgcaaatagcagaaataaaagaaaagattggaactaggtcagctgaagatcctgtgagcgaagttccagcagtgtcacagcaccctagaaccaaatccagcagactgcagggttctagtttatcttcagaatcagccaggcacaaagctgttgaattttcttcaggagcgaaatctccctccaaaagtggtgctcagacacccaaaagtccacctgaacactatgttcaggagaccccactcatgtttagcagatgtacttctgtcagttcacttgatagttttgagagtcgttcgattgccagctccgttcagagtgaaccatgcagtggaatggtaagtggcattataagccccagtgatcttccagatagccctggacaaaccatgccaccaagcagaagtaaaacacctccaccacctcctcaaacagctcaaaccaagcgagaagtacctaaaaataaagcacctactgctgaaaagagagagagtggacctaagcaagctgcagtaaatgctgcagttcagagggtccaggttcttccagatgctgatactttattacattttgccacggaaagtactccagatggattttcttgttcatccagcctgagtgctctgagcctcgatgagccatttatacagaaagatgtggaattaagaataatgcctccagttcaggaaaatgacaatgggaatgaaacagaatcagagcagcctaaagaatcaaatgaaaaccaagagaaagaggcagaaaaaactattgattctgaaaaggacctattagatgattcagatgatgatgatattgaaatactagaagaatgtattatttctgccatgccaacaaagtcatcacgtaaagcaaaaaagccagcccagactgcttcaaaattacctccacctgtggcaaggaaaccaagtcagctgcctgtgtacaaacttctaccatcacaaaacaggttgcaaccccaaaagcatgttagttttacaccgggggatgatatgccacgggtgtattgtgttgaagggacacctataaacttttccacagctacatctctaagtgatctaacaatcgaatcccctccaaatgagttagctgctggagaaggagttagaggaggggcacagtcaggtgaatttgaaaaacgagataccattcctacagaaggcagaagtacagatgaggctcaaggaggaaaaacctcatctgtaaccatacctgaattggatgacaataaagcagaggaaggtgatattcttgcagaatgcattaattctgctatgcccaaagggaaaagtcacaagcctttccgtgtgaaaaagataatggaccaggtccagcaagcatctgcgtcttcttctgcacccaacaaaaatcagttagatggtaagaaaaagaaaccaacttcaccagtaaaacctataccacaaaatactgaatataggacacgtgtaagaaaaaatgcagactcaaaaaataatttaaatgctgagagagttttctcagacaacaaagattcaaagaaacagaatttgaaaaataattccaaggtcttcaatgataagctcccaaataatgaagatagagtcagaggaagttttgcttttgattcacctcatcattacacgcctattgaaggaactccttactgtttttcacgaaatgattctttgagttctctagattttgatgatgatgatgttgacctttccagggaaaaggctgaattaagaaaggcaaaagaaaataaggaatcagaggctaaagttaccagccacacagaactaacctccaaccaacaatcagctaataagacacaagctattgcaaagcagccaataaatcgaggtcagcctaaacccatacttcagaaacaatccacttttccccagtcatccaaagacataccagacagaggggcagcaactgatgaaaagttacagaattttgctattgaaaatactccggtttgcttttctcataattcctctctgagttctctcagtgacattgaccaagaaaacaacaataaagaaaatgaacctatcaaagagactgagccccctgactcacagggagaaccaagtaaacctcaagcatcaggctatgctcctaaatcatttcatgttgaagataccccagtttgtttctcaagaaacagttctctcagttctcttagtattgactctgaagatgacctgttgcaggaatgtataagctccgcaatgccaaaaaagaaaaagccttcaagactcaagggtgataatgaaaaacatagtcccagaaatatgggtggcatattaggtgaagatctgacacttgatttgaaagatatacagagaccagattcagaacatggtctatcccctgattcagaaaattttgattggaaagctattcaggaaggtgcaaattccatagtaagtagtttacatcaagctgctgctgctgcatgtttatctagacaagcttcgtctgattcagattccatcctttccctgaaatcaggaatctctctgggatcaccatttcatcttacacctgatcaagaagaaaaaccctttacaagtaataaaggcccacgaattctaaaaccaggggagaaaagtacattggaaactaaaaagatagaatctgaaagtaaaggaatcaaaggaggaaaaaaagtttataaaagtttgattactggaaaagttcgatctaattcagaaatttcaggccaaatgaaacagccccttcaagcaaacatgccttcaatctctcgaggcaggacaatgattcatattccaggagttcgaaatagctcctcaagtacaagtcctgtttctaaaaaaggcccaccccttaagactccagcctccaaaagccctagtgaaggtcaaacagccaccacttctcctagaggagccaagccatctgtgaaatcagaattaagccctgttgccaggcagacatcccaaataggtgggtcaagtaaagcaccttctagatcaggatctagagattcgaccccttcaagacctgcccagcaaccattaagtagacctatacagtctcctggccgaaactcaatttcccctggtagaaatggaataagtcctcctaacaaattatctcaacttccaaggacatcatcccctagtactgcttcaactaagtcctcaggttctggaaaaatgtcatatacatctccaggtagacagatgagccaacagaaccttaccaaacaaacaggtttatccaagaatgccagtagtattccaagaagtgagtctgcctccaaaggactaaatcagatgaataatggtaatggagccaataaaaaggtagaactttctagaatgtcttcaactaaatcaagtggaagtgaatctgatagatcagaaagacctgtattagtacgccagtcaactttcatcaaagaagctccaagcccaaccttaagaagaaaattggaggaatctgcttcatttgaatctctttctccatcatctagaccagcttctcccactaggtcccaggcacaaactccagttttaagtccttcccttcctgatatgtctctatccacacattcgtctgttcaggctggtggatggcgaaaactcccacctaatctcagtcccactatagagtataatgatggaagaccagcaaagcgccatgatattgcacggtctcattctgaaagtccttctagacttccaatcaataggtcaggaacctggaaacgtgagcacagcaaacattcatcatcccttcctcgagtaagcacttggagaagaactggaagttcatcttcaattctttctgcttcatcagaatccagtgaaaaagcaaaaagtgaggatgaaaaacatgtgaactctatttcaggaaccaaacaaagtaaagaaaaccaagtatccgcaaaaggaacatggagaaaaataaaagaaaatgaattttctcccacaaatagtacttctcagaccgtttcctcaggtgctacaaatggtgctgaatcaaagactctaatttatcaaatggcacctgctgtttctaaaacagaggatgtttgggtgagaattgaggactgtcccattaacaatcctagatctggaagatctcccacaggtaatactcccccggtgattgacagtgtttcagaaaaggcaaatccaaacattaaagattcaaaagataatcaggcaaaacaaaatgtgggtaatggcagtgttcccatgcgtaccgtgggtttggaaaatcgcctgaactcctttattcaggtggatgcccctgaccaaaaaggaactgagataaaaccaggacaaaataatcctgtccctgtatcagagactaatgaaagttctatagtggaacgtaccccattcagttctagcagctcaagcaaacacagttcacctagtgggactgttgctgccagagtgactccttttaattacaacccaagccctaggaaaagcagcgcagatagcacttcagctcggccatctcagatcccaactccagtgaataacaacacaaagaagcgagattccaaaactgacagcacagaatccagtggaacccaaagtcctaagcgccattctgggtcttaccttgtgacatctgtttaaaagagaggaagaatgaaactaagaaaattctatgttaattacaactgctatatagacattttgtttcaaatgaaactttaaaagactgaaaaattttgtaaataggtttgattcttgttagagggtttttgttctggaagccatatttgatagtatactttgtcttcactggtcttattttgggaggcactcttgatggttaggaaaaaaatagtaaagccaagtatgtttgtacagtatgttttacatgtatttaaagtagcatcccatcccaacttcctttaattattgcttgtcttaaaataatgaacactacagatagaaaatatgatatattgctgttatcaatcatttctagattataaactgactaaacttacatcagggaaaaattggtatttatgcaaaaaaaaatgtttttgtccttgtgagtccatctaacatcataattaatcatgtggctgtgaaattcacagtaatatggttcccgatgaacaagtttacccagcctgctttgctttactgcatgaatgaaactgatggttcaatttcagaagtaatgattaacagttatgtggtcacatgatgtgcatagagatagctacagtgtaataatttacactattttgtgctccaaacaaaacaaaaatctgtgtaactgtaaaacattgaatgaaactattttacctgaactagattttatctgaaagtaggtagaatttttgctatgctgtaatttgttgtatattctggtatttgaggtgagatggctgctcttttattaatgagacatgaattgtgtctcaacagaaactaaatgaacatttcagaataaattattgctgtatgtaaactgttactgaaattggtatttgtttgaagggtcttgtttcacatttgtattaataattgtttaaaatgcctcttttaaaagcttatataaatttttttcttcagcttctatgcattaagagtaaaattcctcttactgtaataaaaacaattgaagaagactgttgccacttaaccattccatgcgttggcacttatctattcctgaaatttcttttatgtgattagctcatcttgatttttaatatttttccacttaaacttttttttcttactccactggagctcagtaaaagtaaattcatgtaatagcaatgcaagcagcctagcacagactaagcattgagcataataggcccacataatttcctctttcttaatattatagaattctgtacttgaaattgattcttagacattgcagtctcttcgaggctttacagtgtaaactgtcttgccccttcatcttcttgttgcaactgggtctgacatgaacactttttatcaccctgtatgttagggcaagatctcagcagtgaagtataatcagcactttgccatgctcagaaaattcaaatcacatggaactttagaggtagatttaatacgattaagatattcagaagtatattttagaatccctgcctgttaaggaaactttatttgtggtaggtacagttctggggtacatgttaagtgtccccttatacagtggagggaagtcttccttcctgaaggaaaataaactgacacttattaactaagataatttacttaatatatcttccctgatttgttttaaaagatcagagggtgactgatgatacatgcatacatatttgttgaataaatgaaaatttatttttagtgataagattcatacactctgtatttggggagggaaaacctttttaagcatggtggggcactcagataggagtgaatacacctacctggtgccttgaaaatcacatcaagtagttaattatctaccccttacctgtgtttataacttccaggtaatgagaatgattttttttaaagctaaaatgccagtaaataaaagtgctatgacttgagctaagatatttgactccaatgcctgtactgtgtctactgcaccactttgtaaacacttcaatttactatctttgaaatgattgacctttaaatttttgccaaatgttatctgaaattgtctatgaataccatctacttctgttgttttcccaggcttccataaacaatggagatacatgca

SEQ ID NO: 235 - DNA, 10619 bp, Homo sapiens
  source 1..10619: mol_type = genomic DNA
gaatggaggtgctgccggactcggaaatggggacacatgcattggtggccaaaagagagaggagacaaaaccgctgcagatggctgatgtgaatctagtggaaagagctactggggatgagagaaagaggaggaggcaggtccaagggtagccaaggatggctgcagcttcatatgatcagttgttaaagcaagttgaggcactgaagatggagaactcaaatcttcgacaagagctagaagataattccaatcatcttacaaaactggaaactgaggcatctaatatgaaggaagtacttaaacaactacaaggaagtattgaagatgaagctatggcttcttctggacagattgatttattagagcgtcttaaagagcttaacttagatagcagtaatttccctggagtaaaactgcggtcaaaaatgtccctccgttcttatggaagccgggaaggatctgtatcaagccgttctggagagtgcagtcctgttcctatgggttcatttccaagaagagggtttgtaaatggaagcagagaaagtactggatatttagaagaacttgagaaagagaggtcattgcttcttgctgatcttgacaaagaagaaaaggaaaaagactggtattacgctcaacttcagaatctcactaaaagaatagatagtcttcctttaactgaaaatttttccttacaaacagatatgaccagaaggcaattggaatatgaagcaaggcaaatcagagttgcgatggaagaacaactaggtacctgccaggatatggaaaaacgagcacagcgaagaatagccagaattcagcaaatcgaaaaggacatacttcgtatacgacagcttttacagtcccaagcaacagaagcagagaggtcatctcagaacaagcatgaaaccggctcacatgatgctgagcggcagaatgaaggtcaaggagtgggagaaatcaacatggcaacttctggtaatggtcagggttcaactacacgaatggaccatgaaacagccagtgttttgagttctagtagcacacactctgcacctcgaaggctgacaagtcatctgggaaccaaggtggaaatggtgtattcattgttgtcaatgcttggtactcatgataaggatgatatgtcgcgaactttgctagctatgtctagctcccaagacagctgtatatccatgcgacagtctggatgtcttcctctcctcatccagcttttacatggcaatgacaaagactctgtattgttgggaaattcccggggcagtaaagaggctcgggccagggccagtgcagcactccacaacatcattcactcacagcctgatgacaagagaggcaggcgtgaaatccgagtccttcatcttttggaacagatacgcgcttactgtgaaacctgttgggagtggcaggaagctcatgaaccaggcatggaccaggacaaaaatccaatgccagctcctgttgaacatcagatctgtcctgctgtgtgtgttctaatgaaactttcatttgatgaagagcatagacatgcaatgaatgaactagggggactacaggccattgcagaattattgcaagtggactgtgaaatgtatgggcttactaatgaccactacagtattacactaagacgatatgctggaatggctttgacaaacttgacttttggagatgtagccaacaaggctacgctatgctctatgaaaggctgcatgagagcacttgtggcccaactaaaatctgaaagtgaagacttacagcaggttattgcgagtgttttgaggaatttgtcttggcgagcagatgtaaatagtaaaaagacgttgcgagaagttggaagtgtgaaagcattgatggaatgtgctttagaagttaaaaaggaatcaaccctcaaaagcgtattgagtgccttatggaatttgtcagcacattgcactgagaataaagctgatatatgtgctgtagatggtgcacttgcatttttggttggcactcttacttaccggagccagacaaacactttagccattattgaaagtggaggtgggatattacggaatgtgtccagcttgatagctacaaatgaggaccacaggcaaatcctaagagagaacaactgtctacaaactttattacaacacttaaaatctcatagtttgacaatagtcagtaatgcatgtggaactttgtggaatctctcagcaagaaatcctaaagaccaggaagcattatgggacatgggggcagttagcatgctcaagaacctcattcattcaaagcacaaaatgattgctatgggaagtgctgcagctttaaggaatctcatggcaaataggcctgcgaagtacaaggatgccaatattatgtctcctggctcaagcttgccatctcttcatgttaggaaacaaaaagccctagaagcagaattagatgctcagcacttatcagaaacttttgacaatatagacaatttaagtcccaaggcatctcatcgtagtaagcagagacacaagcaaagtctctatggtgattatgtttttgacaccaatcgacatgatgataataggtcagacaattttaatactggcaacatgactgtcctttcaccatatttgaatactacagtgttacccagctcctcttcatcaagaggaagcttagatagttctcgttctgaaaaagatagaagtttggagagagaacgcggaattggtctaggcaactaccatccagcaacagaaaatccaggaacttcttcaaagcgaggtttgcagatctccaccactgcagcccagattgccaaagtcatggaagaagtgtcagccattcatacctctcaggaagacagaagttctgggtctaccactgaattacattgtgtgacagatgagagaaatgcacttagaagaagctctgctgcccatacacattcaaacacttacaatttcactaagtcggaaaattcaaataggacatgttctatgccttatgccaaattagaatacaagagatcttcaaatgatagtttaaatagtgtcagtagtagtgatggttatggtaaaagaggtcaaatgaaaccctcgattgaatcctattctgaagatgatgaaagtaagttttgcagttatggtcaatacccagccgacctagcccataaaatacatagtgcaaatcatatggatgataatgatggagaactagatacaccaataaattatagtcttaaatattcagatgagcagttgaactctggaaggcaaagtccttcacagaatgaaagatgggcaagacccaaacacataatagaagatgaaataaaacaaagtgagcaaagacaatcaaggaatcaaagtacaacttatcctgtttatactgagagcactgatgataaacacctcaagttccaaccacattttggacagcaggaatgtgtttctccatacaggtcacggggagccaatggttcagaaacaaatcgagtgggttctaatcatggaattaatcaaaatgtaagccagtctttgtgtcaagaagatgactatgaagatgataagcctaccaattatagtgaacgttactctgaagaagaacagcatgaagaagaagagagaccaacaaattatagcataaaatataatgaagagaaacgtcatgtggatcagcctattgattatagtttaaaatatgccacagatattccttcatcacagaaacagtcattttcattctcaaagagttcatctggacaaagcagtaaaaccgaacatatgtcttcaagcagtgagaatacgtccacaccttcatctaatgccaagaggcagaatcagctccatccaagttctgcacagagtagaagtggtcagcctcaaaaggctgccacttgcaaagtttcttctattaaccaagaaacaatacagacttattgtgtagaagatactccaatatgtttttcaagatgtagttcattatcatctttgtcatcagctgaagatgaaataggatgtaatcagacgacacaggaagcagattctgctaataccctgcaaatagcagaaataaaagaaaagattggaactaggtcagctgaagatcctgtgagcgaagttccagcagtgtcacagcaccctagaaccaaatccagcagactgcagggttctagtttatcttcagaatcagccaggcacaaagctgttgaattttcttcaggagcgaaatctccctccaaaagtggtgctcagacacccaaaagtccacctgaacactatgttcaggagaccccactcatgtttagcagatgtacttctgtcagttcacttgatagttttgagagtcgttcgattgccagctccgttcagagtgaaccatgcagtggaatggtaagtggcattataagccccagtgatcttccagatagccctggacaaaccatgccaccaagcagaagtaaaacacctccaccacctcctcaaacagctcaaaccaagcgagaagtacctaaaaataaagcacctactgctgaaaagagagagagtggacctaagcaagctgcagtaaatgctgcagttcagagggtccaggttcttccagatgctgatactttattacattttgccacggaaagtactccagatggattttcttgttcatccagcctgagtgctctgagcctcgatgagccatttatacagaaagatgtggaattaagaataatgcctccagttcaggaaaatgacaatgggaatgaaacagaatcagagcagcctaaagaatcaaatgaaaaccaagagaaagaggcagaaaaaactattgattctgaaaaggacctattagatgattcagatgatgatgatattgaaatactagaagaatgtattatttctgccatgccaacaaagtcatcacgtaaagcaaaaaagccagcccagactgcttcaaaattacctccacctgtggcaaggaaaccaagtcagctgcctgtgtacaaacttctaccatcacaaaacaggttgcaaccccaaaagcatgttagttttacaccgggggatgatatgccacgggtgtattgtgttgaagggacacctataaacttttccacagctacatctctaagtgatctaacaatcgaatcccctccaaatgagttagctgctggagaaggagttagaggaggggcacagtcaggtgaatttgaaaaacgagataccattcctacagaaggcagaagtacagatgaggctcaaggaggaaaaacctcatctgtaaccatacctgaattggatgacaataaagcagaggaaggtgatattcttgcagaatgcattaattctgctatgcccaaagggaaaagtcacaagcctttccgtgtgaaaaagataatggaccaggtccagcaagcatctgcgtcttcttctgcacccaacaaaaatcagttagatggtaagaaaaagaaaccaacttcaccagtaaaacctataccacaaaatactgaatataggacacgtgtaagaaaaaatgcagactcaaaaaataatttaaatgctgagagagttttctcagacaacaaagattcaaagaaacagaatttgaaaaataattccaaggtcttcaatgataagctcccaaataatgaagatagagtcagaggaagttttgcttttgattcacctcatcattacacgcctattgaaggaactccttactgtttttcacgaaatgattctttgagttctctagattttgatgatgatgatgttgacctttccagggaaaaggctgaattaagaaaggcaaaagaaaataaggaatcagaggctaaagttaccagccacacagaactaacctccaaccaacaatcagctaataagacacaagctattgcaaagcagccaataaatcgaggtcagcctaaacccatacttcagaaacaatccacttttccccagtcatccaaagacataccagacagaggggcagcaactgatgaaaagttacagaattttgctattgaaaatactccggtttgcttttctcataattcctctctgagttctctcagtgacattgaccaagaaaacaacaataaagaaaatgaacctatcaaagagactgagccccctgactcacagggagaaccaagtaaacctcaagcatcaggctatgctcctaaatcatttcatgttgaagataccccagtttgtttctcaagaaacagttctctcagttctcttagtattgactctgaagatgacctgttgcaggaatgtataagctccgcaatgccaaaaaagaaaaagccttcaagactcaagggtgataatgaaaaacatagtcccagaaatatgggtggcatattaggtgaagatctgacacttgatttgaaagatatacagagaccagattcagaacatggtctatcccctgattcagaaaattttgattggaaagctattcaggaaggtgcaaattccatagtaagtagtttacatcaagctgctgctgctgcatgtttatctagacaagcttcgtctgattcagattccatcctttccctgaaatcaggaatctctctgggatcaccatttcatcttacacctgatcaagaagaaaaaccctttacaagtaataaaggcccacgaattctaaaaccaggggagaaaagtacattggaaactaaaaagatagaatctgaaagtaaaggaatcaaaggaggaaaaaaagtttataaaagtttgattactggaaaagttcgatctaattcagaaatttcaggccaaatgaaacagccccttcaagcaaacatgccttcaatctctcgaggcaggacaatgattcatattccaggagttcgaaatagctcctcaagtacaagtcctgtttctaaaaaaggcccaccccttaagactccagcctccaaaagccctagtgaaggtcaaacagccaccacttctcctagaggagccaagccatctgtgaaatcagaattaagccctgttgccaggcagacatcccaaataggtgggtcaagtaaagcaccttctagatcaggatctagagattcgaccccttcaagacctgcccagcaaccattaagtagacctatacagtctcctggccgaaactcaatttcccctggtagaaatggaataagtcctcctaacaaattatctcaacttccaaggacatcatcccctagtactgcttcaactaagtcctcaggttctggaaaaatgtcatatacatctccaggtagacagatgagccaacagaaccttaccaaacaaacaggtttatccaagaatgccagtagtattccaagaagtgagtctgcctccaaaggactaaatcagatgaataatggtaatggagccaataaaaaggtagaactttctagaatgtcttcaactaaatcaagtggaagtgaatctgatagatcagaaagacctgtattagtacgccagtcaactttcatcaaagaagctccaagcccaaccttaagaagaaaattggaggaatctgcttcatttgaatctctttctccatcatctagaccagcttctcccactaggtcccaggcacaaactccagttttaagtccttcccttcctgatatgtctctatccacacattcgtctgttcaggctggtggatggcgaaaactcccacctaatctcagtcccactatagagtataatgatggaagaccagcaaagcgccatgatattgcacggtctcattctgaaagtccttctagacttccaatcaataggtcaggaacctggaaacgtgagcacagcaaacattcatcatcccttcctcgagtaagcacttggagaagaactggaagttcatcttcaattctttctgcttcatcagaatccagtgaaaaagcaaaaagtgaggatgaaaaacatgtgaactctatttcaggaaccaaacaaagtaaagaaaaccaagtatccgcaaaaggaacatggagaaaaataaaagaaaatgaattttctcccacaaatagtacttctcagaccgtttcctcaggtgctacaaatggtgctgaatcaaagactctaatttatcaaatggcacctgctgtttctaaaacagaggatgtttgggtgagaattgaggactgtcccattaacaatcctagatctggaagatctcccacaggtaatactcccccggtgattgacagtgtttcagaaaaggcaaatccaaacattaaagattcaaaagataatcaggcaaaacaaaatgtgggtaatggcagtgttcccatgcgtaccgtgggtttggaaaatcgcctgaactcctttattcaggtggatgcccctgaccaaaaaggaactgagataaaaccaggacaaaataatcctgtccctgtatcagagactaatgaaagttctatagtggaacgtaccccattcagttctagcagctcaagcaaacacagttcacctagtgggactgttgctgccagagtgactccttttaattacaacccaagccctaggaaaagcagcgcagatagcacttcagctcggccatctcagatcccaactccagtgaataacaacacaaagaagcgagattccaaaactgacagcacagaatccagtggaacccaaagtcctaagcgccattctgggtcttaccttgtgacatctgtttaaaagagaggaagaatgaaactaagaaaattctatgttaattacaactgctatatagacattttgtttcaaatgaaactttaaaagactgaaaaattttgtaaataggtttgattcttgttagagggtttttgttctggaagccatatttgatagtatactttgtcttcactggtcttattttgggaggcactcttgatggttaggaaaaaaatagtaaagccaagtatgtttgtacagtatgttttacatgtatttaaagtagcatcccatcccaacttcctttaattattgcttgtcttaaaataatgaacactacagatagaaaatatgatatattgctgttatcaatcatttctagattataaactgactaaacttacatcagggaaaaattggtatttatgcaaaaaaaaatgtttttgtccttgtgagtccatctaacatcataattaatcatgtggctgtgaaattcacagtaatatggttcccgatgaacaagtttacccagcctgctttgctttactgcatgaatgaaactgatggttcaatttcagaagtaatgattaacagttatgtggtcacatgatgtgcatagagatagctacagtgtaataatttacactattttgtgctccaaacaaaacaaaaatctgtgtaactgtaaaacattgaatgaaactattttacctgaactagattttatctgaaagtaggtagaatttttgctatgctgtaatttgttgtatattctggtatttgaggtgagatggctgctcttttattaatgagacatgaattgtgtctcaacagaaactaaatgaacatttcagaataaattattgctgtatgtaaactgttactgaaattggtatttgtttgaagggtcttgtttcacatttgtattaataattgtttaaaatgcctcttttaaaagcttatataaatttttttcttcagcttctatgcattaagagtaaaattcctcttactgtaataaaaacaattgaagaagactgttgccacttaaccattccatgcgttggcacttatctattcctgaaatttcttttatgtgattagctcatcttgatttttaatatttttccacttaaacttttttttcttactccactggagctcagtaaaagtaaattcatgtaatagcaatgcaagcagcctagcacagactaagcattgagcataataggcccacataatttcctctttcttaatattatagaattctgtacttgaaattgattcttagacattgcagtctcttcgaggctttacagtgtaaactgtcttgccccttcatcttcttgttgcaactgggtctgacatgaacactttttatcaccctgtatgttagggcaagatctcagcagtgaagtataatcagcactttgccatgctcagaaaattcaaatcacatggaactttagaggtagatttaatacgattaagatattcagaagtatattttagaatccctgcctgttaaggaaactttatttgtggtaggtacagttctggggtacatgttaagtgtccccttatacagtggagggaagtcttccttcctgaaggaaaataaactgacacttattaactaagataatttacttaatatatcttccctgatttgttttaaaagatcagagggtgactgatgatacatgcatacatatttgttgaataaatgaaaatttatttttagtgataagattcatacactctgtatttggggagggaaaacctttttaagcatggtggggcactcagataggagtgaatacacctacctggtgccttgaaaatcacatcaagtagttaattatctaccccttacctgtgtttataacttccaggtaatgagaatgattttttttaaagctaaaatgccagtaaataaaagtgctatgacttg

SEQ ID NO: 236 - DNA, 7406 bp, Homo sapiens
  source 1..7406: mol_type = genomic DNA
actggagacagaatggaggtgctgccggactcggaaatggggtccaagggtagccaaggatggctgcagcttcatatgatcagttgttaaagcaagttgaggcactgaagatggagaactcaaatcttcgacaagagctagaagataattccaatcatcttacaaaactggaaactgaggcatctaatatgaaggaagtacttaaacaactacaaggaagtattgaagatgaagctatggcttcttctggacagattgatttattagagcgtcttaaagagcttaacttagatagcagtaatttccctggagtaaaactgcggtcaaaaatgtccctccgttcttatggaagccgggaaggatctgtatcaagccgttctggagagtgcagtcctgttcctatgggttcatttccaagaagagggtttgtaaatggaagcagagaaagtactggatatttagaagaacttgagaaagagaggtcattgcttcttgctgatcttgacaaagaagaaaaggaaaaagactggtattacgctcaacttcagaatctcactaaaagaatagatagtcttcctttaactgaaaatttttccttacaaacagatatgaccagaaggcaattggaatatgaagcaaggcaaatcagagttgcgatggaagaacaactaggtacctgccaggatatggaaaaacgagcacagcgaagaatagccagaattcagcaaatcgaaaaggacatacttcgtatacgacagcttttacagtcccaagcaacagaagcagagaggtcatctcagaacaagcatgaaaccggctcacatgatgctgagcggcagaatgaaggtcaaggagtgggagaaatcaacatggcaacttctggtaatggtcagatagaaaagatgaggatgtttgaatgctgatgggaaggagccagtagagaagagagttgaagatccctaagatcaaagagaaatggagagagaaaggatccagagcacatctaaagggatggaccttagataggaggaggggaactctgatgtcacagcaaaaggtggcgatggatatatacgcagggttcaactacacgaatggaccatgaaacagccagtgttttgagttctagtagcacacactctgcacctcgaaggctgacaagtcatctgggaaccaaggtggaaatggtgtattcattgttgtcaatgcttggtactcatgataaggatgatatgtcgcgaactttgctagctatgtctagctcccaagacagctgtatatccatgcgacagtctggatgtcttcctctcctcatccagcttttacatggcaatgacaaagactctgtattgttgggaaattcccggggcagtaaagaggctcgggccagggccagtgcagcactccacaacatcattcactcacagcctgatgacaagagaggcaggcgtgaaatccgagtccttcatcttttggaacagatacgcgcttactgtgaaacctgttgggagtggcaggaagctcatgaaccaggcatggaccaggacaaaaatccaatgccagctcctgttgaacatcagatctgtcctgctgtgtgtgttctaatgaaactttcatttgatgaagagcatagacatgcaatgaatgaactagggggactacaggccattgcagaattattgcaagtggactgtgaaatgtatgggcttactaatgaccactacagtattacactaagacgatatgctggaatggctttgacaaacttgacttttggagatgtagccaacaaggctacgctatgctctatgaaaggctgcatgagagcacttgtggcccaactaaaatctgaaagtgaagacttacagcaggttattgcgagtgttttgaggaatttgtcttggcgagcagatgtaaatagtaaaaagacgttgcgagaagttggaagtgtgaaagcattgatggaatgtgctttagaagttaaaaaggaatcaaccctcaaaagcgtattgagtgccttatggaatttgtcagcacattgcactgagaataaagctgatatatgtgctgtagatggtgcacttgcatttttggttggcactcttacttaccggagccagacaaacactttagccattattgaaagtggaggtgggatattacggaatgtgtccagcttgatagctacaaatgaggaccacaggcaaatcctaagagagaacaactgtctacaaactttattacaacacttaaaatctcatagtttgacaatagtcagtaatgcatgtggaactttgtggaatctctcagcaagaaatcctaaagaccaggaagcattatgggacatgggggcagttagcatgctcaagaacctcattcattcaaagcacaaaatgattgctatgggaagtgctgcagctttaaggaatctcatggcaaataggcctgcgaagtacaaggatgccaatattatgtctcctggctcaagcttgccatctcttcatgttaggaaacaaaaagccctagaagcagaattagatgctcagcacttatcagaaacttttgacaatatagacaatttaagtcccaaggcatctcatcgtagtaagcagagacacaagcaaagtctctatggtgattatgtttttgacaccaatcgacatgatgataataggtcagacaattttaatactggcaacatgactgtcctttcaccatatttgaatactacagtgttacccagctcctcttcatcaagaggaagcttagatagttctcgttctgaaaaagatagaagtttggagagagaacgcggaattggtctaggcaactaccatccagcaacagaaaatccaggaacttcttcaaagcgaggtttgcagatctccaccactgcagcccagattgccaaagtcatggaagaagtgtcagccattcatacctctcaggaagacagaagttctgggtctaccactgaattacattgtgtgacagatgagagaaatgcacttagaagaagctctgctgcccatacacattcaaacacttacaatttcactaagtcggaaaattcaaataggacatgttctatgccttatgccaaattagaatacaagagatcttcaaatgatagtttaaatagtgtcagtagtagtgatggttatggtaaaagaggtcaaatgaaaccctcgattgaatcctattctgaagatgatgaaagtaagttttgcagttatggtcaatacccagccgacctagcccataaaatacatagtgcaaatcatatggatgataatgatggagaactagatacaccaataaattatagtcttaaatattcagatgagcagttgaactctggaaggcaaagtccttcacagaatgaaagatgggcaagacccaaacacataatagaagatgaaataaaacaaagtgagcaaagacaatcaaggaatcaaagtacaacttatcctgtttatactgagagcactgatgataaacacctcaagttccaaccacattttggacagcaggaatgtgtttctccatacaggtcacggggagccaatggttcagaaacaaatcgagtgggttctaatcatggaattaatcaaaatgtaagccagtctttgtgtcaagaagatgactatgaagatgataagcctaccaattatagtgaacgttactctgaagaagaacagcatgaagaagaagagagaccaacaaattatagcataaaatataatgaagagaaacgtcatgtggatcagcctattgattatagtttaaaatatgccacagatattccttcatcacagaaacagtcattttcattctcaaagagttcatctggacaaagcagtaaaaccgaacatatgtcttcaagcagtgagaatacgtccacaccttcatctaatgccaagaggcagaatcagctccatccaagttctgcacagagtagaagtggtcagcctcaaaaggctgccacttgcaaagtttcttctattaaccaagaaacaatacagacttattgtgtagaagatactccaatatgtttttcaagatgtagttcattatcatctttgtcatcagctgaagatgaaataggatgtaatcagacgacacaggaagcagattctgctaataccctgcaaatagcagaaataaaagaaaagattggaactaggtcagctgaagatcctgtgagcgaagttccagcagtgtcacagcaccctagaaccaaatccagcagactgcagggttctagtttatcttcagaatcagccaggcacaaagctgttgaattttcttcaggagcgaaatctccctccaaaagtggtgctcagacacccaaaagtccacctgaacactatgttcaggagaccccactcatgtttagcagatgtacttctgtcagttcacttgatagttttgagagtcgttcgattgccagctccgttcagagtgaaccatgcagtggaatggtaagtggcattataagccccagtgatcttccagatagccctggacaaaccatgccaccaagcagaagtaaaacacctccaccacctcctcaaacagctcaaaccaagcgagaagtacctaaaaataaagcacctactgctgaaaagagagagagtggacctaagcaagctgcagtaaatgctgcagttcagagggtccaggttcttccagatgctgatactttattacattttgccacggaaagtactccagatggattttcttgttcatccagcctgagtgctctgagcctcgatgagccatttatacagaaagatgtggaattaagaataatgcctccagttcaggaaaatgacaatgggaatgaaacagaatcagagcagcctaaagaatcaaatgaaaaccaagagaaagaggcagaaaaaactattgattctgaaaaggacctattagatgattcagatgatgatgatattgaaatactagaagaatgtattatttctgccatgccaacaaagtcatcacgtaaagcaaaaaagccagcccagactgcttcaaaattacctccacctgtggcaaggaaaccaagtcagctgcctgtgtacaaacttctaccatcacaaaacaggttgcaaccccaaaagcatgttagttttacaccgggggatgatatgccacgggtgtattgtgttgaagggacacctataaacttttccacagctacatctctaagtgatctaacaatcgaatcccctccaaatgagttagctgctggagaaggagttagaggaggggcacagtcaggtgaatttgaaaaacgagataccattcctacagaaggcagaagtacagatgaggctcaaggaggaaaaacctcatctgtaaccatacctgaattggatgacaataaagcagaggaaggtgatattcttgcagaatgcattaattctgctatgcccaaagggaaaagtcacaagcctttccgtgtgaaaaagataatggaccaggtccagcaagcatctgcgtcttcttctgcacccaacaaaaatcagttagatggtaagaaaaagaaaccaacttcaccagtaaaacctataccacaaaatactgaatataggacacgtgtaagaaaaaatgcagactcaaaaaataatttaaatgctgagagagttttctcagacaacaaagattcaaagaaacagaatttgaaaaataattccaaggtcttcaatgataagctcccaaataatgaagatagagtcagaggaagttttgcttttgattcacctcatcattacacgcctattgaaggaactccttactgtttttcacgaaatgattctttgagttctctagattttgatgatgatgatgttgacctttccagggaaaaggctgaattaagaaaggcaaaagaaaataaggaatcagaggctaaagttaccagccacacagaactaacctccaaccaacaatcagctaataagacacaagctattgcaaagcagccaataaatcgaggtcagcctaaacccatacttcagaaacaatccacttttccccagtcatccaaagacataccagacagaggggcagcaactgatgaaaagttacagaattttgctattgaaaatactccggtttgcttttctcataattcctctctgagttctctcagtgacattgaccaagaaaacaacaataaagaaaatgaacctatcaaagagactgagccccctgactcacagggagaaccaagtaaacctcaagcatcaggctatgctcctaaatcatttcatgttgaagataccccagtttgtttctcaagaaacagttctctcagttctcttagtattgactctgaagatgacctgttgcaggaatgtataagctccgcaatgccaaaaaagaaaaagccttcaagactcaagggtgataatgaaaaacatagtcccagaaatatgggtggcatattaggtgaagatctgacacttgatttgaaagatatacagagaccagattcagaacatggtctatcccctgattcagaaaattttgattggaaagctattcaggaaggtgcaaattccatagtaagtagtttacatcaagctgctgctgctgcatgtttatctagacaagcttcgtctgattcagattccatcctttccctgaaatcaggaatctctctgggatcaccatttcatcttacacctgatcaagaagaaaaaccctttacaagtaataaaggcccacgaattctaaaaccaggggagaaaagtacattggaaactaaaaagatagaatctgaaagtaaaggaatcaaaggaggaaaaaaagtttataaaagtttgattactggaaaagttcgatctaattcagaaatttcaggccaaatgaaacagccccttcaagcaaacatgccttcaatctctcgaggcaggacaatgattcatattccaggagttcgaaatagctcctcaagtacaagtcctgtttctaaaaaaggcccaccccttaagactccagcctccaaaagccctagtgaaggtcaaacagccaccacttctcctagaggagccaagccatctgtgaaatcagaattaagccctgttgccaggcagacatcccaaataggtgggtcaagtaaagcaccttctagatcaggatctagagattcgaccccttcaagacctgcccagcaaccattaagtagacctatacagtctcctggccgaaactcaatttcccctggtagaaatggaataagtcctcctaacaaattatctcaacttccaaggacatcatcccctagtactgcttcaactaagtcctcaggttctggaaaaatgtcatatacatctccaggtagacagatgagccaacagaaccttaccaaacaaacaggtttatccaagaat

SEQ ID NO: 237 - DNA, 524 bp, Homo sapiens
  source 1..524: mol_type = genomic DNA
gcattgtagtcttcccacctcccacaagatggcggagggcaagtagcaagggggcggggtgtggccgccggaagcctagccgctgctcgggggggacctgcgggctcaggcccgggagctgcggaccgaggttggctcgatgctgttcccaggtccaagggtagccaaggatggctgcagcttcatatgatcagttgttaaagcaagttgaggcactgaagatggagaactcaaatcttcgacaagagctagaagataattccaatcatcttacaaaactggaaactgaggcatctaatatgaaggaagtacttaaacaactacaaggaagtattgaagatgaagctatggcttcttctggacagattgatttattagagcgtcttaaagagcttaacttagatagcagtaatttccctggagtaaaactgcggtcaaaaatgtccctccgttcttatggaagccgggaaggatctgtatcaagccgttctggagagtgcagtcctgttcctatgggttcattt

SEQ ID NO: 238 - DNA, 4061 bp, Homo sapiens
  source 1..4061: mol_type = genomic DNA
cttttcctccctggcgacaaggacacatgcattggtggccaaaagagagaggagacaaaaccgctgcagatggctgatgtgaatctagtggaaagagctactggggatgagagaaagaggaggaggcaggtccaagggtagccaaggatggctgcagcttcatatgatcagttgttaaagcaagttgaggcactgaagatggagaactcaaatcttcgacaagagctagaagataattccaatcatcttacaaaactggaaactgaggcatctaatatgaaggaagtacttaaacaactacaaggaagtattgaagatgaagctatggcttcttctggacagattgatttattagagcgtcttaaagagcttaacttagatagcagtaatttccctggagtaaaactgcggtcaaaaatgtccctccgttcttatggaagccgggaaggatctgtatcaagccgttctggagagtgcagtcctgttcctatgggttcatttccaagaagagggtttgtaaatggaagcagagaaagtactggatatttagaagaacttgagaaagagaggtcattgcttcttgctgatcttgacaaagaagaaaaggaaaaagactggtattacgctcaacttcagaatctcactaaaagaatagatagtcttcctttaactgaaaatttttccttacaaacagatatgaccagaaggcaattggaatatgaagcaaggcaaatcagagttgcgatggaagaacaactaggtacctgccaggatatggaaaaacgagcacagcgaagaatagccagaattcagcaaatcgaaaaggacatacttcgtatacgacagcttttacagtcccaagcaacagaagcagagaggtcatctcagaacaagcatgaaaccggctcacatgatgctgagcggcagaatgaaggtcaaggagtgggagaaatcaacatggcaacttctggtaatggtcagggttcaactacacgaatggaccatgaaacagccagtgttttgagttctagtagcacacactctgcacctcgaaggctgacaagtcatctgggaaccaaggtggaaatggtgtattcattgttgtcaatgcttggtactcatgataaggatgatatgtcgcgaactttgctagctatgtctagctcccaagacagctgtatatccatgcgacagtctggatgtcttcctctcctcatccagcttttacatggcaatgacaaagactctgtattgttgggaaattcccggggcagtaaagaggctcgggccagggccagtgcagcactccacaacatcattcactcacagcctgatgacaagagaggcaggcgtgaaatccgagtccttcatcttttggaacagatacgcgcttactgtgaaacctgttgggagtggcaggaagctcatgaaccaggcatggaccaggacaaaaatccaatgccagctcctgttgaacatcagatctgtcctgctgtgtgtgttctaatgaaactttcatttgatgaagagcatagacatgcaatgaatgaactagggggactacaggccattgcagaattattgcaagtggactgtgaaatgtatgggcttactaatgaccactacagtattacactaagacgatatgctggaatggctttgacaaacttgacttttggagatgtagccaacaaggctacgctatgctctatgaaaggctgcatgagagcacttgtggcccaactaaaatctgaaagtgaagacttacagcaggttattgcgagtgttttgaggaatttgtcttggcgagcagatgtaaatagtaaaaagacgttgcgagaagttggaagtgtgaaagcattgatggaatgtgctttagaagttaaaaaggaatcaaccctcaaaagcgtattgagtgccttatggaatttgtcagcacattgcactgagaataaagctgatatatgtgctgtagatggtgcacttgcatttttggttggcactcttacttaccggagccagacaaacactttagccattattgaaagtggaggtgggatattacggaatgtgtccagcttgatagctacaaatgaggaccacaggcaaatcctaagagagaacaactgtctacaaactttattacaacacttaaaatctcatagtttgacaatagtcagtaatgcatgtggaactttgtggaatctctcagcaagaaatcctaaagaccaggaagcattatgggacatgggggcagttagcatgctcaagaacctcattcattcaaagcacaaaatgattgctatgggaagtgctgcagctttaaggaatctcatggcaaataggcctgcgaagtacaaggatgccaatattatgtctcctggctcaagcttgccatctcttcatgttaggaaacaaaaagccctagaagcagaattagatgctcagcacttatcagaaacttttgacaatatagacaatttaagtcccaaggcatctcatcgtagtaagcagagacacaagcaaagtctctatggtgattatgtttttgacaccaatcgacatgatgataataggtcagacaattttaatactggcaacatgactgtcctttcaccatatttgaatactacagtgttacccagctcctcttcatcaagaggaagcttagatagttctcgttctgaaaaagatagaagtttggagagagaacgcggaattggtctaggcaactaccatccagcaacagaaaatccaggaacttcttcaaagcgaggtttgcagatctccaccactgcagcccagattgccaaagtcatggaagaagtgtcagccattcatacctctcaggaagacagaagttctgggtctaccactgaattacattgtgtgacagatgagagaaatgcacttagaagaagctctgctgcccatacacattcaaacacttacaatttcactaagtcggaaaattcaaataggacatgttctatgccttatgccaaattagaatacaagagatcttcaaatgatagtttaaatagtgtcagtagtagtgatggttatggtaaaagaggtcaaatgaaaccctcgattgaatcctattctgaagatgatgaaagtaagttttgcagttatggtcaatacccagccgacctagcccataaaatacatagtgcaaatcatatggatgataatgatggagaactagatacaccaataaattatagtcttaaatattcagatgagcagttgaactctggaaggcaaagtccttcacagaatgaaagatgggcaagacccaaacacataatagaagatgaaataaaacaaagtgagcaaagacaatcaaggaatcaaagtacaacttatcctgtttatactgagagcactgatgataaacacctcaagttccaaccacattttggacagcaggaatgtgtttctccatacaggtcacggggagccaatggttcagaaacaaatcgagtgggttctaatcatggaattaatcaaaatgtaagccagtctttgtgtcaagaagatgactatgaagatgataagcctaccaattatagtgaacgttactctgaagaagaacagcatgaagaagaagagagaccaacaaattatagcataaaatataatgaagagaaacgtcatgtggatcagcctattgattatagtttaaaatatgccacagatattccttcatcacagaaacagtcattttcattctcaaagagttcatctggacaaagcagtaaaaccgaacatatgtcttcaagcagtgagaatacgtccacaccttcatctaatgccaagaggcagaatcagctccatccaagttctgcacagagtagaagtggtcagcctcaaaaggctgccacttgcaaagtttcttctattaaccaagaaacaatacagacttattgtgtagaagatactccaatatgtttttcaagatgtagttcattatcatctttgtcatcagctgaagatgaaataggatgtaatcagacgacacaggaagcagattctgctaataccctgcaaatagc

SEQ ID NO: 239 - DNA, 6515 bp, Homo sapiens
  source 1..6515: mol_type = genomic DNA
cccgactgaaggtagagaaggctacgtggtgggggagggtggggggagggtcgcggccgcactggcagtctccgggtgtccggccgtgtcccgaggaagtgcaagacccggggtattccctcagcggatactacacccatccatttcaaggctatgagcacagacagctcaggtaccagcagcctgggccaggatcttcccccagtagtttcctgcttaagcaaatagaatttctcaaggggcagctcccagaagcaccggtgattggaaagcagacaccgtcactgccaccttccctcccaggactccggccaaggtttccagtactacttgcctccagtaccagaggcaggcaagtggacatcaggggtgtccccaggggcgtgcatctcagaagtcaggggctccagagagggttccagcatccttcaccacgtggcaggagtctgccacagagaggtgttgattgcctttcctcacatttccaggaactgagtatctaccaagatcaggaacaaaggatcttaaagttcctggaagagcttggggaagggaaggccaccacagcacatgatctgtctgggaaacttgggactccgaagaaagaaatcaatcgagttttatactccctggcaaagaagggcaagctacagaaagaggcaggaacaccccctttgtggaaaatcgcggtctccactcaggcttggaaccagcacagcggagtggtaagaccagacggtcatagccaaggagccccaaactcagacccgagtttggaaccggaagacagaaactccacatctgtctcagaagatcttcttgagccttttattgcagtctcagctcaggcttggaaccagcacagcggagtggtaagaccagacagtcatagccaaggatccccaaactcagacccaggtttggaacctgaagacagcaactccacatctgccttggaagatcctcttgagtttttagacatggccgagatcaaggagaaaatctgcgactatctcttcaatgtgtctgactcctctgccctgaatttggctaaaaatattggccttaccaaggcccgagatataaatgctgtgctaattgacatggaaaggcagggggatgtctatagacaagggacaacccctcccatatggcatttgacagacaagaagcgagagaggatgcaaatcaagagaaatacgaacagtgttcctgaaaccgctccagctgcaatccctgagaccaaaagaaacgcagagttcctcacctgtaatatacccacatcaaatgcctcaaataacatggtaaccacagaaaaagtggagaatgggcaggaacctgtcataaagttagaaaacaggcaagaggccagaccagaaccagcaagactgaaaccacctgttcattacaatggcccctcaaaagcagggtatgttgactttgaaaatggccagtgggccacagatgacatcccagatgacttgaatagtatccgcgcagcaccaggtgagtttcgagccatcatggagatgccctccttctacagtcatggcttgccacggtgttcaccctacaagaaactgacagagtgccagctgaagaaccccatcagcgggctgttagaatatgcccagttcgctagtcaaacctgtgagttcaacatgatagagcagagtggaccaccccatgaacctcgatttaaattccaggttgtcatcaatggccgagagtttcccccagctgaagctggaagcaagaaagtggccaagcaggatgcagctatgaaagccatgacaattctgctagaggaagccaaagccaaggacagtggaaaatcagaagaatcatcccactattccacagagaaagaatcagagaagactgcagagtcccagacccccaccccttcagccacatccttcttttctgggaagagccccgtcaccacactgcttgagtgtatgcacaaattggggaactcctgcgaattccgtctcctgtccaaagaaggccctgcccatgaacccaagttccaatactgtgttgcagtgggagcccaaactttccccagtgtgagtgctcccagcaagaaagtggcaaagcagatggccgcagaggaagccatgaaggccctgcatggggaggcgaccaactccatggcttctgataaccagcctgaaggtatgatctcagagtcacttgataacttggaatccatgatgcccaacaaggtcaggaagattggcgagctcgtgagatacctgaacaccaaccctgtgggtggccttttggagtacgcccgctcccatggctttgctgctgaattcaagttggtcgaccagtccggacctcctcacgagcccaagttcgtttaccaagcaaaagttgggggtcgctggttcccagccgtctgcgcacacagcaagaagcaaggcaagcaggaagcagcagatgcggctctccgtgtcttgattggggagaacgagaaggcagaacgcatgggtttcacagaggtaaccccagtgacaggggccagtctcagaagaactatgctcctcctctcaaggtccccagaagcacagccaaagacactccctctcactggcagcaccttccatgaccagatagccatgctgagccaccggtgcttcaacactctgactaacagcttccagccctccttgctcggccgcaagattctggccgccatcattatgaaaaaagactctgaggacatgggtgtcgtcgtcagcttgggaacagggaatcgctgtgtgaaaggagattctctcagcctaaaaggagaaactgtcaatgactgccatgcagaaataatctcccggagaggcttcatcaggtttctctacagtgagttaatgaaatacaactcccagactgcgaaggatagtatatttgaacctgctaagggaggagaaaagctccaaataaaaaagactgtgtcattccatctgtatatcagcactgctccgtgtggagatggcgccctctttgacaagtcctgcagcgaccgtgctatggaaagcacagaatcccgccactaccctgtcttcgagaatcccaaacaaggaaagctccgcaccaaggtggagaacggagaaggcacaatccctgtggaatccagtgacattgtgcctacgtgggatggcattcggctcggggagagactccgtaccatgtcctgtagtgacaaaatcctacgctggaacgtgctgggcctgcaaggggcactgttgacccacttcctgcagcccatttatctcaaatctgtcacattgggttaccttttcagccaagggcatctgacccgtgctatttgctgtcgtgtgacaagagatgggagtgcatttgaggatggactacgacatccctttattgtcaaccaccccaaggttggcagagtcagcatatatgattccaaaaggcaatccgggaagactaaggagacaagcgtcaactggtgtctggctgatggctatgacctggagatcctggacggtaccagaggcactgtggatgggccacggaatgaattgtcccgggtctccaaaaagaacatttttcttctatttaagaagctctgctccttccgttaccgcagggatctactgagactctcctatggtgaggccaagaaagctgcccgtgactacgagacggccaagaactacttcaaaaaaggcctgaaggatatgggctatgggaactggattagcaaaccccaggaggaaaagaacttttatctctgcccagtatagtatgctccagtgacagatggattagggtgtgtcatactagggtgtgagagaggtaggtcgtagcattcctcatcacatggtcaggggatttttttttctcctttttttttctttttaagccataattggtgatactgaaaactttgggttcccatttatcctgctttctttgggattgctaggcaaggtctggccaggccccccttttttcccccaagtgaagaggcagaaacctaagaagttatcttttctttctacccaaagcatacatagtcactgagcacctgcggtccatttcctcttaaaagttttgttttgatttgtttccatttcctttccctttgtgtttgctacactgacctcttgcggtcttgattaggtttcagtcaactctggatcatgtcagggactgataatttcatttgtggattacgcagacccctctacttcccctctttcccttctgagattctttccttgtgatctgaatgtctccttttccccctcagagggcaaagaggtgaacataaaggatttggtgaaacatttgtaagggtaggagttgaaaactgcagttcccagtgccacggaagtgtgattggagcctgcagataatgcccagccatcctcccatcctgcactttagccagctgcagggcgggcaaggcaaggaaagctgcttccctggaagtgtatcactttctccggcagctgggaagtctagaaccagccagactgggttaagggagctgctcaagcaatagcagaggtttcacccggcaggatgacacagaccacttcccagggagcacgggcatgccttggaatattgccaagcttccagctgcctcttctcctaaagcattcctaggaatattttccccgccaatgctgggcgtacaccctagccaacgggacaaatcctagagggtataaaatcatctctgctcagataatcatgacttagcaagaataagggcaaaaaatcctgttggcttaacgtcactgttccacccggtgtaatatctctcatgacagtgacaccaagggaagttgactaagtcacatgtaaattaggagtgttttaaagaatgccatagatgttgattcttaactgctacagataacctgtaattgagcagatttaaaattcaggcatacttttccatttatccaagtgctttcatttttccagatggcttcagaagtaggctcgtgggcagggcgcagacctgatctttatagggttgacatagaaagcagtagttgtgggtgaaagggcaggttgtcttcaaactctgtgaggtagaatcctttgtctatacctccatgaacattgactcgtgtgttcagagcctttggcctctctgtggagtctggctctctggctcctgtgcattctttgaatagtcactcgtaaaaactgtcagtgcttgaaactgtttcctttactcatgttgaagggactttgttggcttttagagtgttggtcatgactccaagagcagagcagggaagagcccaagcatagacttggtgccgtggtgatggctgcagtccagttttgtgatgctgcttttacgtgtccctcgataacagtcagctagacacactcaggaggactactgaggctctgcgaccttcaggagctgagcctgcctctctcctttagatgacagaccttcatctgggaacgtgctgagccagcaccctcagatgatttccctccaaactgctgactaggtcatcctctgtctggtagagacattcacatctttgcttttattctatgctctctgtacttttgaccaaaaattgaccaaagtaagaaaatgcaagttctaaaaatagactaaggatgcctttgcagaacaccaaagcatcccaaggaactggtagggaagtggcgcctgtctcctggagtggaagaggcctgctccctggctctgggtctgctgggggcacagtaaatcagtcttggcacccacatccagggcagagaggtctgtggttctcagcatcagaaggcagcgcagcccctctcctcttcaggctacagggttgtcacctgctgagtcctcaggttgtttggcctctctggtccatcttgggcattaggttctccagcagagctctggccagctgcctcttctttaactgggaacacaggctctcacaagatcagaacccccactcacccccaagatcttatctagcaagcctgtagtattcagtttctgttgtaggaagagagcgaggcatccctgaattccacgcatctgctggaaacgagccgtgtcagatcgcacatccctgcgcccccatgcccctctgagtcacacaggacagaggaggcagagcttctgcccactgttatcttcactttctttgtccagtcttttgtttttaataagcagtgaccctccctactcttctttttaatgatttttgtagttgatttgtctgaactgtggctactgtgcattccttgaataatcacttgtaaaaattgtcagtgcttgaagctgtttcctttactcacattgaagggacttcgttggttttttggagtcttggttgtgactccaagagcagagtgaggaagacccccaagcatagactcgggtactgtgatgatggctgcagtccagttttatgattctgcttttatgtgtcccttgataacagtgacttaacaatatacattcctcataaataaaaaaaaaacaagaatctgaa

SEQ ID NO: 240 - DNA, 6620 bp, Homo sapiens
  source 1..6620: mol_type = genomic DNA
gaggaaacgaaagcgaaattgaaccggagccatcttgggcccggcgcgcagacccgcggagtttcccgtgccgacgccccggggccacttccagtgcggagtagcggaggcgtgggggcctcgaggggctggcgcggcccagcggtcgggccagggtcgtgccgccggcgggtcgggccgggcaatgcctcgcgggcgcaatgaatccgcggcaggggtattccctcagcggatactacacccatccatttcaaggctatgagcacagacagctcaggtaccagcagcctgggccaggatcttcccccagtagtttcctgcttaagcaaatagaatttctcaaggggcagctcccagaagcaccggtgattggaaagcagacaccgtcactgccaccttccctcccaggactccggccaaggtttccagtactacttgcctccagtaccagaggcaggcaagtggacatcaggggtgtccccaggggcgtgcatctcagaagtcaggggctccagagagggttccagcatccttcaccacgtggcaggagtctgccacagagaggtgttgattgcctttcctcacatttccaggaactgagtatctaccaagatcaggaacaaaggatcttaaagttcctggaagagcttggggaagggaaggccaccacagcacatgatctgtctgggaaacttgggactccgaagaaagaaatcaatcgagttttatactccctggcaaagaagggcaagctacagaaagaggcaggaacaccccctttgtggaaaatcgcggtctccactcaggcttggaaccagcacagcggagtggtaagaccagacggtcatagccaaggagccccaaactcagacccgagtttggaaccggaagacagaaactccacatctgtctcagaagatcttcttgagccttttattgcagtctcagctcaggcttggaaccagcacagcggagtggtaagaccagacagtcatagccaaggatccccaaactcagacccaggtttggaacctgaagacagcaactccacatctgccttggaagatcctcttgagtttttagacatggccgagatcaaggagaaaatctgcgactatctcttcaatgtgtctgactcctctgccctgaatttggctaaaaatattggccttaccaaggcccgagatataaatgctgtgctaattgacatggaaaggcagggggatgtctatagacaagggacaacccctcccatatggcatttgacagacaagaagcgagagaggatgcaaatcaagagaaatacgaacagtgttcctgaaaccgctccagctgcaatccctgagaccaaaagaaacgcagagttcctcacctgtaatatacccacatcaaatgcctcaaataacatggtaaccacagaaaaagtggagaatgggcaggaacctgtcataaagttagaaaacaggcaagaggccagaccagaaccagcaagactgaaaccacctgttcattacaatggcccctcaaaagcagggtatgttgactttgaaaatggccagtgggccacagatgacatcccagatgacttgaatagtatccgcgcagcaccaggtgagtttcgagccatcatggagatgccctccttctacagtcatggcttgccacggtgttcaccctacaagaaactgacagagtgccagctgaagaaccccatcagcgggctgttagaatatgcccagttcgctagtcaaacctgtgagttcaacatgatagagcagagtggaccaccccatgaacctcgatttaaattccaggttgtcatcaatggccgagagtttcccccagctgaagctggaagcaagaaagtggccaagcaggatgcagctatgaaagccatgacaattctgctagaggaagccaaagccaaggacagtggaaaatcagaagaatcatcccactattccacagagaaagaatcagagaagactgcagagtcccagacccccaccccttcagccacatccttcttttctgggaagagccccgtcaccacactgcttgagtgtatgcacaaattggggaactcctgcgaattccgtctcctgtccaaagaaggccctgcccatgaacccaagttccaatactgtgttgcagtgggagcccaaactttccccagtgtgagtgctcccagcaagaaagtggcaaagcagatggccgcagaggaagccatgaaggccctgcatggggaggcgaccaactccatggcttctgataaccagcctgaaggtatgatctcagagtcacttgataacttggaatccatgatgcccaacaaggtcaggaagattggcgagctcgtgagatacctgaacaccaaccctgtgggtggccttttggagtacgcccgctcccatggctttgctgctgaattcaagttggtcgaccagtccggacctcctcacgagcccaagttcgtttaccaagcaaaagttgggggtcgctggttcccagccgtctgcgcacacagcaagaagcaaggcaagcaggaagcagcagatgcggctctccgtgtcttgattggggagaacgagaaggcagaacgcatgggtttcacagaggtaaccccagtgacaggggccagtctcagaagaactatgctcctcctctcaaggtccccagaagcacagccaaagacactccctctcactggcagcaccttccatgaccagatagccatgctgagccaccggtgcttcaacactctgactaacagcttccagccctccttgctcggccgcaagattctggccgccatcattatgaaaaaagactctgaggacatgggtgtcgtcgtcagcttgggaacagggaatcgctgtgtgaaaggagattctctcagcctaaaaggagaaactgtcaatgactgccatgcagaaataatctcccggagaggcttcatcaggtttctctacagtgagttaatgaaatacaactcccagactgcgaaggatagtatatttgaacctgctaagggaggagaaaagctccaaataaaaaagactgtgtcattccatctgtatatcagcactgctccgtgtggagatggcgccctctttgacaagtcctgcagcgaccgtgctatggaaagcacagaatcccgccactaccctgtcttcgagaatcccaaacaaggaaagctccgcaccaaggtggagaacggagaaggcacaatccctgtggaatccagtgacattgtgcctacgtgggatggcattcggctcggggagagactccgtaccatgtcctgtagtgacaaaatcctacgctggaacgtgctgggcctgcaaggggcactgttgacccacttcctgcagcccatttatctcaaatctgtcacattgggttaccttttcagccaagggcatctgacccgtgctatttgctgtcgtgtgacaagagatgggagtgcatttgaggatggactacgacatccctttattgtcaaccaccccaaggttggcagagtcagcatatatgattccaaaaggcaatccgggaagactaaggagacaagcgtcaactggtgtctggctgatggctatgacctggagatcctggacggtaccagaggcactgtggatgggccacggaatgaattgtcccgggtctccaaaaagaacatttttcttctatttaagaagctctgctccttccgttaccgcagggatctactgagactctcctatggtgaggccaagaaagctgcccgtgactacgagacggccaagaactacttcaaaaaaggcctgaaggatatgggctatgggaactggattagcaaaccccaggaggaaaagaacttttatctctgcccagtatagtatgctccagtgacagatggattagggtgtgtcatactagggtgtgagagaggtaggtcgtagcattcctcatcacatggtcaggggatttttttttctcctttttttttctttttaagccataattggtgatactgaaaactttgggttcccatttatcctgctttctttgggattgctaggcaaggtctggccaggccccccttttttcccccaagtgaagaggcagaaacctaagaagttatcttttctttctacccaaagcatacatagtcactgagcacctgcggtccatttcctcttaaaagttttgttttgatttgtttccatttcctttccctttgtgtttgctacactgacctcttgcggtcttgattaggtttcagtcaactctggatcatgtcagggactgataatttcatttgtggattacgcagacccctctacttcccctctttcccttctgagattctttccttgtgatctgaatgtctccttttccccctcagagggcaaagaggtgaacataaaggatttggtgaaacatttgtaagggtaggagttgaaaactgcagttcccagtgccacggaagtgtgattggagcctgcagataatgcccagccatcctcccatcctgcactttagccagctgcagggcgggcaaggcaaggaaagctgcttccctggaagtgtatcactttctccggcagctgggaagtctagaaccagccagactgggttaagggagctgctcaagcaatagcagaggtttcacccggcaggatgacacagaccacttcccagggagcacgggcatgccttggaatattgccaagcttccagctgcctcttctcctaaagcattcctaggaatattttccccgccaatgctgggcgtacaccctagccaacgggacaaatcctagagggtataaaatcatctctgctcagataatcatgacttagcaagaataagggcaaaaaatcctgttggcttaacgtcactgttccacccggtgtaatatctctcatgacagtgacaccaagggaagttgactaagtcacatgtaaattaggagtgttttaaagaatgccatagatgttgattcttaactgctacagataacctgtaattgagcagatttaaaattcaggcatacttttccatttatccaagtgctttcatttttccagatggcttcagaagtaggctcgtgggcagggcgcagacctgatctttatagggttgacatagaaagcagtagttgtgggtgaaagggcaggttgtcttcaaactctgtgaggtagaatcctttgtctatacctccatgaacattgactcgtgtgttcagagcctttggcctctctgtggagtctggctctctggctcctgtgcattctttgaatagtcactcgtaaaaactgtcagtgcttgaaactgtttcctttactcatgttgaagggactttgttggcttttagagtgttggtcatgactccaagagcagagcagggaagagcccaagcatagacttggtgccgtggtgatggctgcagtccagttttgtgatgctgcttttacgtgtccctcgataacagtcagctagacacactcaggaggactactgaggctctgcgaccttcaggagctgagcctgcctctctcctttagatgacagaccttcatctgggaacgtgctgagccagcaccctcagatgatttccctccaaactgctgactaggtcatcctctgtctggtagagacattcacatctttgcttttattctatgctctctgtacttttgaccaaaaattgaccaaagtaagaaaatgcaagttctaaaaatagactaaggatgcctttgcagaacaccaaagcatcccaaggaactggtagggaagtggcgcctgtctcctggagtggaagaggcctgctccctggctctgggtctgctgggggcacagtaaatcagtcttggcacccacatccagggcagagaggtctgtggttctcagcatcagaaggcagcgcagcccctctcctcttcaggctacagggttgtcacctgctgagtcctcaggttgtttggcctctctggtccatcttgggcattaggttctccagcagagctctggccagctgcctcttctttaactgggaacacaggctctcacaagatcagaacccccactcacccccaagatcttatctagcaagcctgtagtattcagtttctgttgtaggaagagagcgaggcatccctgaattccacgcatctgctggaaacgagccgtgtcagatcgcacatccctgcgcccccatgcccctctgagtcacacaggacagaggaggcagagcttctgcccactgttatcttcactttctttgtccagtcttttgtttttaataagcagtgaccctccctactcttctttttaatgatttttgtagttgatttgtctgaactgtggctactgtgcattccttgaataatcacttgtaaaaattgtcagtgcttgaagctgtttcctttactcacattgaagggacttcgttggttttttggagtcttggttgtgactccaagagcagagtgaggaagacccccaagcatagactcgggtactgtgatgatggctgcagtccagttttatgattctgcttttatgtgtcccttgataacagtgacttaacaatatacattcctcataaataaaaaaaaaacaagaatctgaa

SEQ ID NO: 241 - DNA, 3585 bp, Homo sapiens
  source 1..3585: mol_type = genomic DNA
gggtattccctcagcggatactacacccatccatttcaaggctatgagcacagacagctcaggtaccagcagcctgggccaggatcttcccccagtagtttcctgcttaagcaaatagaatttctcaaggggcagctcccagaagcaccggtgattggaaagcagacaccgtcactgccaccttccctcccaggactccggccaaggtttccagtactacttgcctccagtaccagaggcaggcaagtggacatcaggggtgtccccaggggcgtgcatctcagaagtcaggggctccagagagggttccagcatccttcaccacgtggcaggagtctgccacagagaggtgttgattgcctttcctcacatttccaggaactgagtatctaccaagatcaggaacaaaggatcttaaagttcctggaagagcttggggaagggaaggccaccacagcacatgatctgtctgggaaacttgggactccgaagaaagaaatcaatcgagttttatactccctggcaaagaagggcaagctacagaaagaggcaggaacaccccctttgtggaaaatcgcggtctccactcaggcttggaaccagcacagcggagtggtaagaccagacggtcatagccaaggagccccaaactcagacccgagtttggaaccggaagacagaaactccacatctgtctcagaagatcttcttgagccttttattgcagtctcagctcaggcttggaaccagcacagcggagtggtaagaccagacagtcatagccaaggatccccaaactcagacccaggtttggaacctgaagacagcaactccacatctgccttggaagatcctcttgagtttttagacatggccgagatcaaggagaaaatctgcgactatctcttcaatgtgtctgactcctctgccctgaatttggctaaaaatattggccttaccaaggcccgagatataaatgctgtgctaattgacatggaaaggcagggggatgtctatagacaagggacaacccctcccatatggcatttgacagacaagaagcgagagaggatgcaaatcaagagaaatacgaacagtgttcctgaaaccgctccagctgcaatccctgagaccaaaagaaacgcagagttcctcacctgtaatatacccacatcaaatgcctcaaataacatggtaaccacagaaaaagtggagaatgggcaggaacctgtcataaagttagaaaacaggcaagaggccagaccagaaccagcaagactgaaaccacctgttcattacaatggcccctcaaaagcagggtatgttgactttgaaaatggccagtgggccacagatgacatcccagatgacttgaatagtatccgcgcagcaccaggtgagtttcgagccatcatggagatgccctccttctacagtcatggcttgccacggtgttcaccctacaagaaactgacagagtgccagctgaagaaccccatcagcgggctgttagaatatgcccagttcgctagtcaaacctgtgagttcaacatgatagagcagagtggaccaccccatgaacctcgatttaaattccaggttgtcatcaatggccgagagtttcccccagctgaagctggaagcaagaaagtggccaagcaggatgcagctatgaaagccatgacaattctgctagaggaagccaaagccaaggacagtggaaaatcagaagaatcatcccactattccacagagaaagaatcagagaagactgcagagtcccagacccccaccccttcagccacatccttcttttctgggaagagccccgtcaccacactgcttgagtgtatgcacaaattggggaactcctgcgaattccgtctcctgtccaaagaaggccctgcccatgaacccaagttccaatactgtgttgcagtgggagcccaaactttccccagtgtgagtgctcccagcaagaaagtggcaaagcagatggccgcagaggaagccatgaaggccctgcatggggaggcgaccaactccatggcttctgataaccagcctgaaggtatgatctcagagtcacttgataacttggaatccatgatgcccaacaaggtcaggaagattggcgagctcgtgagatacctgaacaccaaccctgtgggtggccttttggagtacgcccgctcccatggctttgctgctgaattcaagttggtcgaccagtccggacctcctcacgagcccaagttcgtttaccaagcaaaagttgggggtcgctggttcccagccgtctgcgcacacagcaagaagcaaggcaagcaggaagcagcagatgcggctctccgtgtcttgattggggagaacgagaaggcagaacgcatgggtttcacagagctccctctcactggcagcaccttccatgaccagatagccatgctgagccaccggtgcttcaacactctgactaacagcttccagccctccttgctcggccgcaagattctggccgccatcattatgaaaaaagactctgaggacatgggtgtcgtcgtcagcttgggaacagggaatcgctgtgtgaaaggagattctctcagcctaaaaggagaaactgtcaatgactgccatgcagaaataatctcccggagaggcttcatcaggtttctctacagtgagttaatgaaatacaactcccagactgcgaaggatagtatatttgaacctgctaagggaggagaaaagctccaaataaaaaagactgtgtcattccatctgtatatcagcactgctccgtgtggagatggcgccctctttgacaagtcctgcagcgaccgtgctatggaaagcacagaatcccgccactaccctgtcttcgagaatcccaaacaaggaaagctccgcaccaaggtggagaacggagaaggcacaatccctgtggaatccagtgacattgtgcctacgtgggatggcattcggctcggggagagactccgtaccatgtcctgtagtgacaaaatcctacgctggaacgtgctgggcctgcaaggggcactgttgacccacttcctgcagcccatttatctcaaatctgtcacattgggttaccttttcagccaagggcatctgacccgtgctatttgctgtcgtgtgacaagagatgggagtgcatttgaggatggactacgacatccctttattgtcaaccaccccaaggttggcagagtcagcatatatgattccaaaaggcaatccgggaagactaaggagacaagcgtcaactggtgtctggctgatggctatgacctggagatcctggacggtaccagaggcactgtggatgggccacggaatgaattgtcccgggtctccaaaaagaacatttttcttctatttaagaagctctgctccttccgttaccgcagggatctactgagactctcctatggtgaggccaagaaagctgcccgtgactacgagacggccaagaactacttcaaaaaaggcctgaaggatatgggctatgggaactggattagcaaaccccaggaggaaaagaacttttatctctgcccagta

SEQ ID NO: 242 - DNA, 1583 bp, Homo sapiens
  source 1..1583: mol_type = genomic DNA
cggcggcagaactgggaggaggagttggaggccggagggagcccgcgctcggggcggcggctggaggcagcgcaccgagttcccgcgaggatccatgacctgacggggccccggagccgcgctgcctctcgggtgtcctgggtcggtggggagcccagtgctcgcaggccggcgggcgggccggagggctgcagtctccctcgcggtgagaggaaggcggaggagcgggaaccgcggcggcgctcgcgcggcgcctgcggggggaagggcagttccgggccgggccgcgcctcagcagggcggcggctcccagcgcagtctcagggcccgggtggcggcggcgactggagaaatcaagttgtgcggtcggtgatgcccgagtgagcggggggcctgggcctctgcccttaggaggcaactcccacgcaggccgcaaaggcgctctcgcggccgagaggcttcgtttcggtttcgcggcggcggcggcgttgttggctgaggggacccgggacacctgaatgcccccggccccggctcctccgacgcgatggggaaggtgctatccaaaatcttcgggaacaaggaaatgcggatcctcatgttgggcctggacgcggccggcaagacaacaatcctgtacaagttgaagctgggccagtcggtgaccaccattcccactgtgggtttcaacgtggagacggtgacttacaaaaatgtcaagttcaacgtatgggatgtgggcggccaggacaagatccggccgctctggcggcattactacactgggacccaaggtctcatcttcgtagtggactgcgccgaccgcgaccgcatcgatgaggctcgccaggagctgcaccgcattatcaatgaccgggagatgagggacgccataatcctcatcttcgccaacaagcaggacctgcccgatgccatgaaaccccacgagatccaggagaaactgggcctgacccggattcgggacaggaactggtatgtgcagccctcctgtgccacctcaggggacggactctatgaggggctcacatggttaacctctaactacaaatcttaatgagcattctccacccatcccctggaaggagagaaatcaaaaacccattcataggattatcgccaccatcacctctttcaattgccactttctcttcttttgaatttgaactctggagttactgttctacagtttggcggggacggggcttgggggttttctcttttgtttgtttccctttctttttccttttttttttttttttttttttgttggctttgcgttaggatgctctgatctgacatttgacatgaacacaaagttgctagatgctcttgttgacttccagcagatgggatgggggaaacacagcagttcttggtaaagtcctttgtaataatagtttgatttttttatttcgagagaatctttcattttcctatgtatgcttttttccttttttgcccagtttccttatcacttgctgtagatggcttattttgcattcatgcagactatgttgcaagtctgtttcatctagtaaactgaaaattattgcttaatcaaa

SEQ ID NO: 243 - DNA, 3869 bp, Homo sapiens
  source 1..3869: mol_type = genomic DNA
cagcagcagctccagctcggtgcagaagcccagcagccggcgtgccgccgcccggccactccagcgccttcttccccgccttgcgctcctgccccaactcgcgctgtcgtcggaccccggcccatccagcagcgctcggcgcccaccaggcggacgcccaggagaacccctgcctccgtcgcggctcctggagagctgatcgttcacctgccccggcccgcctgaggacgggggtgccttcatgcggcccccacactcctcaccccgccgccgccgccgtcccggagctccgcacagtgtgccccagccccagcagggcgcacaactttggaagtctcgcggcgctccgagaggcggcagagtccgcgccccagccccgggccgggccgggccagaaccgcagcgtctgggggaagccagagagtcggtaatcgcttcggggatgtaaggcgacagacataggacccccgagctcgcatcagcacccttcggctgcctcccggggtgggggcgggccccgcacacggtaagacctcttgctttcgctcaggctcaagattcaagatacagatattgatatgtatatatatatttaatttcctgtcatccttccaagttatcaggccaccgatgatttttgttctcccttcttgaagaataaatctctctttacccatcggctctccctactctctcccgccgcttagaaataaaacttggctgtattaggagctcggagcaagaaggcgcccaccgagagcgtctgaagcgcgagccaggcgcagttcgcgggacccgggccatgggccgctagcggtcctccagttcgggcccggcctccctgcggccccctccctatgtgagccgcagccaggcgagcggggcgccggaggaagaggaggacccacgggcgccgggccggaaggcagctggcagcaggcccaggccagcgggcgcccgcgttcatgttccgccaggagcagccgttggccgagggcagctttgcgcccatgggctccctgcagccggacgcgggcaacgcgagctggaacgggaccgaggcgccggggggcggcgcccgggccaccccttactccctgcaggtgacgctgacgctggtgtgcctggccggcctgctcatgctgctcaccgtgttcggcaacgtgctcgtcatcatcgccgtgttcacgagccgcgcgctcaaggcgccccaaaacctcttcctggtgtctctggcctcggccgacatcctggtggccacgctcgtcatccctttctcgctggccaacgaggtcatgggctactggtacttcggcaaggcttggtgcgagatctacctggcgctcgacgtgctcttctgcacgtcgtccatcgtgcacctgtgcgccatcagcctggaccgctactggtccatcacacaggccatcgagtacaacctgaagcgcacgccgcgccgcatcaaggccatcatcatcaccgtgtgggtcatctcggccgtcatctccttcccgccgctcatctccatcgagaagaagggcggcggcggcggcccgcagccggccgagccgcgctgcgagatcaacgaccagaagtggtacgtcatctcgtcgtgcatcggctccttcttcgctccctgcctcatcatgatcctggtctacgtgcgcatctaccagatcgccaagcgtcgcacccgcgtgccacccagccgccggggtccggacgccgtcgccgcgccgccggggggcaccgagcgcaggcccaacggtctgggccccgagcgcagcgcgggcccggggggcgcagaggccgaaccgctgcccacccagctcaacggcgcccctggcgagcccgcgccggccgggccgcgcgacaccgacgcgctggacctggaggagagctcgtcttccgaccacgccgagcggcctccagggccccgcagacccgagcgcggtccccggggcaaaggcaaggcccgagcgagccaggtgaagccgggcgacagcctgccgcggcgcgggccgggggcgacggggatcgggacgccggctgcagggccgggggaggagcgcgtcggggctgccaaggcgtcgcgctggcgcgggcggcagaaccgcgagaagcgcttcacgttcgtgctggccgtggtcatcggagtgttcgtggtgtgctggttccccttcttcttcacctacacgctcacggccgtcgggtgctccgtgccacgcacgctcttcaaattcttcttctggttcggctactgcaacagctcgttgaacccggtcatctacaccatcttcaaccacgatttccgccgcgccttcaagaagatcctctgtcggggggacaggaagcggatcgtgtgaggtttccgctggcgcccgcgtagactcacgctgactgcaggcagcggggggcatcgaggggtgcttagccccagggcactcagaaacccgggcgctgcctgctctgcgtttcctcgtctggggtggctctgcagcctcctgcgggcgggcgtctgctgctcctacaagggaagcttcttgctgccaggcccacacatccccagttgttggtttggccactcttgacctggagccatcttcctagtgggccacccctaatcactattgcttcctaaaggtattttcaccctcttcgcctggtacagccctcacagctcttcagagcaagcactggactacaagggcatggctcacaaaaggttaatggatgggggttacctagccctggctaattccccttccattcccaactctctctctctttttaaagaaaaatgctaagggcagccctgcctgccctccccatcccccgctgtaaatatacactatttttgatagcacacatggggcccccatatctcttggccttggttttgatgttgaaatcctggccttgggagagatgccttccaggcagacacagctgtctggttcaggccaagcccctttgcaatgcaagccctttctggtgttatgaagtccctctatgtcgtcgttttcaccagcaactggtgactgtcccttcgacacggacctgctttgagatttcctgacagggaaaagatttctgtccatttttttcctgtgcctaacagcataattgccttttcctatgtaaatattatgatggtggatcaagacataagtaaatgagcctttctgcctcacatcagccctgtgtataaagccattattctctgatgcactgtttgccccagtaactcactttaaaacctctctttccagtgttccctctctccctccagggccactgcttgaagaagaatatgtatgtttctatcttgtatgtctgtgtgcccctcctgccccgaaagtgctgactatggggaaatcttttagctgctgtttttagactccaaggagtggaaattatgtggaagaagcaaacctgatacaatttgcccaaggtaaacagtttgaaaagacaaatgggcctgccaaactgtacagtttcttccccaagagctgttaggtatcaaaatgttgtcctttcccccctccgtgcttttctggttgagatcatgtcattgatgaactgccaaagtcaggggaggagggcagagactttgtgtttacatctgcatttctacatgttttagacagagacaatttaaggcctgcactcttatttcactaaagaaaaactaatgtcagcacatgttgctaatgacagtggatttttttttaaataaaaaagtttacagatcaaatgtgaaataaatatgaatggagtggtcctcttgtctgttatctgagttttcaaaagctttaagactctgggaacatctgattttatggattttttaaaaataaaaaatgtacatt

SEQ ID NO: 244 - DNA, 2034 bp, Homo sapiens
  source 1..2034: mol_type = genomic DNA
atcacgctgaggtccgcgcgcccccggagtctggggagcagggctccgccaatccgaggggagggcgaaggaagtaccatttatttagcgctgtgtgtgtgctcttatttccactggccttacaagaccgtgcactgtgtagatgaggaaactgagtcataataaatatgtgctgaaccgttcgggggtcacacggtgctgaaatggtttcgagtcaactcgctcggacggcactcggcctcagcctccggccctggaaccctctccagggacgggaccagcccttgttctgttccctaccggtaccacaggaatcttgacgaacggcccaaatgcctggccgctgtcagagtgacgccgcgatgagagtaaacgggccagcatcccgtgcaccagcggggtggaccagcgggagtctgcacacaggcccccgagcaggacgccctcgtgcgcaggcgcggggtgtacgtgggcggggcctcctcctccggccccgcccagcgaaggagcttcctcttccgaggaaaggcggggcctgggcgcccgcgggaaacccgggcccgttgcatccgctgggtgtagccgtggggatggcaggttcggggaggctggtcctacggccctggattcgggagctgattctggggtcagagacaccctccagtccacgagccgggcagctgcttgaggacgccgaggccgcggtcgcgggcccatcccacgcccctgatacgtccgacgtcggggccacgctgcttgtgtctgacgggacccacagtgtccgatgcctggtgacgcgggaggccctggacacctcggactgggaggagaaggagttcggcttccgcgggacagagggccggctgctgctgctgcaggactgcggggttcatgtccaggtcgctgagggcggcgcgcccgcagagttctatctccaggtggaccgcttcagcctgctgcccacggagcagccccggctacgggtgcctggttgcaaccaagacttagatgttcagaaaaagctctatgactgccttgaggagcacctttcagagtccacctcgtccaatgcaggcctatcactgtcccagcttctggatgaaatgcgggaggaccaggagcatcagggggcactcgtgtgcctggctgaaagctgcctgacactggagggcccttgcacagcaccccctgtcacccactgggctgcctcacgatgcaaggccacgggagaagctgtgtacactgtccccagctcaatgctgtgcatctctgagaatgaccagctaattctgagctctctaggcccctgtcagaggacacagggccctgagctgcccccaccagacccggctctgcaggacctatctctgaccctcatagcctctcctccttcctcacccagttcctcaggaaccccggccttacccggccacatgtcatccgaggaaagtggtaccagcatcagccttctgcctgccctgtccttggctgctccagacccagggcagagaagcagctcccagccctcaccagccatctgctcagcccctgccaccctgacccccaggtccccacacgccagccgtacccccagctccccactccagagctgcactcccagtctctcaccccgtagccatgtccccagtccacaccaggctcttgtgaccaggccccagaaacctagcctggagttcaaggagtttgtagggttgccctgcaagaatcggccgccttttcccaggaccggagctaccaggggagcccaggagccctgctctgtctgggaacccccaaagaggcatcgtgatggttctgccttccagtatgagtatgagccaccctgcacgtccctctgtgctcgggtccaagctgtcaggcttcctccccagctcatggcctgggccttgcactttctgatggatgcacagccagggtctgagccaactccgatgtgagacgtcacgcaggacagataccgctccacactctgcttcctttgagttttttaataaaataatctcatgcggcagg

SEQ ID NO: 245 - DNA, 1974 bp, Homo sapiens
  source 1..1974: mol_type = genomic DNA
aaggaagtaccatttatttagcgctgtgtgtgtgctcttatttccactggccttacaagaccgtgcactgtgtagatgaggaaactgagtcataataaatatgtgctgaaccgttcgggggtcacacggtgctgaaatggtttcgagtcaactcgctcggacggcactcggcctcagcctccggccctggaaccctctccagggacgggaccagcccttgttctgttccctaccggtaccacaggaatcttgacgaacggcccaaatgcctggccgctgtcagagtgacgccgcgatgagagtaaacgggccagcatcccgtgcaccagcggggtggaccagcgggagtctgcacacaggcccccgagcaggacgccctcgtgcgcaggcgcggggtgtacgtgggcggggcctcctcctccggccccgcccagcgaaggagcttcctcttccgaggaaaggcggggcctgggcgcccgcgggaaacccgggcccgttgcatccgctgggtgtagccgtggggatggcaggttcggggaggctggtcctacggccctggattcgggagctgattctggggtcagagacaccctccagtccacgagccgggcagctgcttgaggtactacaggacgccgaggccgcggtcgcgggcccatcccacgcccctgatacgtccgacgtcggggccacgctgcttgtgtctgacgggacccacagtgtccgatgcctggtgacgcgggaggccctggacacctcggactgggaggagaaggagttcggcttccgcgggacagagggccggctgctgctgctgcaggactgcggggttcatgtccaggtcgctgagggcggcgcgcccgcagagttctatctccaggtggaccgcttcagcctgctgcccacggagcagccccggctacgggtgcctggttgcaaccaagacttagatgttcagaaaaagctctatgactgccttgaggagcacctttcagagtccacctcgtccaatgcaggcctatcactgtcccagcttctggatgaaatgcgggaggaccaggagcatcagggggcactcgtgtgcctggctgaaagctgcctgacactggagggcccttgcacagcaccccctgtcacccactgggctgcctcacgatgcaaggccacgggagaagctgtgtacactgtccccagctcaatgctgtgcatctctgagaatgaccagctaattctgagctctctaggcccctgtcagaggacacagggccctgagctgcccccaccagacccggctctgcaggacctatctctgaccctcatagcctctcctccttcctcacccagttcctcaggaaccccggccttacccggccacatgtcatccgaggaaagtggtaccagcatcagccttctgcctgccctgtccttggctgctccagacccagggcagagaagcagctcccagccctcaccagccatctgctcagcccctgccaccctgacccccaggtccccacacgccagccgtacccccagctccccactccagagctgcactcccagtctctcaccccgtagccatgtccccagtccacaccaggctcttgtgaccaggccccagaaacctagcctggagttcaaggagtttgtagggttgccctgcaagaatcggccgccttttcccaggaccggagctaccaggggagcccaggagccctgctctgtctgggaacccccaaagaggcatcgtgatggttctgccttccagtatgagtatgagccaccctgcacgtccctctgtgctcgggtccaagctgtcaggcttcctccccagctcatggcctgggccttgcactttctgatggatgcacagccagggtctgagccaactccgatgtgagacgtcacgcaggacagataccgctccacactctgcttcctttgagttttttaataaaataatctcatgcggca

SEQ ID NO: 246 - DNA, 1885 bp, Homo sapiens
  source 1..1885: mol_type = genomic DNA
atccgcgctgtcccttccgcgggctcttgctgttcttcgccaggaggctttgcactccgggccgcatgggtcctggataaggacctcaagaggttgtagtggcgccccttcgctccggcgtactgtctgaaccctgtgcccaaagagggctgtggcagttcctgcaccaaccgcctggagcccatacctaagccctctgggcacgagggacctcctctcccccgctcccccctccccccatcccaactccagccccaaaggaagcaatgcgcgcgtccgagagcaggagcgcgcgtggctgaggaaagaaagggaaggcaaccgggcagcccaggccccgccccgccgctcccccacccgtgcgcttataaagcacaggaaccagagctggccactcagtggtttcttggtgacactggatagaacagctcaagccttgccacttcgggcttctcactgcagctgggcttggacttcggagttttgccattgccagtgggacgtctgagactttctccttcaagtacttggcagatcactctcttagcagggtctgcgcttcgcagccgggatgaagctggtttccgtcgccctgatgtacctgggttcgctcgccttcctaggcgctgacaccgctcggttggatgtcgcgtcggagtttcgaaagaagtggaataagtgggctctgagtcgtgggaagagggaactgcggatgtccagcagctaccccaccgggctcgctgacgtgaaggccgggcctgcccagacccttattcggccccaggacatgaagggtgcctctcgaagccccgaagacagcagtccggatgccgcccgcatccgagtcaagcgctaccgccagagcatgaacaacttccagggcctccggagctttggctgccgcttcgggacgtgcacggtgcagaagctggcacaccagatctaccagttcacagataaggacaaggacaacgtcgcccccaggagcaagatcagcccccagggctacggccgccggcgccggcgctccctgcccgaggccggcccgggtcggactctggtgtcttctaagccacaagcacacggggctccagcccccccgagtggaagtgctccccactttctttaggatttaggcgcccatggtacaaggaatagtcgcgcaagcatcccgctggtgcctcccgggacgaaggacttcccgagcggtgtggggaccgggctctgacagccctgcggagaccctgagtccgggaggcaccgtccggcggcgagctctggctttgcaagggcccctccttctgggggcttcgcttccttagccttgctcaggtgcaagtgccccagggggcggggtgcagaagaatccgagtgtttgccaggcttaaggagaggagaaactgagaaatgaatgctgagacccccggagcaggggtctgagccacagccgtgctcgcccacaaactgatttctcacggcgtgtcaccccaccagggcgcaagcctcactattacttgaactttccaaaacctaaagaggaaaagtgcaatgcgtgttgtacatacagaggtaactatcaatatttaagtttgttgctgtcaagattttttttgtaacttcaaatatagagatatttttgtacgttatatattgtattaagggcattttaaaagcaattatattgtcctcccctattttaagacgtgaatgtctcagcgaggtgtaaagttgttcgccgcgtggaatgtgagtgtgtttgtgtgcatgaaagagaaagactgattacctcctgtgtggaagaaggaaacaccgagtctctgtataatctatttacataaaatgggtgatatgcgaacagcaaaccaataaactgtctcaatgctga

SEQ ID NO: 247 - DNA, 867 bp, Homo sapiens
  source 1..867: mol_type = genomic DNA
ggtgacactggatagaacagctcaagccttgccacttcgggcttctcactgcagctgggcttggacttcggagttttgccattgccagtgggacgtctgagactttctccttcaagtacttggcagatcactctcttagcagggtctgcgcttcgcagccgggatgaagctggtttccgtcgccctgatgtacctgggttcgctcgccttcctaggcgctgacaccgctcggttggatgtcgcgtcggagtttcgaaagaagtggaataagtgggctctgagtcgtgggaagagggaactgcggatgtccagcagctaccccaccgggctcgctgacgtgaaggccgggcctgcccagacccttattcggccccaggacatgaagggtgcctctcgaagccccgaagacagcagtccggatgccgcccgcatccgagtcaagcgctaccgccagagcatgaacaacttccagggcctccggagctttggctgccgcttcgggacgtgcacggtgcagaagctggcacaccagatctaccagttcacagataaggacaaggacaacgtcgcccccaggagcaagatcagcccccagggctacggccgccggcgccggcgctccctgcccgaggccggcccgggtcggactctggtgtcttctaagccacaagcacacggggctccagcccccccgagtggaagtgctccccactttctttaggatttaggcaccgtccggcggcgagctctggctttgcaagggcccctccttctgggggcttcgcttccttagccttgctcaggtgcaagtgccccagggggcggggtgcagaagaatccgagtgtttgccaggcttaaggagagga

SEQ ID NO: 248 - DNA, 1889 bp, Homo sapiens
  source 1..1889: mol_type = genomic DNA
tcttggtgacactggatagaacagctcaagccttgccacttcgggcttctcactgcagctgggcttggacttcggagttttgccattgccagtgggacgtctgagactttctccttcaagtacttggcagatcactctcttagcaggtaggtgccgcagaccctgcgggttaagaggtggggtggggggcagtgcttgccaaggccctaaactgggagcgctgggtgaggggaacaacccactttggagggttctctgagagatagatacaccccatatcctgggcccagctcgtgcacacagctggaggtccagagacccagtcccctctgctccgtcagccaagttccaagaagttgagcagagaccctctgggagcctggcggggtgcagcggcctcccctgcggggcctgtcacccggccggcgcgtgcaaacgcctctggcgcctctctgcgcggagggagataagcgtctgagccagggaaagcgcgggctaaacccgcctcgccggggcccctgcccgccctccgtgccccgcccgggcggtgcagctggcccgggtgctcacgctcgactctctttcttcttttccagggtctgcgcttcgcagccgggatgaagctggtttccgtcgccctgatgtacctgggttcgctcgccttcctaggcgctgacaccgctcggttggatgtcgcgtcggagtttcgaaagaagtggaataagtgggctctgagtcgtgggaagagggaactgcggatgtccagcagctaccccaccgggctcgctgacgtgaaggccgggcctgcccagacccttattcggccccaggacatgaagggtgcctctcgaagccccgaagacagcagtccggatgccgcccgcatccgagtcaagcgctaccgccagagcatgaacaacttccagggcctccggagctttggctgccgcttcgggacgtgcacggtgcagaagctggcacaccagatctaccagttcacagataaggacaaggacaacgtcgcccccaggagcaagatcagcccccagggctacggccgccggcgccggcgctccctgcccgaggccggcccgggtcggactctggtgtcttctaagccacaagcacacggggctccagcccccccgagtggaagtgctccccactttctttaggatttaggcgcccatggtacaaggaatagtcgcgcaagcatcccgctggtgcctcccgggacgaaggacttcccgagcggtgtggggaccgggctctgacagccctgcggagaccctgagtccgggaggcaccgtccggcggcgagctctggctttgcaagggcccctccttctgggggcttcgcttccttagccttgctcaggtgcaagtgccccagggggcggggtgcagaagaatccgagtgtttgccaggcttaaggagaggagaaactgagaaatgaatgctgagacccccggagcaggggtctgagccacagccgtgctcgcccacaaactgatttctcacggcgtgtcaccccaccagggcgcaagcctcactattacttgaactttccaaaacctaaagaggaaaagtgcaatgcgtgttgtacatacagaggtaactatcaatatttaagtttgttgctgtcaagattttttttgtaacttcaaatatagagatatttttgtacgttatatattgtattaagggcattttaaaagcaattatattgtcctcccctattttaagacgtgaatgtctcagcgaggtgtaaagttgttcgccgcgtggaatgtgagtgtgtttgtgtgcatgaaagagaaagactgattacctcctgtgtggaagaaggaaacaccgagtctctgtataatctatttacataaaatgg

SEQ ID NO: 249 - DNA, 715 bp, Homo sapiens
  source 1..715: mol_type = genomic DNA
ctggaaggaagcaggatggcagccggaacagcagttggagcctgggtgctggtcctcagtctgtggggggcagtagtaggtgctcaaaacatcacagcccggattggcgagccactggtgctgaagtgtaagggggcccccaagaaaccaccccagcggctggaatggaaactgaacacaggccggacagaagcttggaaggtcctgtctccccagggaggaggcccctgggacagtgtggctcgtgtccttcccaacagctccctcttccttccggctgtcgggatccaggatgaggggattttccggtgccaggcaatgaacaggaatggaaaggagaccaagtccaactaccgagtccgtgtctaccagattcctgggaagccagaaattgtagattctgcctctgaactcacggctggtgttcccaataaggtagtggaagaaagcaggagaagtagaaaacggccctgtgaacaggaggtggggacatgtgtgtcagagggaagctaccctgcagggactcttagctggcacttggatgggaagcccctggtgcctaatgagaagggagtatctgtgaaggaacagaccaggagacaccctgagacagggctcttcacactgcagtcggagctaatggtgaccccagcccggggaggagatccccgtcccaccttctcctgtagcttcagcccaggccttccccgacacc

SEQ ID NO: 250 - DNA, 1250 bp, Homo sapiens
  source 1..1250: mol_type = genomic DNA
ctggaaggaagcaggatggcagccggaacagcagttggagcctgggtgctggtcctcagtctgtggggggcagtagtaggtgctcaaaacatcacagcccggattggcgagccactggtgctgaagtgtaagggggcccccaagaaaccaccccagcggctggaatggaaactgggaggaggcccctgggacagtgtggctcgtgtccttcccaacagctccctcttccttccggctgtcgggatccaggatgaggggattttccggtgccaggcaatgaacaggaatggaaaggagaccaagtccaactaccgagtccgtgtctaccagattcctgggaagccagaaattgtagattctgcctctgaactcacggctggtgttcccaataaggtggggacatgtgtgtcagagggaagctaccctgcagggactcttagctggcacttggatgggaagcccctggtgcctaatgagaagggagtatctgtgaaggaacagaccaggagacaccctgagacagggctcttcacactgcagtcggagctaatggtgaccccagcccggggaggagatccccgtcccaccttctcctgtagcttcagcccaggccttccccgacaccgggccttgcgcacagcccccatccagccccgtgtctgggagcctgtgcctctggaggaggtccaattggtggtggagccagaaggtggagcagtagctcctggtggaaccgtaaccctgacctgtgaagtccctgcccagccctctcctcaaatccactggatgaaggatgtgagtgacctggagagaggggctgggagaaccaggcgaggaggggccaactgcaggctctgtgggaggatcagggctgggaactctagccctggccctggggatcctgggaggcctggggacagccgccctgctcattggggtcatcttgtggcaaaggcggcaacgccgaggagaggagaggaaggccccagaaaaccaggaggaagaggaggagcgtgcagaactgaatcagtcggaggaacctgaggcaggcgagagtagtactggagggccttgaggggcccacagacagatcccatccatcagctcccttttctttttcccttgaactgttctggcctcagaccaactctctcctgtataatctctctcctgtataaccccaccttgccaagctttcttctacaaccagagccccccacaatgatgattaaacacctgacacatcttgc

SEQ ID NO: 251 - DNA, 1369 bp, Homo sapiens
  source 1..1369: mol_type = genomic DNA
gccaggaccctggaaggaagcaggatggcagccggaacagcagttggagcctgggtgctggtcctcagtctgtggggggcagtagtaggtgctcaaaacatcacagcccggattggcgagccactggtgctgaagtgtaagggggcccccaagaaaccaccccagcggctggaatggaaactgaacacaggccggacagaagcttggaaggtcctgtctccccagggaggaggcccctgggacagtgtggctcgtgtccttcccaacagctccctcttccttccggctgtcgggatccaggatgaggggattttccggtgccaggcaatgaacaggaatggaaaggagaccaagtccaactaccgagtccgtgtctaccagattcctgggaagccagaaattgtagattctgcctctgaactcacggctggtgttcccaataaggtggggacatgtgtgtcagagggaagctaccctgcagggactcttagctggcacttggatgggaagcccctggtgcctaatgagaagggagtatctgtgaaggaacagaccaggagacaccctgagacagggctcttcacactgcagtcggagctaatggtgaccccagcccggggaggagatccccgtcccaccttctcctgtagcttcagcccaggccttccccgacaccgggccttgcgcacagcccccatccagccccgtgtctgggagcctgtgcctctggaggaggtccaattggtggtggagccagaaggtggagcagtagctcctggtggaaccgtaaccctgacctgtgaagtccctgcccagccctctcctcaaatccactggatgaaggatggtgtgcccttgccccttccccccagccctgtgctgatcctccctgagatagggcctcaggaccagggaacctacagctgtgtggccacccattccagccacgggccccaggaaagccgtgctgtcagcatcagcatcatcgaaccaggcgaggaggggccaactgcaggtgaggggtttgataaagtcagggaagcagaagatagcccccaacacatgtgactggggggatggtcaacaagaaaggaatggaaggccccagaaaaccaggaggaagaggaggagcgtgcagaactgaatcagtcggaggaacctgaggcaggcgagagtagtactggagggccttgaggggcccacagacagatcccatccatcagctcccttttctttttcccttgaactgttctggcctcagaccaactctctcctgtataatctctctcctgtataaccccaccttgccaagctttcttctacaaccagagccccccacaatgatgattaaacacctgacacatcttgc

SEQ ID NO: 252 - DNA, 1492 bp, Homo sapiens
  source 1..1492: mol_type = genomic DNA
gactgaaagatgggggctggagagagggtgcaggccccacctagggcggaggccacagcagggagaggggcagacagagccaggaccctggaaggaagcaggatggcagccggaacagcagttggagcctgggtgctggtcctcagtctgtggggggcagtagtaggtgctcaaaacatcacagcccggattggcgagccactggtgctgaagtgtaagggggcccccaagaaaccaccccagcggctggaatggaaactgaacacaggccggacagaagcttggaaggtcctgtctccccagggaggaggcccctgggacagtgtggctcgtgtccttcccaacagctccctcttccttccggctgtcgggatccaggatgaggggattttccggtgccaggcaatgaacaggaatggaaaggagaccaagtccaactaccgagtccgtgtctaccagattcctgggaagccagaaattgtagattctgcctctgaactcacggctggtgttcccaataaggtggggacatgtgtgtcagagggaagctaccctgcagggactcttagctggcacttggatgggaagcccctggtgcctaatgagaagggagtatctgtgaaggaacagaccaggagacaccctgagacagggctcttcacactgcagtcggagctaatggtgaccccagcccggggaggagatccccgtcccaccttctcctgtagcttcagcccaggccttccccgacaccgggccttgcgcacagcccccatccagccccgtgtctgggagcctgtgcctctggaggaggtccaattggtggtggagccagaaggtggagcagtagctcctggtggaaccgtaaccctgacctgtgaagtccctgcccagccctctcctcaaatccactggatgaaggatggtgtgcccttgccccttccccccagccctgtgctgatcctccctgagatagggcctcaggaccagggaacctacagctgtgtggccacccattccagccacgggccccaggaaagccgtgctgtcagcatcagcatcatcgaaccaggcgaggaggggccaactgcaggctctgtgggaggatcagggctgggaactctagccctggccctggggatcctgggaggcctggggacagccgccctgctcattggggtcatcttgtggcaaaggcggcaacgccgaggagaggagaggaaggccccagaaaaccaggaggaagaggaggagcgtgcagaactgaatcagtcggaggaacctgaggcaggcgagagtagtactggagggccttgaggggcccacagacagatcccatccatcagctcccttttctttttcccttgaactgttctggcctcagaccaactctctcctgtataatctctctcctgtataaccccaccttgccaagctttcttctacaaccagagccccccacaatgatgattaaacacctgacacatcttgc

SEQ ID NO: 253 - DNA, 716 bp, Homo sapiens
  source 1..716: mol_type = genomic DNA
ggaaggaagcaggatggcagccggaacagcagttggagcctgggtgctggtcctcagtctgtggggggcagtagtaggtgctcaaaacatcacagcccggattggcgagccactggtgctgaagtgtaagggggcccccaagaaaccaccccagcggctggaatggaaactgaacacaggccggacagaagcttggaaggtcctgtctccccagggaggaggcccctgggacagtgtggctcgtgtccttcccaacagctccctcttccttccggctgtcgggatccaggatgaggggattttccggtgccaggcaatgaacaggaatggaaaggagaccaagtccaactaccgaagtttgagaaccttcacaattacagcctctgactggatttttcctccttcagagattcctgggaagccagaaattgtagattctgcctctgaactcacggctggtgttcccaataaggtggggacatgtgtgtcagagggaagctaccctgcagggactcttagctggcacttggatgggaagcccctggtgcctaatgagaagggagtatctgtgaaggaacagaccaggagacaccctgagacagggctcttcacactgcagtcggagctaatggtgaccccagcccggggaggagatccccgtcccaccttctcctgtagcttcagcccaggccttccccgacaccgggccttgcgca

SEQ ID NO: 254 - DNA, 665 bp, Homo sapiens
  source 1..665: mol_type = genomic DNA
atggcagccggaacagcagttggagcctgggtgctggtcctcagtctgtggggggcagtagtaggtgctcaaaacatcacagcccaggccttccccgacaccgggccttgcgcacagcccccatccagccccgtgtctgggagcctgtgcctctggaggaggtccaattggtggtggagccagaaggtggagcagtagctcctggtggaaccgtaaccctgacctgtgaagtccctgcccagccctctcctcaaatccactggatgaaggatggtgtgcccttgccccttccccccagccctgtgctgatcctccctgagatagggcctcaggaccagggaacctacagctgtgtggccacccattccagccacgggccccaggaaagccgtgctgtcagcatcagcatcatcgaaccaggcgaggaggggccaactgcaggctctgtgggaggatcagggctgggaactctagccctggccctggggatcctgggaggcctggggacagccgccctgctcattggggtcatcttgtggcaaaggcggcaacgccgaggagaggagaggaaggccccagaaaaccaggaggaagaggaggagcgtgcagaactgaatcagtcggaggaacctgaggcaggcgagagtagtactggagggccttga

SEQ ID NO: 255 - DNA, 1490 bp, Homo sapiens
  source 1..1490: mol_type = genomic DNA
gactgaaagatgggggctggagagagggtgcaggccccacctagggcggaggccacagcagggagaggggcagacagagccaggaccctggaaggaagcaggatggcagccggaacagcagttggagcctgggtgctggtcctcagtctgtggggggcagtagtaggtgctcaaaacatcacagcccggattggcgagccactggtgctgaagtgtaagggggcccccaagaaaccaccccagcggctggaatggaaactgaacacaggccggacagaagcttggaaggtcctgtctccccagggaggaggcccctgggacagtgtggctcgtgtccttcccaacagctccctcttccttccggctgtcgggatccaggatgaggggattttccggtgccaggcaatgaacaggaatggaaaggagaccaagtccaactaccgagtccgtgtctaccagattcctgggaagccagaaattgtagattctgcctctgaactcacggctggtgttcccaataaggtggggacatgtgtgtcagagggaagctaccctgcagggactcttagctggcacttggatgggaagcccctggtgcctaatgagaagggagtatctgtgaaggaacagaccaggagacaccctgagacagggctcttcacactgcagtcggagctaatggtgaccccagcccggggaggagatccccgtcccaccttctcctgtagcttcagcccaggccttccccgacaccgggccttgcgcacagcccccatccagccccgtgtctgggagcctgtgcctctggaggaggtccaattggtggtggagccagaaggtggagcagtagctcctggtggaaccgtaaccctgacctgtgaagtccctgcccagccctctcctcaaatccactggatgaaggatggtgtgcccttgccccttccccccagccctgtgctgatcctccctgagatagggcctcaggaccagggaacctacagctgtgtggccacccattccagccacgggccccaggaaagccgtgctgtcagcatcagcatcatcgaaccaggcgaggaggggccaactgcaggctctgtgggaggatcagggctgggaactctagccctggccctggggatcctgggaggcctggggacagccgccctgctcattggggtcatcttgtggcaaaggcggcaacgccgaggagaggagaggaaggccccagaaaaccaggaggaagaggaggagcgtgcagaactgaatcagtcggaggaacctgaggcaggcgagagtagtactggagggccttgaggggcccacagacagatcccatccatcagctcccttttctttttcccttgaactgttctggcctcagaccaactctctcctgtataatctctctcctgtataaccccaccttgccaagctttcttctacaaccagagccccccacaatgatgattaaacacctgacacatctt

SEQ ID NO: 256 - DNA, 387 bp, Homo sapiens
  source 1..387: mol_type = genomic DNA
atggcagccggaacagcagttggagcctgggtgctggtcctcagtctgtggggggcagtagtaggtgctcaaaacatcacagcccggattggcgagccactggtgctgaagtgtaagggggcccccaagaaaccaccccagcggctggaatggaaactgaacacaggccggacagaagcttggaaggtcctgtctccccagggaggaggcccctgggacagtgtggctcgtgtccttcccaacagctccctcttccttccggctgtcgggatccaggatgaggggattttccggtgccaggcaatgaacaggaatggaaaggagaccaagtccaactaccgagtccgtgtctaccagtttgagaaccttcacaattacagcctctga

SEQ ID NO: 257 - DNA, 493 bp, Homo sapiens
  source 1..493: mol_type = genomic DNA
aggaagcaggatggcagccggaacagcagttggagcctgggtgctggtcctcagtctgtggggggcagtagtaggtgctcaaaacatcacagcccggattggcgagccactggtgctgaagtgtaagggggcccccaagaaaccaccccagcggctggaatggaaactgaacacaggccggacagaagcttggaaggtcctgtctccccagggaggaggcccctgggacagtgtggctcgtgtccttcccaacagctccctcttccttccggctgtcgggatccaggatgaggggatcctgggaggcctggggacagccgccctgctcattggggtcatcttgtggcaaaggcggcaacgccgaggagaggagaggaaggccccagaaaaccaggaggaagaggaggagcgtgcagaactgaatcagtcggaggaacctgaggcaggcgagagtagtactggagggccttgaggggcccacagacagatccca

SEQ ID NO: 258 - DNA, 1371 bp, Homo sapiens
  source 1..1371: mol_type = genomic DNA
atggcagccggaacagcagttggagcctgggtgctggtcctcagtctgtggggtgagccactccctcaaccccactgaccctccctgcagaaagcactttaaccccacaccccagtcgtcctagaacttttcccagaacccgaggaagtgcctttcaaggtccctcacccaccctgtccaaattttgttagccctcattcccttcctacccctctaccatggtgctatctcccaggggcagtagtaggtgctcaaaacatcacagcccggattggcgagccactggtgctgaagtgtaagggggcccccaagaaaccaccccagcggctggaatggaaactgaacacaggccggacagaagcttggaaggtcctgtctccccagggaggaggcccctgggacagtgtggctcgtgtccttcccaacagctccctcttccttccggctgtcgggatccaggatgaggggattttccggtgccaggcaatgaacaggaatggaaaggagaccaagtccaactaccgagtccgtgtctaccagattcctgggaagccagaaattgtagattctgcctctgaactcacggctggtgttcccaataaggtggggacatgtgtgtcagagggaagctaccctgcagggactcttagctggcacttggatgggaagcccctggtgcctaatgagaagggagtatctgtgaaggaacagaccaggagacaccctgagacagggctcttcacactgcagtcggagctaatggtgaccccagcccggggaggagatccccgtcccaccttctcctgtagcttcagcccaggccttccccgacaccgggccttgcgcacagcccccatccagccccgtgtctgggagcctgtgcctctggaggaggtccaattggtggtggagccagaaggtggagcagtagctcctggtggaaccgtaaccctgacctgtgaagtccctgcccagccctctcctcaaatccactggatgaaggatggtgtgcccttgccccttccccccagccctgtgctgatcctccctgagatagggcctcaggaccagggaacctacagctgtgtggccacccattccagccacgggccccaggaaagccgtgctgtcagcatcagcatcatcggctctgtgggaggatcagggctgggaactctagccctggccctggggatcctgggaggcctggggacagccgccctgctcattggggtcatcttgtggcaaaggcggcaacgccgaggagaggagaggaaggccccagaaaaccaggaggaagaggaggagcgtgcagaactgaatcagtcggaggaacctgaggcaggcgagagtagtactggagggccttga

SEQ ID NO: 259 - DNA, 864 bp, Homo sapiens
  source 1..864: mol_type = genomic DNA
aggaagcaggatggcagccggaacagcagttggagcctgggtgctggtcctcagtctgtggggggcagtagtaggtgctcaaaacatcacagcccggattggcgagccactggtgctgaagtgtaagggggcccccaagaaaccaccccagcggctggaatggaaactgaacacaggccggacagaagcttggaaggtcctgtctccccagggaggaggcccctgggacagtgtggctcgtgtccttcccaacagctccctcttccttccggctgtcgggatccaggatgaggggattttccggtgccaggcaatgaacaggaatggaaaggagaccaagtccaattggtggtggagccagaaggtggagcagtagctcctggtggaaccgtaaccctgacctgtgaagtccctgcccagccctctcctcaaatccactggatgaaggatggtgtgcccttgccccttccccccagccctgtgctgatcctccctgagatagggcctcaggaccagggaacctacagctgtgtggccacccattccagccacgggccccaggaaagccgtgctgtcagcatcagcatcatcgaaccaggcgaggaggggccaactgcaggctctgtgggaggatcagggctgggaactctagccctggccctggggatcctgggaggcctggggacagccgccctgctcattggggtcatcttgtggcaaaggcggcaacgccgaggagaggagaggaaggccccagaaaaccaggaggaagaggaggagcgtgcagaactgaatcagtcggaggaacctgaggcaggcgagagtagtactggagggccttgaggggcccacagacagatccca

SEQ ID NO: 260 - DNA, 1249 bp, Homo sapiens
  source 1..1249: mol_type = genomic DNA
aggaagcaggatggcagccggaacagcagttggagcctgggtgctggtcctcagtctgtggggggcagtagtaggtgctcaaaacatcacagcccggattggcgagccactggtgctgaagtgtaagggggcccccaagaaaccaccccagcggctggaatggaaactgaacacaggccggacagaagcttggaaggtcctgtctccccagggaggaggcccctgggacagtgtggctcgtgtccttcccaacagctccctcttccttccggctgtcgggatccaggatgaggggattttccggtgccaggcaatgaacaggaatggaaaggagaccaagtccaactaccgagtccgtgtctaccagattcctgggaagccagaaattgtagattctgcctctgaactcacggctggtgttcccaataaggtagtggaagaaagcaggagaagtagaaaacggccctgtgaacaggaggtggggacatgtgtgtcagagggaagctaccctgcagggactcttagctggcacttggatgggaagcccctggtgcctaatgagaagggagtatctgtgaaggaacagaccaggagacaccctgagacagggctcttcacactgcagtcggagctaatggtgaccccagcccggggaggagatccccgtcccaccttctcctgtagcttcagcccaggccttccccgacaccgggccttgcgcacagcccccatccagccccgtgtctgggagcctgtgcctctggaggaggtccaattggtggtggagccagaaggtggagcagtagctcctggtggaaccgtaaccctgacctgtgaagtccctgcccagccctctcctcaaatccactggatgaaggatggtgtgcccttgccccttccccccagccctgtgctgatcctccctgagatagggcctcaggaccagggaacctacagctgtgtggccacccattccagccacgggccccaggaaagccgtgctgtcagcatcagcatcatcgaaccaggcgaggaggggccaactgcaggtgaggggtttgataaagtcagggaagcagaagatagcccccaacacatgtgactggggggatggtcaacaagaaaggaatggaaggccccagaaaaccaggaggaagaggaggagcgtgcagaactgaatcagtcggaggaacctgaggcaggcgagagtagtactggagggccttgaggggcccacagacagatccca

SEQ ID NO: 261 - DNA, 9390 bp, Homo sapiens
  source 1..9390: mol_type = genomic DNA
ggcaatttcttttcctttctaactgtggcccgcgttgtgctgttgctgggcaggcgttgggcgccggcggtcttcgagcgtgggggcccgctggctttcccttctcagaaactgcgccgggggcgctcgcttgccccggattcggacgcggcgctccccgggctcgtctgaagtgcagatcgccgcagaggccccagtgcccggatgtccatcaggattagcgcgagccaatacgggccgagcccggggctgcgccgaggacgcccggggctcgagagcaggtagtcccgtaacatcggggcgccgcgccgggacgcgtccccgcccggctccgccaaatggtgagcgcggcgctggcagcagggcccgcggggtgaaggcgctcatggacggaagacccctggctctataagctgaattatggcagcccagtcaagtttgtacaatgacgacagaaacctgcttcgaattagagagaaggaaagacgcaaccaggaagcccaccaagagaaagaggcatttcctgaaaagattcccctttttggagagccctacaagacagcaaaaggtgatgagctgtctagtcgaatacagaacatgttgggaaactacgaagaagtgaaggagttccttagtactaagtctcacactcatcgcctggatgcttctgaaaataggttgggaaagccgaaatatcctttaattcctgacaaagggagcagcattccatccagctccttccacactagtgtccaccaccagtccattcacactcctgcgtctggaccactttctgttggcaacattagccacaatccaaagatggcgcagccaagaactgaaccaatgccaagtctccatgccaaaagctgcggcccaccggacagccagcacctgacccaggatcgccttggtcaggaggggttcggctctagtcatcacaagaaaggtgaccgaagagctgacggagaccactgtgcttcggtgacagattcggctccagagagggagctttctcccttaatctctttgccttccccagttccccctttgtcacctatacattccaaccagcaaactcttccccggacgcaaggaagcagcaaggttcatggcagcagcaataacagtaaaggctattgcccagccaaatctcccaaggacctagcagtgaaagtccatgataaagagacccctcaagacagtttggtggcccctgcccagccgccttctcagacatttccacctccctccctcccctcaaaaagtgttgcaatgcagcagaagcccacggcttatgtccggcccatggatggtcaagatcaggcccctagtgaatcccctgaactgaaaccactgccggaggactatcgacagcagacctttgaaaaaacagacttgaaagtgcctgccaaagccaagctcaccaaactgaagatgccttctcagtcagttgagcagacctactccaatgaagtccattgtgttgaagagattctgaaggaaatgacccattcatggccgcctcctttgacagcaatacatacgcctagtacagctgagccatccaagtttcctttccctacaaaggactctcagcatgtcagttctgtaacccaaaaccaaaaacaatatgatacatcttcaaaaactcactcaaattctcagcaaggaacgtcatccatgctcgaagacgaccttcagctcagtgacagtgaggacagtgacagtgaacaaaccccagagaagcctccctcctcatctgcacctccaagtgctccacagtcccttccagaaccagtggcatcagcacattccagcagtgcagagtcagaaagcaccagtgactcagacagttcctcagactcagagagcgagagcagttcaagtgacagcgaagaaaatgagcccctagaaaccccagctccggagcctgagcctccaacaacaaacaaatggcagctggacaactggctgaccaaagtcagccagccagctgcgccaccagagggccccaggagcacagagcccccacggcggcacccagagagtaagggcagcagcgacagtgccacgagtcaggagcattctgaatccaaagatcctccccctaaaagctccagcaaagccccccgggccccacccgaagccccccaccccggaaagaggagctgtcagaagtctccggcacagcaggagcccccacaaaggcaaaccgttggaaccaaacaacccaaaaaacctgtcaaggcctctgcccgggcaggttcacggaccagcctgcagggggaaagggagccagggcttcttccctatggctcccgagaccagacttccaaagacaagcccaaggtgaagacgaaaggacggccccgggccgcagcaagcaacgaacccaagccagcagtgcccccctccagtgagaagaagaagcacaagagctccctccctgccccctctaaggctctctcaggcccagaacccgcgaaggacaatgtggaggacaggacccctgagcactttgctcttgttcccctgactgagagccagggcccaccccacagtggcagcggcagcaggactagtggctgccgccaagccgtggtggtccaggaggacagccgcaaagacagactcccattgcctttgagagacaccaagctgctctcaccgctcagggacactcctcccccacaaagcttgatggtgaagatcaccctagacctgctctctcggataccccagcctcccgggaaggggagccgccagaggaaagcagaagataaacagccgcccgcagggaagaagcacagctctgagaagaggagctcagacagctcaagcaagttggccaaaaagagaaagggtgaagcagaaagagactgtgataacaagaaaatcagactggagaaggaaatcaaatcacagtcatcttcatcttcatcctcccacaaagaatcttctaaaacaaagccctccaggccctcctcacagtcctcaaagaaggaaatgctccccccgccacccgtgtcctcgtcctcccagaagccagccaagcctgcacttaagaggtcaaggcgggaagcagacacctgtggccaggaccctcccaaaagtgccagcagtaccaagagcaaccacaaagactcttccattcccaagcagagaagagtagaggggaagggctccagaagctcctcggagcacaagggttcttccggagatactgcaaatccttttccagtgccttctttgccaaatggtaactctaaaccagggaagcctcaagtgaagtttgacaaacaacaagcagaccttcacatgagggaggcaaaaaagatgaagcagaaagcagagttaatgacggacagggttggaaaggcttttaagtacctggaagccgtcttgtccttcattgagtgcggaattgccacagagtctgaaagccagtcatccaagtcagcttactctgtctactcagaaactgtagatctcattaaattcataatgtcattaaaatccttctcagatgccacagcgccaacacaagagaaaatatttgctgttttatgcatgcgttgccagtccattttgaacatggcgatgtttcgttgtaaaaaagacatagcaataaagtattctcgtactcttaataaacacttcgagagttcttccaaagtcgcccaggcaccttctccatgcattgcaagcacaggcacaccatcccctctttccccaatgccttctcctgccagctccgtagggtcccagtcaagtgctggcagtgtggggagcagtggggtggctgccactatcagcaccccagtcaccatccagaatatgacatcttcctatgtcaccatcacatcccatgttcttaccgcctttgacctttgggaacaggccgaggccctcacgaggaagaataaagaattctttgctcggctcagcacaaatgtgtgcaccttggccctcaacagcagtttggtggacctggtgcactatacacgacagggttttcagcagctacaagaattaaccaaaacaccttaatggagccccaggttgattcaatgccttgggaactatttttgcacattggaagcctcaaaaacagtccagacatttgtttcatcaggacaccaaactctaaaaaagaagcaccacgagatggccaggacatttgtccacttaaactctcaacaacagtgtgatcattggttggacactgtggttatgcagaagcagagatgaggaggctggccccagagatgatcttgcccttcctaactaaaggacagaagtgcaatttagcttaaatgggtgtatgaatggtctagaaacatttctattttttttttaaaccagcaggatacaagttgcaaatgaaatgaggagaaacagtttcaactctgaaagtgaatttcacgtcatctcagtagccacgctagtccattcccagaaggaaatttttttttttaacaatgacttttggtaaagggttttgtggatgattttttttcttttgagttttgggagaaatatttgtttagtaacttctaatggccatctgtaaaccataagtaatgaaggactccactgtgccccactttctgccaatgaacagtggcttgataataccaagtattgttgtaatttataaaattgaaggcaacccccgctcctgccgcccccaatctccccattgcctagagcgctgcacattgaccccagctctgacttctcattactgtgctgaaagtcagcccacgtcggagcggtgaggaggagccacagcacatggggtgccacctcgaggtctgcacaggaggacttggcgctgccatttcctacccctgccatttcccacccctgcttcagcgaaagggactctctaacagggcagtcactgttgactctattctgaatttcctcccttggggaagaagggaaccaacatttatacctgaccagatggctaaagtgcttttaaagttttgtttaagtagagctggaatttgaggtgctgatctgtggtctacagttatgtggtaactcatgttgtccagccaactcagagtttcgtcagtgaacaagaaacatgaaatctgcttcttagagaggctatatttttctgctacaaatattttatatttatagcaaaactagactttcagagtccttgattgtctaggggaagttaactccctgagaggatgtagagatttggggtggttgattagacttttgaaaaactcatcaccacatgccttcactccagagtgttctcagctagatttgatttggttgaggaggaactgtggccctccgtaagttattgccatagtgtatgcattaaaccaagtccattttgaatgacctaaaatgaagtaacacaatcagaaatcccatgtgcccataagcacagatttttctttttcattgaaactttaaaggttattattggaaacattactttgagtgcagtgtttttaaaagccaattcttttttatcccttttagaagtagaatttgcacacttactacaattgaggagtgtcatctctataactttttctccgcctttgtcccattctgcccctgtacatgtttcctaccaagcatgtttcacattttcctattagtggaggagggagaaccatatttatttataatgaagacatctaagatccctatgatgaatgcaggaactctcttggtagtttgtaaatacacaaagggatgtgtcgagggatgggagcgatgcttatctctcacagtgtgagtggtctgtgtgaggctgttccttcagtttcttctccagactgttctttggttgtcactaagtcagaggtctggtccctcatgtttaggtgaaagccagagaatgacagctgtagtcatatctgagcataagaccttgatgtgtgattcctgatgaccggtttcatttattcatgttataaagcaaagccctggtcctttttaaactactagttttaaaaacctgtgttaaatgaacagtaattgcctggtaggtttggtgtgtgtgtagcattgtgtgtccatctgttatatgtaaaggacaaggcaccagaatcaggctttatttcgatattgaagatgttatttaacatctttcttttttccttactcccttagccatcccctccccttttgtcctatcattccctagaacaagccacctgtcaattgtgaagggttgtgttctttatggcaggttctatgcagattgtgccagagcatgtgcgtgttctgttggcaagccacagtgctcccttgactgaagacatttccaggtagatttctcagccagctctaaaacagattgctttttcagtggccttactctttgtgggtttttttttttttctctgaacttgatataaagattttatttgtcccttgaaaaagtaacaaatgtgcatagatcaatttgtactactttggtcattggatatttctgatccttattgcattgtacctaaaggagagtaactaatggtaacctttttaatagagtatgtgaaaggtagtggctgatgaatccttaacgttcatagggtctttttgctgttacggttgtatatagaggtctgaaggatttttaaaatgatttgcactttttcactgcatgcttacaattcccaaaggcaaaatctgtactgaggtagatcatttgaaagggctagattataaaattaagccttagagtatggaaagttcttataacaataatagtacacacttcagagtaagacaaatgcaaagcatcttaaggagtgaaaatagagtgtaaatcttgcctttggcactacaaggtgtgtgtgtgtgtgtgtgtgtgtgtgtgtgtctttagtaggaaatggaagaacactgttttattttttaaagtgtttaatgtttctgtcctttctgtgaattattgaatttaagagccctgctaaataatgaaaaaacactttactaaaatttatcaaattatactgggttcggattgtgaaaacattggccacctagtagcagtggtgaggagtgggagggcccagcaagcatttatcagaaatagaatcacaataggaggagaatttgactgtctgatattatgatttgattacaatactgaatgggaaaagtatctaatattttgtaacaaaaagaccttcatattatctgttttgaccaaaatatgtagctatttcccttacacagattggaccgcacttatctcccttgtcctgtatcctttaatttcaggtctcaggatgtttagaaagctaaaaccccctacccctttctggctgaaaacttgccttatttggtatcttacacattaatgttactagcatcaggagcttactgttttattatgattcatcttcagtaatttttagaagcaagaagaaagccattgtgtcctctacaattaacaaaacttatctctgatatacaaagggatataaatatatacacttaaatagagaaaaagaggttgattgaattgtgcctttgagtgaacccagtttttaaataccgctgtgtttgtttcgccatggcttcagggatgctacatggctcttgcaccttttactcctctgctttatgaagtttgagttgtatttgtgcatcttaaagtaggttgaggcttgaggctgggctttcgggtttttttgttttttgttttgttttgttttgttttgttttcttgtacttaaacctgcttgcttcctaccacagattctttattttcccaaacactacaaaaaaacttttaaaactttgccatttcatctgtttacactctttgccactgattagcagtatttaaatcttgcaagaatattttgtgctttctttagaaacacaagagtatagatttttctcactgaaaagtgagagttacgcattgcagccatgaagggatgctaggatcaattatggcagtaccttttttcccctcctgttcttgagccagttgtctcttttgttttgggtcccacttaggattaatggatgtaaggtattttcctgtgcctttattttgtgtcattctattggaaggaggtgtaacggcagaatagcatcgtgttgggggttttccttcaaacactgcaagtgatattgccaccatgtgaacctcaaatatgcaatccagttgtgttggtttctcggtgacttggagtgttcatctcttcatgaattgtgagcactgaccatgttcttcagttcttaattatggtgagttgacaaataccaactactgcttttctttaggtggctataaatttcttactgtcaggaggaaatgacattatattctgttccactgaacgtcagagatcagcaggcactgtactgggtagagaagtgcctatacttctctacctaagagggcaggagggaaaccctacagctccttgtgagcctatatattagtatatcggcctggagaggacaagggaataagaccactcatagtgaggctggccaagctgcactggtcggaccaggcagtggctgacctaaggaagacaacttgctttgcttaaaagtagattttttaagcaatgcttaacacaggcagcattcacctttgttcaggccatcgacatgtattgttaaaattactgcatatccccctcagatatcaagtatacactgttcatgttggggttgtgtgtgtgtatgtgtgtatgtacgcacgcatgtgtcccaaatcttgttttaattttttttttctgaatgtgatcatgttttggatgatacctgagcagggttgccttttttttatttattaccattatatattatattatattatattatatattttttgctttcttataactttggaggaaagtcaaatcttggtattattaaaattgttttaaaaaggagtaaattttccagttgataaatgaaaatcactggcctatgtttaataagtttttctttaattactgtggaataacgtgccagctatcatcaacacaatgattttgtacatagggtagggaagcagtgatgctctcaatgggaagatgtgcaacacaaattaaggggaactccatgtattttacctacttcagcaatggaactgcaacttggggctttgtgaataaaatttagctgccttgtatagtcgtttgaaagaatatgtgatctgtgagagaattatagtttttttttagaagaaaaatctgcaaaagatctttccaaagacaatgtgccacagatcttttgttctctgtaatgaggattaattgctgtttaaacaaaaatgtaattgttcatctttaaattctttccttttcataagaggatcaagctgtaaaaaaacaaaaaaattaataaaaatttcgagaaatc

SEQ ID NO: 262 - DNA, 1538 bp, Homo sapiens
  source 1..1538: mol_type = genomic DNA
gagcttgccagccagctagcgagcgacgggcgcgcgcggcccctgcgcactcggccgccgcctgcgcgcgttgcggccgcagctgcacctttgcctccgcggttccgcagccgagccccgggaggaggcgctcccctgcgtcgtccgcacttgcgccctttcccaccgcaacaggtcaggggagggcggaggtgacgagggcgcccgacccgggactagaggacggaagggtctggaagatgaacagactagccactttgcattgactggaaacaatggcatttacagaaagagtcaacagcagtggcaacagtttgtacaatgacgacagaaacctgcttcgaattagagagaaggaaagacgcaaccaggaagcccaccaagagaaagaggcatttcctgaaaagattcccctttttggagagccctacaagacagcaaaaggtgatgagctgtctagtcgaatacagaacatgttgggaaactacgaagaagtgaaggagttccttagtactaagtctcacactcatcgcctggatgcttctgaaaataggttgggaaagccgaaatatcctttaattcctgacaaagggagcagcattccatccagctccttccacactagtgtccaccaccagtccattcacactcctgcgtctggaccactttctgttggcaacattagccacaatccaaagatggcgcagccaagaactgaaccaatgccaagtctccatgccaaaagctgcggcccaccggacagccagcacctgacccaggatcgccttggtcaggaggggttcggctctagtcatcacaagaaaggtgaccgaagagctgacggagaccactgtgcttcggtgacagattcggctccagagagggagctttctcccttaatctctttgccttccccagttccccctttgtcacctatacattccaaccagcaaactcttccccggacgcaaggaagcagcaaggttcatggcagcagcaataacagtaaaggctattgcccagccaaatctcccaaggacctagcagtgaaagtccatgataaagagacccctcaagacagtttggtggcccctgcccagccgccttctcagacatttccacctccctccctcccctcaaaaagtgttgcaatgcagcagaagcccacggcttatgtccggcccatggatggtcaagatcaggcccctagtgaatcccctgaactgaaaccactgccggaggactatcgacagcagacctttgaaaaaacagacttgaaagtgcctgccaaagccaagctcaccaaactgaagatgccttctcagtcagttgagcagacctactccaatgaagtccattgtgttgaagagattctgaaggactctcagcatgtcagttctgtaacccaaaaccaaaaacaatatgatacatcttcaaaaactcactcaaattctcagcaaggaacgtcatccatgctcgaagacgaccttcagctcagtgacagtgaggacagtgacagtgaacaaaccccagctccg

SEQ ID NO: 263 - DNA, 9285 bp, Homo sapiens
  source 1..9285: mol_type = genomic DNA
gagcttgccagccagctagcgagcgacgggcgcgcgcggcccctgcgcactcggccgccgcctgcgcgcgttgcggccgcagctgcacctttgcctccgcggttccgcagccgagccccgggaggaggcgctcccctgcgtcgtccgcacttgcgccctttcccaccgcaacaggtcaggggagggcggaggtgacgagggcgcccgacccgggactagaggacggaagggtctggaagatgaacagactagccactttgcattgactggaaacaatggcatttacagaaagagtcaacagcagtggcaacagtttgtacaatgacgacagaaacctgcttcgaattagagagaaggaaagacgcaaccaggaagcccaccaagagaaagaggcatttcctgaaaagattcccctttttggagagccctacaagacagcaaaaggtgatgagctgtctagtcgaatacagaacatgttgggaaactacgaagaagtgaaggagttccttagtactaagtctcacactcatcgcctggatgcttctgaaaataggttgggaaagccgaaatatcctttaattcctgacaaagggagcagcattccatccagctccttccacactagtgtccaccaccagtccattcacactcctgcgtctggaccactttctgttggcaacattagccacaatccaaagatggcgcagccaagaactgaaccaatgccaagtctccatgccaaaagctgcggcccaccggacagccagcacctgacccaggatcgccttggtcaggaggggttcggctctagtcatcacaagaaaggtgaccgaagagctgacggagaccactgtgcttcggtgacagattcggctccagagagggagctttctcccttaatctctttgccttccccagttccccctttgtcacctatacattccaaccagcaaactcttccccggacgcaaggaagcagcaaggttcatggcagcagcaataacagtaaaggctattgcccagccaaatctcccaaggacctagcagtgaaagtccatgataaagagacccctcaagacagtttggtggcccctgcccagccgccttctcagacatttccacctccctccctcccctcaaaaagtgttgcaatgcagcagaagcccacggcttatgtccggcccatggatggtcaagatcaggcccctagtgaatcccctgaactgaaaccactgccggaggactatcgacagcagacctttgaaaaaacagacttgaaagtgcctgccaaagccaagctcaccaaactgaagatgccttctcagtcagttgagcagacctactccaatgaagtccattgtgttgaagagattctgaaggaaatgacccattcatggccgcctcctttgacagcaatacatacgcctagtacagctgagccatccaagtttcctttccctacaaaggactctcagcatgtcagttctgtaacccaaaaccaaaaacaatatgatacatcttcaaaaactcactcaaattctcagcaaggaacgtcatccatgctcgaagacgaccttcagctcagtgacagtgaggacagtgacagtgaacaaaccccagagaagcctccctcctcatctgcacctccaagtgctccacagtcccttccagaaccagtggcatcagcacattccagcagtgcagagtcagaaagcaccagtgactcagacagttcctcagactcagagagcgagagcagttcaagtgacagcgaagaaaatgagcccctagaaaccccagctccggagcctgagcctccaacaacaaacaaatggcagctggacaactggctgaccaaagtcagccagccagctgcgccaccagagggccccaggagcacagagcccccacggcggcacccagagagtaagggcagcagcgacagtgccacgagtcaggagcattctgaatccaaagatcctccccctaaaagctccagcaaagccccccgggccccacccgaagccccccaccccggaaagaggagctgtcagaagtctccggcacagcaggagcccccacaaaggcaaaccgttggaaccaaacaacccaaaaaacctgtcaaggcctctgcccgggcaggttcacggaccagcctgcagggggaaagggagccagggcttcttccctatggctcccgagaccagacttccaaagacaagcccaaggtgaagacgaaaggacggccccgggccgcagcaagcaacgaacccaagccagcagtgcccccctccagtgagaagaagaagcacaagagctccctccctgccccctctaaggctctctcaggcccagaacccgcgaaggacaatgtggaggacaggacccctgagcactttgctcttgttcccctgactgagagccagggcccaccccacagtggcagcggcagcaggactagtggctgccgccaagccgtggtggtccaggaggacagccgcaaagacagactcccattgcctttgagagacaccaagctgctctcaccgctcagggacactcctcccccacaaagcttgatggtgaagatcaccctagacctgctctctcggataccccagcctcccgggaaggggagccgccagaggaaagcagaagataaacagccgcccgcagggaagaagcacagctctgagaagaggagctcagacagctcaagcaagttggccaaaaagagaaagggtgaagcagaaagagactgtgataacaagaaaatcagactggagaaggaaatcaaatcacagtcatcttcatcttcatcctcccacaaagaatcttctaaaacaaagccctccaggccctcctcacagtcctcaaagaaggaaatgctccccccgccacccgtgtcctcgtcctcccagaagccagccaagcctgcacttaagaggtcaaggcgggaagcagacacctgtggccaggaccctcccaaaagtgccagcagtaccaagagcaaccacaaagactcttccattcccaagcagagaagagtagaggggaagggctccagaagctcctcggagcacaagggttcttccggagatactgcaaatccttttccagtgccttctttgccaaatggtaactctaaaccagggaagcctcaagtgaagtttgacaaacaacaagcagaccttcacatgagggaggcaaaaaagatgaagcagaaagcagagttaatgacggacagggttggaaaggcttttaagtacctggaagccgtcttgtccttcattgagtgcggaattgccacagagtctgaaagccagtcatccaagtcagcttactctgtctactcagaaactgtagatctcattaaattcataatgtcattaaaatccttctcagatgccacagcgccaacacaagagaaaatatttgctgttttatgcatgcgttgccagtccattttgaacatggcgatgtttcgttgtaaaaaagacatagcaataaagtattctcgtactcttaataaacacttcgagagttcttccaaagtcgcccaggcaccttctccatgcattgcaagaagcacaggcacaccatcccctctttccccaatgccttctcctgccagctccgtagggtcccagtcaagtgctggcagtgtggggagcagtggggtggctgccactatcagcaccccagtcaccatccagaatatgacatcttcctatgtcaccatcacatcccatgttcttaccgcctttgacctttgggaacaggccgaggccctcacgaggaagaataaagaattctttgctcggctcagcacaaatgtgtgcaccttggccctcaacagcagtttggtggacctggtgcactatacacgacagggttttcagcagctacaagaattaaccaaaacaccttaatggagccccaggttgattcaatgccttgggaactatttttgcacattggaagcctcaaaaacagtccagacatttgtttcatcaggacaccaaactctaaaaaagaagcaccacgagatggccaggacatttgtccacttaaactctcaacaacagtgtgatcattggttggacactgtggttatgcagaagcagagatgaggaggctggccccagagatgatcttgcccttcctaactaaaggacagaagtgcaatttagcttaaatgggtgtatgaatggtctagaaacatttctattttttttttaaaccagcaggatacaagttgcaaatgaaatgaggagaaacagtttcaactctgaaagtgaatttcacgtcatctcagtagccacgctagtccattcccagaaggaaatttttttttttaacaatgacttttggtaaagggttttgtggatgattttttttcttttgagttttgggagaaatatttgtttagtaacttctaatggccatctgtaaaccataagtaatgaaggactccactgtgccccactttctgccaatgaacagtggcttgataataccaagtattgttgtaatttataaaattgaaggcaacccccgctcctgccgcccccaatctccccattgcctagagcgctgcacattgaccccagctctgacttctcattactgtgctgaaagtcagcccacgtcggagcggtgaggaggagccacagcacatggggtgccacctcgaggtctgcacaggaggacttggcgctgccatttcctacccctgccatttcccacccctgcttcagcgaaagggactctctaacagggcagtcactgttgactctattctgaatttcctcccttggggaagaagggaaccaacatttatacctgaccagatggctaaagtgcttttaaagttttgtttaagtagagctggaatttgaggtgctgatctgtggtctacagttatgtggtaactcatgttgtccagccaactcagagtttcgtcagtgaacaagaaacatgaaatctgcttcttagagaggctatatttttctgctacaaatattttatatttatagcaaaactagactttcagagtccttgattgtctaggggaagttaactccctgagaggatgtagagatttggggtggttgattagacttttgaaaaactcatcaccacatgccttcactccagagtgttctcagctagatttgatttggttgaggaggaactgtggccctccgtaagttattgccatagtgtatgcattaaaccaagtccattttgaatgacctaaaatgaagtaacacaatcagaaatcccatgtgcccataagcacagatttttctttttcattgaaactttaaaggttattattggaaacattactttgagtgcagtgtttttaaaagccaattcttttttatcccttttagaagtagaatttgcacacttactacaattgaggagtgtcatctctataactttttctccgcctttgtcccattctgcccctgtacatgtttcctaccaagcatgtttcacattttcctattagtggaggagggagaaccatatttatttataatgaagacatctaagatccctatgatgaatgcaggaactctcttggtagtttgtaaatacacaaagggatgtgtcgagggatgggagcgatgcttatctctcacagtgtgagtggtctgtgtgaggctgttccttcagtttcttctccagactgttctttggttgtcactaagtcagaggtctggtccctcatgtttaggtgaaagccagagaatgacagctgtagtcatatctgagcataagaccttgatgtgtgattcctgatgaccggtttcatttattcatgttataaagcaaagccctggtcctttttaaactactagttttaaaaacctgtgttaaatgaacagtaattgcctggtaggtttggtgtgtgtgtagcattgtgtgtccatctgttatatgtaaaggacaaggcaccagaatcaggctttatttcgatattgaagatgttatttaacatctttcttttttccttactcccttagccatcccctccccttttgtcctatcattccctagaacaagccacctgtcaattgtgaagggttgtgttctttatggcaggttctatgcagattgtgccagagcatgtgcgtgttctgttggcaagccacagtgctcccttgactgaagacatttccaggtagatttctcagccagctctaaaacagattgctttttcagtggccttactctttgtgggtttttttttttttctctgaacttgatataaagattttatttgtcccttgaaaaagtaacaaatgtgcatagatcaatttgtactactttggtcattggatatttctgatccttattgcattgtacctaaaggagagtaactaatggtaacctttttaatagagtatgtgaaaggtagtggctgatgaatccttaacgttcatagggtctttttgctgttacggttgtatatagaggtctgaaggatttttaaaatgatttgcactttttcactgcatgcttacaattcccaaaggcaaaatctgtactgaggtagatcatttgaaagggctagattataaaattaagccttagagtatggaaagttcttataacaataatagtacacacttcagagtaagacaaatgcaaagcatcttaaggagtgaaaatagagtgtaaatcttgcctttggcactacaaggtgtgtgtgtgtgtgtgtgtgtgtgtgtgtgtctttagtaggaaatggaagaacactgttttattttttaaagtgtttaatgtttctgtcctttctgtgaattattgaatttaagagccctgctaaataatgaaaaaacactttactaaaatttatcaaattatactgggttcggattgtgaaaacattggccacctagtagcagtggtgaggagtgggagggcccagcaagcatttatcagaaatagaatcacaataggaggagaatttgactgtctgatattatgatttgattacaatactgaatgggaaaagtatctaatattttgtaacaaaaagaccttcatattatctgttttgaccaaaatatgtagctatttcccttacacagattggaccgcacttatctcccttgtcctgtatcctttaatttcaggtctcaggatgtttagaaagctaaaaccccctacccctttctggctgaaaacttgccttatttggtatcttacacattaatgttactagcatcaggagcttactgttttattatgattcatcttcagtaatttttagaagcaagaagaaagccattgtgtcctctacaattaacaaaacttatctctgatatacaaagggatataaatatatacacttaaatagagaaaaagaggttgattgaattgtgcctttgagtgaacccagtttttaaataccgctgtgtttgtttcgccatggcttcagggatgctacatggctcttgcaccttttactcctctgctttatgaagtttgagttgtatttgtgcatcttaaagtaggttgaggcttgaggctgggctttcgggtttttttgttttttgttttgttttgttttgttttgttttcttgtacttaaacctgcttgcttcctaccacagattctttattttcccaaacactacaaaaaaacttttaaaactttgccatttcatctgtttacactctttgccactgattagcagtatttaaatcttgcaagaatattttgtgctttctttagaaacacaagagtatagatttttctcactgaaaagtgagagttacgcattgcagccatgaagggatgctaggatcaattatggcagtaccttttttcccctcctgttcttgagccagttgtctcttttgttttgggtcccacttaggattaatggatgtaaggtattttcctgtgcctttattttgtgtcattctattggaaggaggtgtaacggcagaatagcatcgtgttgggggttttccttcaaacactgcaagtgatattgccaccatgtgaacctcaaatatgcaatccagttgtgttggtttctcggtgacttggagtgttcatctcttcatgaattgtgagcactgaccatgttcttcagttcttaattatggtgagttgacaaataccaactactgcttttctttaggtggctataaatttcttactgtcaggaggaaatgacattatattctgttccactgaacgtcagagatcagcaggcactgtactgggtagagaagtgcctatacttctctacctaagagggcaggagggaaaccctacagctccttgtgagcctatatattagtatatcggcctggagaggacaagggaataagaccactcatagtgaggctggccaagctgcactggtcggaccaggcagtggctgacctaaggaagacaacttgctttgcttaaaagtagattttttaagcaatgcttaacacaggcagcattcacctttgttcaggccatcgacatgtattgttaaaattactgcatatccccctcagatatcaagtatacactgttcatgttggggttgtgtgtgtgtatgtgtgtatgtacgcacgcatgtgtcccaaatcttgttttaattttttttttctgaatgtgatcatgttttggatgatacctgagcagggttgccttttttttatttattaccattatatattatattatattatattatatattttttgctttcttataactttggaggaaagtcaaatcttggtattattaaaattgttttaaaaaggagtaaattttccagttgataaatgaaaatcactggcctatgtttaataagtttttctttaattactgtggaataacgtgccagctatcatcaacacaatgattttgtacatagggtagggaagcagtgatgctctcaatgggaagatgtgcaacacaaattaaggggaactccatgtattttacctacttcagcaatggaactgcaacttggggctttgtgaataaaatttagctgccttgtatagtcgtttgaaagaatatgtgatctgtgagagaattatagtttttttttagaagaaaaatctgcaaaagatctttccaaagacaatgtgccacagatcttttgttctctgtaatgaggattaattgctgtttaaacaaaaatgtaattgttcatctttaaattctttccttttcataagaggatcaagctgtaaaaaaacaaaaaaattaataaaaatttcgagaaatcattggggttgaatcca

SEQ ID NO: 264 - DNA, 1486 bp, Homo sapiens
  source 1..1486: mol_type = genomic DNA
agccagctagcgagcgacgggcgcgcgcggcccctgcgcactcggccgccgcctgcgcgcgttgcggccgcagctgcacctttgcctccgcggttccgcagccgagccccgggaggaggcgctcccctgcgtcgtccgcacttgcgccctttcccaccgcaacaggtcaggggagggcggaggtgacgagggcgcccgacccgggactagaggacggaagggtctggaagatgaacagactagccactttgcattgactggaaacaatggcatttacagaaagagtcaacagcagtggcaacagtttgtacaatgacgacagaaacctgcttcgaattagagagaaggaaagacgcaaccaggaagcccaccaagagaaagaggcatttcctgaaaagattcccctttttggagagccctacaagacagcaaaaggtgatgagctgtctagtcgaatacagaacatgttgggaaactacgaagaagtgaaggagttccttagtactaagtctcacactcatcgcctggatgcttctgaaaataggttgggaaagccgaaatatcctttaattcctgacaaagggagcagcattccatccagctccttccacactagtgtccaccaccagtccattcacactcctgcgtctggaccactttctgttggcaacattagccacaatccaaagatggcgcagccaagaactgaaccaatgccaagtctccatgccaaaagctgcggcccaccggacagccagcacctgacccaggatcgccttggtcaggaggggttcggctctagtcatcacaagaaaggtgaccgaagagctgacggagaccactgtgcttcggtgacagattcggctccagagagggagctttctcccttaatctctttgccttccccagttccccctttgtcacctatacattccaaccagcaaactcttccccggacgcaaggaagcagcaaggttcatggcagcagcaataacagtaaaggctattgcccagccaaatctcccaaggacctagcagtgaaagtccatgataaagagacccctcaagacagtttggtggcccctgcccagccgccttctcagacatttccacctccctccctcccctcaaaaagtgttgcaatgcagcagaagcccacggcttatgtccggcccatggatggtcaagatcaggcccctagtgaatcccctgaactgaaaccactgccggaggactatcgacagcagacctttgaaaaaacagacttgaaagtgcctgccaaagccaagctcaccaaactgaagatgccttctcagtcagttgagacctactccaatgaagtccattgtgttgaagagattctgaaggaaatgacccattcatggccgcctcctttgacagcaatacatacgcctagtacagctgagccatccaagtttcctttccctacaaaggactctcagcatgtcagttctgtaacccaaaa

SEQ ID NO: 265 - DNA, 9279 bp, Homo sapiens
  source 1..9279: mol_type = genomic DNA
gagcttgccagccagctagcgagcgacgggcgcgcgcggcccctgcgcactcggccgccgcctgcgcgcgttgcggccgcagctgcacctttgcctccgcggttccgcagccgagccccgggaggaggcgctcccctgcgtcgtccgcacttgcgccctttcccaccgcaacaggtcaggggagggcggaggtgacgagggcgcccgacccgggactagaggacggaagggtctggaagatgaacagactagccactttgcattgactggaaacaatggcatttacagaaagagtcaacagcagtggcaacagtttgtacaatgacgacagaaacctgcttcgaattagagagaaggaaagacgcaaccaggaagcccaccaagagaaagaggcatttcctgaaaagattcccctttttggagagccctacaagacagcaaaaggtgatgagctgtctagtcgaatacagaacatgttgggaaactacgaagaagtgaaggagttccttagtactaagtctcacactcatcgcctggatgcttctgaaaataggttgggaaagccgaaatatcctttaattcctgacaaagggagcagcattccatccagctccttccacactagtgtccaccaccagtccattcacactcctgcgtctggaccactttctgttggcaacattagccacaatccaaagatggcgcagccaagaactgaaccaatgccaagtctccatgccaaaagctgcggcccaccggacagccagcacctgacccaggatcgccttggtcaggaggggttcggctctagtcatcacaagaaaggtgaccgaagagctgacggagaccactgtgcttcggtgacagattcggctccagagagggagctttctcccttaatctctttgccttccccagttccccctttgtcacctatacattccaaccagcaaactcttccccggacgcaaggaagcagcaaggttcatggcagcagcaataacagtaaaggctattgcccagccaaatctcccaaggacctagcagtgaaagtccatgataaagagacccctcaagacagtttggtggcccctgcccagccgccttctcagacatttccacctccctccctcccctcaaaaagtgttgcaatgcagcagaagcccacggcttatgtccggcccatggatggtcaagatcaggcccctagtgaatcccctgaactgaaaccactgccggaggactatcgacagcagacctttgaaaaaacagacttgaaagtgcctgccaaagccaagctcaccaaactgaagatgccttctcagtcagttgagcagacctactccaatgaagtccattgtgttgaagagattctgaaggaaatgacccattcatggccgcctcctttgacagcaatacatacgcctagtacagctgagccatccaagtttcctttccctacaaaggactctcagcatgtcagttctgtaacccaaaaccaaaaacaatatgatacatcttcaaaaactcactcaaattctcagcaaggaacgtcatccatgctcgaagacgaccttcagctcagtgacagtgaggacagtgacagtgaacaaaccccagagaagcctccccatctgcacctccaagtgctccacagtcccttccagaaccagtggcatcagcacattccagcagtgcagagtcagaaagcaccagtgactcagacagttcctcagactcagagagcgagagcagttcaagacagcgaagaaaatgagcccctagaaaccccagctccggagcctgagcctccaacaacaaacaaatggcagctggacaactggctgaccaaagtcagccagccagctgcgccaccagagggccccaggagcacagagcccccacggcggcacccagagagtaagggcagcagcgacagtgccacgagtcaggagcattctgaatccaaagatcctccccctaaaagctccagcaaagccccccgggccccacccgaagccccccaccccggaaagaggagctgtcagaagtctccggcacagcaggagcccccacaaaggcaaaccgttggaaccaaacaacccaaaaaacctgtcaaggcctctgcccgggcaggttcacggaccagcctgcagggggaaagggagccagggcttcttccctatggctcccgagaccagacttccaaagacaagcccaaggtgaagacgaaaggacggccccgggccgcagcaagcaacgaacccaagccagcagtgcccccctccagtgagaagaagaagcacaagagctccctccctgccccctctaaggctctctcaggcccagaacccgcgaaggacaatgtggaggacaggacccctgagcactttgctcttgttcccctgactgagagccagggcccaccccacagtggcagcggcagcaggactagtggctgccgccaagccgtggtggtccaggaggacagccgcaaagacagactcccattgcctttgagagacaccaagctgctctcaccgctcagggacactcctcccccacaaagcttgatggtgaagatcaccctagacctgctctctcggataccccagcctcccgggaaggggagccgccagaggaaagcagaagataaacagccgcccgcagggaagaagcacagctctgagaagaggagctcagacagctcaagcaagttggccaaaaagagaaagggtgaagcagaaagagactgtgataacaagaaaatcagactggagaaggaaatcaaatcacagtcatcttcatcttcatcctcccacaaagaatcttctaaaacaaagccctccaggccctcctcacagtcctcaaagaaggaaatgctccccccgccacccgtgtcctcgtcctcccagaagccagccaagcctgcacttaagaggtcaaggcgggaagcagacacctgtggccaggaccctcccaaaagtgccagcagtaccaagagcaaccacaaagactcttccattcccaagcagagaagagtagaggggaagggctccagaagctcctcggagcacaagggttcttccggagatactgcaaatccttttccagtgccttctttgccaaatggtaactctaaaccagggaagcctcaagtgaagtttgacaaacaacaagcagaccttcacatgagggaggcaaaaaagatgaagcagaaagcagagttaatgacggacagggttggaaaggcttttaagtacctggaagccgtcttgtccttcattgagtgcggaattgccacagagtctgaaagccagtcatccaagtcagcttactctgtctactcagaaactgtagatctcattaaattcataatgtcattaaaatccttctcagatgccacagcgccaacacaagagaaaatatttgctgttttatgcatgcgttgccagtccattttgaacatggcgatgtttcgttgtaaaaaagacatagcaataaagtattctcgtactcttaataaacacttcgagagttcttccaaagtcgcccaggcaccttctccatgcattgcaagaagcacaggcacaccatcccctctttccccaatgccttctcctgccagctccgtagggtcccagtcaagtgctggcagtgtggggagcagtggggtggctgccactatcagcaccccagtcaccatccagaatatgacatcttcctatgtcaccatcacatcccatgttcttaccgcctttgacctttgggaacaggccgaggccctcacgaggaagaataaagaattctttgctcggctcagcacaaatgtgtgcaccttggccctcaacagcagtttggtggacctggtgcactatacacgacagggttttcagcagctacaagaattaaccaaaacaccttaatggagccccaggttgattcaatgccttgggaactatttttgcacattggaagcctcaaaaacagtccagacatttgtttcatcaggacaccaaactctaaaaaagaagcaccacgagatggccaggacatttgtccacttaaactctcaacaacagtgtgatcattggttggacactgtggttatgcagaagcagagatgaggaggctggccccagagatgatcttgcccttcctaactaaaggacagaagtgcaatttagcttaaatgggtgtatgaatggtctagaaacatttctattttttttttaaaccagcaggatacaagttgcaaatgaaatgaggagaaacagtttcaactctgaaagtgaatttcacgtcatctcagtagccacgctagtccattcccagaaggaaatttttttttttaacaatgacttttggtaaagggttttgtggatgattttttttcttttgagttttgggagaaatatttgtttagtaacttctaatggccatctgtaaaccataagtaatgaaggactccactgtgccccactttctgccaatgaacagtggcttgataataccaagtattgttgtaatttataaaattgaaggcaacccccgctcctgccgcccccaatctccccattgcctagagcgctgcacattgaccccagctctgacttctcattactgtgctgaaagtcagcccacgtcggagcggtgaggaggagccacagcacatggggtgccacctcgaggtctgcacaggaggacttggcgctgccatttcctacccctgccatttcccacccctgcttcagcgaaagggactctctaacagggcagtcactgttgactctattctgaatttcctcccttggggaagaagggaaccaacatttatacctgaccagatggctaaagtgcttttaaagttttgtttaagtagagctggaatttgaggtgctgatctgtggtctacagttatgtggtaactcatgttgtccagccaactcagagtttcgtcagtgaacaagaaacatgaaatctgcttcttagagaggctatatttttctgctacaaatattttatatttatagcaaaactagactttcagagtccttgattgtctaggggaagttaactccctgagaggatgtagagatttggggtggttgattagacttttgaaaaactcatcaccacatgccttcactccagagtgttctcagctagatttgatttggttgaggaggaactgtggccctccgtaagttattgccatagtgtatgcattaaaccaagtccattttgaatgacctaaaatgaagtaacacaatcagaaatcccatgtgcccataagcacagatttttctttttcattgaaactttaaaggttattattggaaacattactttgagtgcagtgtttttaaaagccaattcttttttatcccttttagaagtagaatttgcacacttactacaattgaggagtgtcatctctataactttttctccgcctttgtcccattctgcccctgtacatgtttcctaccaagcatgtttcacattttcctattagtggaggagggagaaccatatttatttataatgaagacatctaagatccctatgatgaatgcaggaactctcttggtagtttgtaaatacacaaagggatgtgtcgagggatgggagcgatgcttatctctcacagtgtgagtggtctgtgtgaggctgttccttcagtttcttctccagactgttctttggttgtcactaagtcagaggtctggtccctcatgtttaggtgaaagccagagaatgacagctgtagtcatatctgagcataagaccttgatgtgtgattcctgatgaccggtttcatttattcatgttataaagcaaagccctggtcctttttaaactactagttttaaaaacctgtgttaaatgaacagtaattgcctggtaggtttggtgtgtgtgtagcattgtgtgtccatctgttatatgtaaaggacaaggcaccagaatcaggctttatttcgatattgaagatgttatttaacatctttcttttttccttactcccttagccatcccctccccttttgtcctatcattccctagaacaagccacctgtcaattgtgaagggttgtgttctttatggcaggttctatgcagattgtgccagagcatgtgcgtgttctgttggcaagccacagtgctcccttgactgaagacatttccaggtagatttctcagccagctctaaaacagattgctttttcagtggccttactctttgtgggtttttttttttttctctgaacttgatataaagattttatttgtcccttgaaaaagtaacaaatgtgcatagatcaatttgtactactttggtcattggatatttctgatccttattgcattgtacctaaaggagagtaactaatggtaacctttttaatagagtatgtgaaaggtagtggctgatgaatccttaacgttcatagggtctttttgctgttacggttgtatatagaggtctgaaggatttttaaaatgatttgcactttttcactgcatgcttacaattcccaaaggcaaaatctgtactgaggtagatcatttgaaagggctagattataaaattaagccttagagtatggaaagttcttataacaataatagtacacacttcagagtaagacaaatgcaaagcatcttaaggagtgaaaatagagtgtaaatcttgcctttggcactacaaggtgtgtgtgtgtgtgtgtgtgtgtgtgtgtgtctttagtaggaaatggaagaacactgttttattttttaaagtgtttaatgtttctgtcctttctgtgaattattgaatttaagagccctgctaaataatgaaaaaacactttactaaaatttatcaaattatactgggttcggattgtgaaaacattggccacctagtagcagtggtgaggagtgggagggcccagcaagcatttatcagaaatagaatcacaataggaggagaatttgactgtctgatattatgatttgattacaatactgaatgggaaaagtatctaatattttgtaacaaaaagaccttcatattatctgttttgaccaaaatatgtagctatttcccttacacagattggaccgcacttatctcccttgtcctgtatcctttaatttcaggtctcaggatgtttagaaagctaaaaccccctacccctttctggctgaaaacttgccttatttggtatcttacacattaatgttactagcatcaggagcttactgttttattatgattcatcttcagtaatttttagaagcaagaagaaagccattgtgtcctctacaattaacaaaacttatctctgatatacaaagggatataaatatatacacttaaatagagaaaaagaggttgattgaattgtgcctttgagtgaacccagtttttaaataccgctgtgtttgtttcgccatggcttcagggatgctacatggctcttgcaccttttactcctctgctttatgaagtttgagttgtatttgtgcatcttaaagtaggttgaggcttgaggctgggctttcgggtttttttgttttttgttttgttttgttttgttttgttttcttgtacttaaacctgcttgcttcctaccacagattctttattttcccaaacactacaaaaaaacttttaaaactttgccatttcatctgtttacactctttgccactgattagcagtatttaaatcttgcaagaatattttgtgctttctttagaaacacaagagtatagatttttctcactgaaaagtgagagttacgcattgcagccatgaagggatgctaggatcaattatggcagtaccttttttcccctcctgttcttgagccagttgtctcttttgttttgggtcccacttaggattaatggatgtaaggtattttcctgtgcctttattttgtgtcattctattggaaggaggtgtaacggcagaatagcatcgtgttgggggttttccttcaaacactgcaagtgatattgccaccatgtgaacctcaaatatgcaatccagttgtgttggtttctcggtgacttggagtgttcatctcttcatgaattgtgagcactgaccatgttcttcagttcttaattatggtgagttgacaaataccaactactgcttttctttaggtggctataaatttcttactgtcaggaggaaatgacattatattctgttccactgaacgtcagagatcagcaggcactgtactgggtagagaagtgcctatacttctctacctaagagggcaggagggaaaccctacagctccttgtgagcctatatattagtatatcggcctggagaggacaagggaataagaccactcatagtgaggctggccaagctgcactggtcggaccaggcagtggctgacctaaggaagacaacttgctttgcttaaaagtagattttttaagcaatgcttaacacaggcagcattcacctttgttcaggccatcgacatgtattgttaaaattactgcatatccccctcagatatcaagtatacactgttcatgttggggttgtgtgtgtgtatgtgtgtatgtacgcacgcatgtgtcccaaatcttgttttaattttttttttctgaatgtgatcatgttttggatgatacctgagcagggttgccttttttttatttattaccattatatattatattatattatattatatattttttgctttcttataactttggaggaaagtcaaatcttggtattattaaaattgttttaaaaaggagtaaattttccagttgataaatgaaaatcactggcctatgtttaataagtttttctttaattactgtggaataacgtgccagctatcatcaacacaatgattttgtacatagggtagggaagcagtgatgctctcaatgggaagatgtgcaacacaaattaaggggaactccatgtattttacctacttcagcaatggaactgcaacttggggctttgtgaataaaatttagctgccttgtatagtcgtttgaaagaatatgtgatctgtgagagaattatagtttttttttagaagaaaaatctgcaaaagatctttccaaagacaatgtgccacagatcttttgttctctgtaatgaggattaattgctgtttaaacaaaaatgtaattgttcatctttaaattctttccttttcataagaggatcaagctgtaaaaaaacaaaaaaattaataaaaatttcgagaaatcattggggttgaatcca

SEQ ID NO: 266 - DNA, 3164 bp, Homo sapiens
  source 1..3164: mol_type = genomic DNA
gtagtcccgtaacatcggggcgccgcgccgggacgcgtccccgcccggctccgccaaatggtgagcgcggcgctggcagcagggcccgcggggtgaaggcgctcatggacggaagacccctggctctataagctgaattatggcagcccagtcaagcagacctactccaatgaagtccattgtgttgaagagattctgaaggaaatgacccattcatggccgcctcctttgacagcaatacatacgcctagtacagctgagccatccaagtttcctttccctacaaaggactctcagcatgtcagttctgtaacccaaaaccaaaaacaatatgatacatcttcaaaaactcactcaaattctcagcaaggaacgtcatccatgctcgaagacgaccttcagctcagtgacagtgaggacagtgacagtgaacaaaccccagagaagcctccctcctcatctgcacctccaagtgctccacagtcccttccagaaccagtggcatcagcacattccagcagtgcagagtcagaaagcaccagtgactcagacagttcctcagactcagagagcgagagcagttcaagtgacagcgaagaaaatgagcccctagaaaccccagctccggagcctgagcctccaacaacaaacaaatggcagctggacaactggctgaccaaagtcagccagccagctgcgccaccagagggccccaggagcacagagcccccacggcggcacccagagagtaagggcagcagcgacagtgccacgagtcaggagcattctgaatccaaagatcctccccctaaaagctccagcaaagccccccgggccccacccgaagccccccaccccggaaagaggagctgtcagaagtctccggcacagcaggagcccccacaaaggcaaaccgttggaaccaaacaacccaaaaaacctgtcaaggcctctgcccgggcaggttcacggaccagcctgcagggggaaagggagccagggcttcttccctatggctcccgagaccagacttccaaagacaagcccaaggtgaagacgaaaggacggccccgggccgcagcaagcaacgaacccaagccagcagtgcccccctccagtgagaagaagaagcacaagagctccctccctgccccctctaaggctctctcaggcccagaacccgcgaaggacaatgtggaggacaggacccctgagcactttgctcttgttcccctgactgagagccagggcccaccccacagtggcagcggcagcaggactagtggctgccgccaagccgtggtggtccaggaggacagccgcaaagacagactcccattgcctttgagagacaccaagctgctctcaccgctcagggacactcctcccccacaaagcttgatggtgaagatcaccctagacctgctctctcggataccccagcctcccgggaaggggagccgccagaggaaagcagaagataaacagccgcccgcagggaagaagcacagctctgagaagaggagctcagacagctcaagcaagttggccaaaaagagaaagggtgaagcagaaagagactgtgataacaagaaaatcagactggagaaggaaatcaaatcacagtcatcttcatcttcatcctcccacaaagaatcttctaaaacaaagccctccaggccctcctcacagtcctcaaagaaggaaatgctccccccgccacccgtgtcctcgtcctcccagaagccagccaagcctgcacttaagaggtcaaggcgggaagcagacacctgtggccaggaccctcccaaaagtgccagcagtaccaagagcaaccacaaagactcttccattcccaagcagagaagagtagaggggaagggctccagaagctcctcggagcacaagggttcttccggagatactgcaaatccttttccagtgccttctttgccaaatggtaactctaaaccagggaagcctcaagtgaagtttgacaaacaacaagcagaccttcacatgagggaggcaaaaaagatgaagcagaaagcagagttaatgacggacagggttggaaaggcttttaagtacctggaagccgtcttgtccttcattgagtgcggaattgccacagagtctgaaagccagtcatccaagtcagcttactctgtctactcagaaactgtagatctcattaaattcataatgtcattaaaatccttctcagatgccacagcgccaacacaagagaaaatatttgctgttttatgcatgcgttgccagtccattttgaacatggcgatgtttcgttgtaaaaaagacatagcaataaagtattctcgtactcttaataaacacttcgagagttcttccaaagtcgcccaggcaccttctccatgcattgcaagaagcacaggcacaccatcccctctttccccaatgccttctcctgccagctccgtagggtcccagtcaagtgctggcagtgtggggagcagtggggtggctgccactatcagcaccccagtcaccatccagaatatgacatcttcctatgtcaccatcacatcccatgttcttaccgcctttgacctttgggaacaggccgaggccctcacgaggaagaataaagaattctttgctcggctcagcacaaatgtgtgcaccttggccctcaacagcagtttggtggacctggtgcactatacacgacagggttttcagcagctacaagaattaaccaaaacaccttaatggagccccaggttgattcaatgccttgggaactatttttgcacattggaagcctcaaaaacagtccagacatttgtttcatcaggacaccaaactctaaaaaagaagcaccacgagatggccaggacatttgtccacttaaactctcaacaacagtgtgatcattggttggacactgtggttatgcagaagcagagatgaggaggctggccccagagatgatcttgcccttcctaactaaaggacagaagtgcaatttagcttaaatgggtgtatgaatggtctagaaacatttctattttttttttaaaccagcaggatacaagttgcaaatgaaatgaggagaaacagtttcaactctgaaagtgaatttcacgtcatctcagtagccacgctagtccattcccaga

SEQ ID NO: 267 - DNA, 2712 bp, Homo sapiens
  source 1..2712: mol_type = genomic DNA
ttaagatgccagacatgcacttcaaggcccccaagatctccatgcctgatgtggacttacacttgaaaggccccaaagtcaaaggggatgtggatgtgtcggtgccaaaattggagggagatttaacaggtcccagtgtgggtgtggaggtgcctgatgttgagctggagtgtcctgatgcaaagttgaaagggcccaagtttaagatgcctgagatgcacttcaagacccccaagatctccatgcctgatgtggacttacacctgaaaggccccaaagtcaaaggggatatggatgtgtctgtgcccaaggtagaaggtgaaatgaaagtgccagatgttgacatcaaaggacccaaaatggacattgatgccccagatgtggatgttcatggcccagactggcacctgaagatgcccaagatgaaaatgcccaagttcagcatgcctggcttcaaagcagagggcccagaagtggatgtgaacttgcccaaggctgatgttgttgtctcaggacccaaggtggatgttgaagtcccagatgtgagccttgaaggtccagaagggaagctgaagggccccaagcttaagatgcctgagatgcacttcaaggcccccaagatctccatgcctgatgtggacttacacttgaaaggccccaaagtcaaaggggatgtggatgtgtctttgccaaaattggagggagatttaacaggccccagtgtggatgtggaggtgcctgatgttgagctggagtgtcctgatgcaaagttgaaagggcccaagtttaagatgcctgagatgcacttcaagacccccaagatctccatgcctgatgtgaacttaaacttgaaaggccccaaagtcaaaggggatatggatgtgtctgttcccaaggtagaaggtgaaatgaaagtgccagatgttgacatcagagggcccaaagtggacattgatgccccagatgtggatgttcatggcccagactggcacctgaagatgcctaagatgaaaatgcccaagttcagcatgcctggcttcaaaggagagggcccagaagtggatgtgaacttgcccaaggctgacgttgatgtctcaggacccaaggtggatgttgaagtcccagatgtgagccttgaaggtccagaagggaagctgaagggccccaagtttaagatgcctgagatgcacttcaagacccccaagatctccatgcctgatgttgatttcaatttaaagggacccaaaatcaaaggagatgttgatgtttctgccccaaagctggagggagagttaaaaggtccagaattggatgtcaaaggtcccaaattagatgctgacatgccagaagtagctgtggaaggcccaaatggcaagtggaaaactcctaagttcaagatgccagatatgcactttaaagctcccaaaatctctatgccagacctcgatctacacttgaagagccccaaggcaaaaggagaggtggatgtagatgttcccaaattggaaggggaccttaaagggccacatgtggatgtcagtgggccagacattgacattgagggaccagagggcaaattgaaaggccctaagttcaagatgcctgatatgcatttcaaagcccccaatatttctatgcctgatgttgatctaaatctcaaaggacccaaaatcaagggggatgtggatgtgtctgtgcctgaggtagaaggtaaacttgaagtaccagatatgaacatcaggggccccaaagttgatgtaaatgcccccgatgtccaagctccagactggcacctgaagatgcccaagatgaaaatgcccaagttcagcatgcctggcttcaaagcagagggccctgaagtagacgtcaacttgcctaaggctgacgttgacatctcaggacccaaggtggacattgaaggccctgatgttaatattgaaggaccagagggaaagttgaaagggcctaagttaaagatgccagagatgaacatcaaagcccccaagatctccatgcctgactttgatttgcatctgaaaggtcccaaggtgaagggcgatgtggatgtttctctgcccaaagtggaaggtgacctcaagggccccgaagttgacatcaaggggcccaaagtggatattaatgccccagatgtgggtgttcaaggcccagactggcacctgaagatgcccaaggtgaaaatgccaaagttcagcatgcctggcttcaaaggagagggcccagatggggatgtgaagctgcccaaggctgacattgatgtctcaggacccaaagtggacattgaaggccctgatgttaacattgaaggaccagagggaaagttgaaagggcctaagttcaagatggcccagaggtggtggtagtcagggtgtgtgggtgtttttagggttctttagtgttgtttctttcacccaggggtggtggtcccagccagtttggtgctgacggtgagaggaaattagaatctgtttgcaaattgtccaacccaccccctcaacatgaggggcttccattttctgtgttttgtaagggaactgtttccttcatgccgccatgttcctgatattagttctgatttctttttaacaaatgttatcatgattaagaaaatttccagcactttaatggccaattaactgagaatgtaagaaaattgatgctgtacaaggcaaataaagctgtttattaaccttg

SEQ ID NO: 268 - DNA, 1024 bp, Homo sapiens
  source 1..1024: mol_type = genomic DNA
agctgctctgccgcggggactgcaccgcccgccctgccagacccgcccggaacggggctcgtcgccgccagtagccgcagcaccgcagccttgggcctcgcgccggctatggccgtgccctggggctgagccctcaggttgtgaccgagattcccgacgagagagactgaggggaagagaggaaggaggggcgggctcctggcaaggcattcgctcctgagcggaatcctgcaaagatggagaaggaggagacaacccgggagctgctgctgcccaactggcagggtagtggctcccacgggctgaccatcgcccagagggacgacggcgtctttgtgcaggaggtgacgcagaactcccctgcggcccgcactggggtggtcaaggagggggaccagattgtgggtgccaccatctactttgacaacctgcagtcgggtgaggtgacccagctgctgaacaccatggggcaccacacggtgggcctgaagctgcaccgcaagggggaccgctctcccgagcctggccagacctggacccgtgaagtcttcagctcctgcagctctgaagtggttctgaacacaccacagccatcagcactggaatgcaaagaccagaacaaacagaaggaagccagcagccaagccggggcagtttcagtctccaccccaaatgcaggactgtagaagcggccaggaagaaaaccaccccctcttaaggttgtttttgtgaccgttctttggagcattgttctaaaaatgggaaattacatattgctgtgccaagggcaacaaacacctgcagttaaaggaataccttccgcgaggcggcttttcggagcatgcatgtttatagctccagccaggccagaccgagggctgctgcataagccctgcttggtgcatttctttacttgcaaggggacagagtgtgggcttaggtttgggactagagggggctttggcaactatggtgctcaggtgattatccttcgctcgtttatccaataaacatttatcaagca

SEQ ID NO: 269 - DNA, 18787 bp, Homo sapiens
  source 1..18787: mol_type = genomic DNA
acaagagccgcctccgcgcacgggggcccggccactcggagctgctctgccgcggggactgcaccgcccgccctgccagacccgcccggaacggggctcgtcgccgccagtagccgcagcaccgcagccttgggcctcgcgccggctatggccgtgccctggggctgagccctcaggttgtgaccgagattcccgacgagagagactgaggggaagagaggaaggaggggcgggctcctggcaaggcattcgctcctgagcggaatcctgcaaagatggagaaggaggagacaacccgggagctgctgctgcccaactggcagggtagtggctcccacgggctgaccatcgcccagagggacgacggcgtctttgtgcaggaggtgacgcagaactcccctgcggcccgcactggggtggtcaaggagggggaccagattgtgggtgccaccatctactttgacaacctgcagtcgggtgaggtgacccagctgctgaacaccatggggcaccacacggtgggcctgaagctgcaccgcaagggggaccgctctcccgagcctggccagacctggacccgtgaagtcttcagctcctgcagctctgaagtggttctgagcggggatgatgaggagtaccagcgcatctacaccacgaagatcaagccacggctgaagtcggaagatggagtggaaggagacctcggggagacccagagccgtaccatcacagtgaccagaagggtcacggcctacactgtggatgtgactggccgggaaggagccaaggacatagacatcagtagccctgaattcaagatcaagattccaagacatgaactgactgaaatctccaatgtggatgtggagacccagtctgggaagaccgtgatcagactgccctcgggctcgggggcagcctctccgacaggctctgctgtggatatccgagcaggggccatttctgcttcaggaccagagctccaaggtgctggccactcgaagctccaggtcaccatgcctgggataaaggtgggaggctcaggtgtcaatgtcaatgcaaagggcttggacttgggtggcagaggaggggtccaagttccagcagtggacatttcatcttctcttgggggtagggcagtagaggtacagggcccatctctggagagtggtgatcatggcaaaattaaatttcccaccatgaaagtgccgaaatttggtgtctcaacagggcgtgagggccagacaccaaaggcagggctgagggtttctgcacctgaagtctctgtggggcacaagggcggcaagccaggcttgactatccaagcccctcagctggaagtcagtgtgccctctgccaatattgagggccttgaggggaagctgaagggcccccaaatcactgggccatcacttgagggtgacctaggcctgaaaggtgccaagccacaggggcacattggggtggatgcctctgctccccaaattgggggtagcatcactggccccagtgtggaagttcaggcccctgacattgatgttcaggggcctgggagcaaactgaatgtgcccaagatgaaagtccccaagttctctgtatcaggtgcaaagggagaggaaactgggattgatgtgacactgcctacaggtgaagtgactgttcctggggtctctggggatgtcagcctgcctgagattgctactggtgggctggaaggaaagatgaaaggtactaaagtgaagactcctgaaatgattattcagaaacctaaaatctccatgcaggatgtggatctgagccttgggtctcctaaactgaaaggagatattaaggtttctgctcctggggtgcaaggtgatgttaaaggccctcaagtggcacttaaaggctccagagtggacatagagacaccaaacctagagggaaccttgacaggccctaggcttggcagtccttccgggaaaaccggaacctgtaggatctctatgtcagaagtagacttaaatgtggccgcacctaaagtgaaagggggtgtagatgtcacactccccagagtagaagggaaagtcaaagtccctgaagttgatgtcagaggccccaaagtggatgtcagtgccccagatgtcgaagcgcatggcccagaatggaacctgaaaatgcccaagatgaaaatgcccacgttcagcactccaggagccaaaggggaaggtccagatgttcatatgactctacccaaaggagatatcagtatttcagggcccaaggtcaatgtggaagccccagatgtcaacttggagggtctggggggaaaacttaaaggccccgatgttaagctgcctgatatgagtgtcaagacaccaaagatctccatgcctgatgtagatttgcacgtgaaaggtacaaaggtgaagggagagtatgatgtaactgtaccaaagctggaaggagaactcaaaggcccaaaagtggacattgatgccccagatgtggatgttcatggcccagactggcacttgaagatgcccaagatgaaaatgcccaaattcagtgtgccagggttcaaagcagagggcccagaagtggatgtgaacctgcccaaggctgatgtggacatttccgggcccaagatagatgttactgctcctgatgtgagcattgaggaaccagaagggaaattgaaagggcccaagtttaagatgcctgagatgaacatcaaagtccccaagatctccatgcctgatgtggacttacatctgaaaggccctaacgtaaagggagaatatgatgtcacaatgccaaaggttgaaagtgagattaaagttcctgatgttgaacttaaaagtgccaaaatggacattgatgtcccagatgtggaggttcaaggcccagactggcacctgaagatgcccaagatgaaaatgcccaagttcagcatgcctggcttcaaagcagagggcccagaagtggatgtgaacctgcccaaggctgatgtggacatctcaggacccaaggtgggtgttgaagttccagatgtgaatattgaaggacctgaaggaaagctgaagggccccaagttcaagatgccagagatgaatatcaaggcccccaagatctccatgcctgatgtggacttgcatatgaaaggtcctaaagtaaagggagaatatgatatgacagtgccaaagctggaaggggacctgaaaggcccaaaagtagatgtcagtgccccagatgttgaaatgcagggtcctgactggaacttgaagatgccaaagattaaaatgcccaaatttagcatgcccagcctcaaaggagaggggccagaatttgatgtgaacctgtccaaagcgaatgtggacatttctgcaccaaaagtagatactaatgctccagatctgagccttgaaggacctgaagggaagttgaaaggcccgaagtttaagatgcctgagatgcacttcagagctcctaagatgtctttgccagatgttgacctggatcttaaaggacccaaaatgaaaggaaatgtagatatctctgcaccaaagatagagggtgaaatgcaggttccagatgtggacatcagaggtcccaaggtagatattaaagcaccagatgtggaaggccaaggcctggactggagcctgaaaatacccaagatgaaaatgcccaagttcagcatgcccagcctcaaaggcgagggcccagaagtggatgtgaacttgcctaaggctgacgttgttgtctcaggacccaaggtggacatcgaagccccagatgtgagcctcgaaggtccagaagggaagctgaagggtcccaagtttaagatgcctgagatgcatttcaagacccccaagatctccatgcctgatgtggacttacacttgaaaggccccaaagtcaaaggggatgtggatgtgtctgtgcccaaggtagaaggtgaaatgaaagtgccagatgttgaaatcaaaggacccaaaatggacattgatgccccagatgtggaggttcaaggcccagactggcacctgaagatgcccaagatgaaaatgcccaagtttagcatgcctggcttcaaaggagagggccgagaagtggatgtgaacctgcccaaggctgacattgatgtctcaggacccaaggtggatgttgaagtcccagatgtgagccttgagggcccggaaggaaagctgaagggccccaagtttaagatgcctgagatgcacttcaaggcccccaagatctccatgcctgatgtggacctgaatcttaaggggccaaaattgaagggagatgtggatgtgtccttgcctgaggtagaaggtgaaatgaaagtgccagatgttgacattaaagggcccaaagttgacattagtgctccagatgtggatgttcatggcccagattggcacctgaagatgcccaaggtgaaaatgcccaagttcagcatgcccggcttcaaaggagagggccctgaagtggatgtgaagctgcccaaagctgacgttgatgtctcaggacccaaaatggatgctgaagttccagatgtgaatattgaaggtccagacgcaaaactaaaaggtcccaaattcaagatgccagaaatgagtataaagcctcagaagatatccataccagatgttggtttgcatttgaaaggtcctaaaatgaaaggagattatgatgtaacagttccaaaagtagaaggagagataaaagctcctgatgttgacatcaaaggccccaaagttgatattaatgcaccagatgtggaggttcatggcccagactggcacctgaagatgcccaaggtaaaaatgcccaagttcagcatgcctggctttaaaggagagggcccagaggtggatatgaacctgcccaaggctgaccttggtgtttcaggacccaaggtggacattgatgttccagatgtgaatcttgaagctccagaggggaaactaaaaggccctaagttcaagatgccaagcatgaatatacagacgcacaaaatctctatgcctgatgttggacttaatttgaaagcccctaaactgaaaactgatgtagatgtttcccttcccaaagtggaaggagacttgaagggtcctgaaattgatgtgaaagcccctaagatggatgtgaatgttggtgatattgatattgaaggtccagaagggaagttgaagggccccaagtttaagatgcctgagatgcatttcaaggcccccaagatctccatgcccgatgtggacttacacttgaaaggccccaaagtcaaaggggatatggatgtgtctgtgcccaaggtagaaggtgaaatgaaagtgccagatgttgacattaaagggcccaaagtggacattgatgccccagatgtggaggttcacgacccagattggcacctgaaaatgcccaagatgaaaatgcccaagttcagtatgcctggcttcaaagcagagggccctgaagtggatgtgaatctgccaaaggctgacattgatgtgtctggacccagtgtggacactgatgctcctgatttggatattgagggaccagaaggaaagttgaaaggctccaaatttaagatgcccaagttgaatataaaagctcccaaggtctccatgccagatgtggacttgaatttgaagggacccaaactgaagggagagatagatgcttctgtgccagaactggaaggtgatctcagagggccgcaagttgatgtcaaaggtccttttgtggaagcggaggtgcccgatgttgatctggagtgtcctgatgcaaagttgaaagggcccaagtttaagatgcctgagatgcacttcaaggcccccaagatctccatgcctgatgtggacttacacctgaaaggccccaaagtcaaaggggatgcggatgtgtcggtgccaaaattggagggagatttaacaggccccagtgtgggtgtggaggtgcctgatgttgagctggagtgtcctgatgcaaagttgaaaggccctaaatttaagatgccagacatgcacttcaaggcccccaagatctccatgcctgatgtggacttacacttgaaaggccccaaagtcaaaggggatgtggatgtgtcggtgccaaaattggagggagatttaacaggtcccagtgtgggtgtggaggtgcctgatgttgagctggagtgtcctgatgcaaagttgaaagggcccaagtttaagatgcctgagatgcacttcaagacccccaagatctccatgcctgatgtggacttacacctgaaaggccccaaagtcaaaggggatatggatgtgtctgtgcccaaggtagaaggtgaaatgaaagtgccagatgttgacatcaaaggacccaaaatggacattgatgccccagatgtggatgttcatggcccagactggcacctgaagatgcccaagatgaaaatgcccaagttcagcatgcctggcttcaaagcagagggcccagaagtggatgtgaacttgcccaaggctgatgttgttgtctcaggacccaaggtggatgttgaagtcccagatgtgagccttgaaggtccagaagggaagctgaagggccccaagcttaagatgcctgagatgcacttcaaggcccccaagatctccatgcctgatgtggacttacacttgaaaggccccaaagtcaaaggggatgtggatgtgtctttgccaaaattggagggagatttaacaggccccagtgtggatgtggaggtgcctgatgttgagctggagtgtcctgatgcaaagttgaaagggcccaagtttaagatgcctgagatgcacttcaagacccccaagatctccatgcctgatgtgaacttaaacttgaaaggccccaaagtcaaaggggatatggatgtgtctgttcccaaggtagaaggtgaaatgaaagtgccagatgttgacatcagagggcccaaagtggacattgatgccccagatgtggatgttcatggcccagactggcacctgaagatgcctaagatgaaaatgcccaagttcagcatgcctggcttcaaaggagagggcccagaagtggatgtgaacttgcccaaggctgacgttgatgtctcaggacccaaggtggatgttgaagtcccagatgtgagccttgaaggtccagaagggaagctgaagggccccaagtttaagatgcctgagatgcacttcaagacccccaagatctccatgcctgatgttgatttcaatttaaagggacccaaaatcaaaggagatgttgatgtttctgccccaaagctggagggagagttaaaaggtccagaattggatgtcaaaggtcccaaattagatgctgacatgccagaagtagctgtggaaggcccaaatggcaagtggaaaactcctaagttcaagatgccagatatgcactttaaagctcccaaaatctctatgccagacctcgatctacacttgaagagccccaaggcaaaaggagaggtggatgtagatgttcccaaattggaaggggaccttaaagggccacatgtggatgtcagtgggccagacattgacattgagggaccagagggcaaattgaaaggccctaagttcaagatgcctgatatgcatttcaaagcccccaatatttctatgcctgatgttgatctaaatctcaaaggacccaaaatcaagggggatgtggatgtgtctgtgcctgaggtagaaggtaaacttgaagtaccagatatgaacatcaggggccccaaagttgatgtaaatgcccccgatgtccaagctccagactggcacctgaagatgcccaagatgaaaatgcccaagttcagcatgcctggcttcaaagcagagggccctgaagtagacgtcaacttgcctaaggctgacgttgacatctcaggacccaaggtggacattgaaggccctgatgttaatattgaaggaccagagggaaagttgaaagggcctaagttaaagatgccagagatgaacatcaaagcccccaagatctccatgcctgactttgatttgcatctgaaaggtcccaaggtgaagggcgatgtggatgtttctctgcccaaagtggaaggtgacctcaagggccccgaagttgacatcaaggggcccaaagtggatattaatgccccagatgtgggtgttcaaggcccagactggcacctgaagatgcccaaggtgaaaatgccaaagttcagcatgcctggcttcaaaggagagggcccagatggggatgtgaagctgcccaaggctgacattgatgtctcaggacccaaagtggacattgaaggccctgatgttaacattgaaggaccagagggaaagttgaaagggcctaagttcaagatgccagagatgaatatcaaagcccccaagatctccatgcctgatattgacttaaacctgaaaggacccaaagtgaagggtgatgtggatgtttcccttcctaaagtggaaggtgacctcaagggcccagaagttgacatcaagggcccaaaagtggacattgacgcacctgatgttgatgttcatggcccagactggcacctaaagatgcccaagataaaaatgcccaagatcagcatgcctggcttcaaaggagaaggtccagatgtggacgtgaacctgcccaaggctgacattgatgtctcaggaccgaaagtggatgttgaatgtcccgatgtgaatatcgaaggacctgaaggaaagtggaaaagtccaaagtttaagatgccagagatgcattttaagactccaaagatatccatgccagatattgacctgaatctcacaggtccaaaaataaaaggagatgtggatgttacaggccctaaggtagagggagatctgaaaggtcctgaagttgacctcaaaggccccaaagtggacattgatgtcccagatgttaatgttcagggtccagactggcacctgaagatgcccaagatgaaaatgcccaagttcagcatgcctggcttcaaagcagagggccctgaagtggatgtgaacctgcccaaggctgacgttgatgtctcaggccccaaagtggacgttgaaggccctgatgttaacattgaaggaccagagggaaagttgaaagggcccaagttcaagatgccagagatgaatatcaaagcccccaagatccccatgcctgactttgatttgcatctgaaaggtcccaaggtgaagggcgatgtggatatttctctgcccaaagtggaaggtgacctcaagggccctgaagttgacatcaggggtccccaagtggacattgatgtcccggatgtgggcgttcaaggcccagactggcacctaaaaatgcccaaagtgaaaatgcccaaattcagcatgcctggcttcaaaggagagggcccagatgtggatgtgaacctgcccaaggctgaccttgatgtctcaggacccaaggtggacattgatgttccagatgtgaatatcgaaggcccagagggaaagttgaaaggtcccaaattcaaaatgcctgagatgaacatcaaagcccccaagatctccatgcctgacattgatcttaacctgaaaggtcccaaagtgaagggtgacatggatgtgtctctgccaaaagtggaaggtgacatgaaagttcctgacgtggatattaaaggccccaaagtggatattaatgccccagatgtggatgttcaaggcccagactggcacctgaagatgcctaaaataaaaatgcccaagatcagcatgcctggcttcaaaggagaaggtccagaagtggacgtgaacctgcccaaggctgaccttgacgtctcaggacccaaggtggacgttgatgttccagatgtgaatattgaaggtccagatgcgaaactgaagggccctaaattcaagatgccagagatgaacatcaaagctcctaaaatatcaatgcctgatttggacctcaatcttaaaggccctaaaatgaaaggagaggtggatgtttcacttgcaaatgtagaaggtgatttgaaaggacctgctcttgacataaaaggcccaaagatagatgtagatgctccagatattgacattcatggcccagatgccaaattaaaaggtccaaaactgaagatgcctgacatgcatgtaaacatgcccaagatctccatgccagaaattgacttgaatttgaaaggctcaaagcttaagggagatgttgatgtctctgggcccaagttggaaggtgacattaaagctcccagtttggatataaagggcccagaagtggacgtttccggtcctaagcttaatatcgaaggcaagtcaaagaaatctcgttttaagcttcccaaatttaatttttcgggctctaaagttcagacacctgaagtggatgtcaaaggtaaaaagccagatattgacataacaggtccaaaagttgatattaatgctcctgatgtcgaggtccaaggaaaagtgaaaggatccaagtttaaaatgcctttcctgagtatttcatctcccaaagtttctatgcctgacgtggagctaaatttgaaaagtcccaaagtcaaaggagacttagatattgcaggtcccaatttagaaggtgactttaaaggccccaaagtggatattaaggcaccagaagtcaatcttaatgcacctgatgtggatgttcatggtccagactggaatctgaaaatgcccaagatgaaaatgcccaaattcagtgtgtctggcttaaaagcagaagggccagatgtagctgtggatctaccaaaaggagacatcaacatagagggcccaagtatgaacattgagggcccagatctcaatgtggaaggtccggagggaggcttgaaaggtcccaaattcaagatgcctgacatgaatatcaaagctcccaagatctccatgcctgacattgacttaaacttgaaaggccccaaggtgaaaggtgatgtggatatttctcttcccaaacttgaaggggatctgaaagggccagaggttgatatcaaaggccctaaagtggacatcaatgccccagatgtggatgttcatggtccagactggcatctgaagatgcccaaagtgaaaatgcccaagttcagcatgcctggcttcaaaggagaaggccctgaagtcgatgttaccctccctaaagctgacattgacatttctggtcccaatgtagacgttgatgttccagacgtgaatattgaaggtccagatgcaaagctgaagggccccaagttcaagatgcctgagatgaacatcaaagcccccaagatctccatgcctgactttgacctgaacttgaagggacccaaaatgaagggtgatgtggttgtgtctttgcccaaagtggaaggtgatctaaaaggccctgaggtggacatcaagggccccaaagtggacattgacactcctgacattaacatcgaaggctcagagggtaaattcaagggacccaaatttaagataccagagatgcacctgaaggctcccaaaatatcgatgcctgacattgatttaaacctgaagggccccaaagtcaagggcgatgtggatgtttctctgcccaaaatggaaggtgacctcaagggtcctgaagttgacatcaagggccccaaagtggacattaatgctccagatgttgatgttcaaggcccagactggcacctgaagatgcccaaggtgaaaatgcccaagttcagcatgcctggcttcaaaggagagggcccagatgtggatgtgaacctgcccaaggctgaccttgatgtctcaggacccaaggtggacattgatgttccagatgtgaatatcgaaggcccagagggaaagttgaaaggtcccaaattcaagatgcctgagatgaacatcaaagcccccaagatctccatgcctgacattgatcttaacctgaaaggacccaaagtgaagggtgatatggatgtgtctctgccaaaagtggaaggtgacatgcaagttcctgacttggatattaaaggccccaaagtggatattaatgccccagatgtggatgttcgaggcccagactggcacctgaagatgcctaagataaaaatgcccaagatcagcatgcctggcttcaaaggagaaggtccagaagtggatgtgaacctgcccaaggctgaccttgacgtctcaggacccaaggtggacgttgatgttccagatgtgaatattgaaggtccagatgcgaaactgaagggccctaaattcaagatgccagagatgaacatcaaagcccccaagatctccatgcctgactttgatttgcatctgaaaggccctaaggtgaaaggagatgtggatgtttctctgcctaagatggaaggtgatctaaaggcccctgaagttgacatcaagggccccaaagtggacattgatgccccagatgtggatgttcatggcccagactggcacctgaagatgcccaaggtgaaaatgcccaaattcagcatgccaggatttaaaggagagggcccagaagtggatgttaatttgcccaaagctgacattgatgtctcaggacccaaagtggacattgacactcctgatattgatattcatggtccagaagggaaactgaagggccccaaatttaaaatgcctgacctgcacctcaaggcaccgaagatctctatgcctgaagttgacctgaatctgaaaggtccaaagatgaagggcgacgtggacgtttctctgcccaaagtggaaggcgacctcaagggccctgaagttgacatcaagggccccaaagtggacattgatgtcccagatgtggacgttcaaggcccagactggcacttaaaaatgcccaaagtgaaaatgcccaagttcagcatgcctggcttcaaaggagagggcccagatgtggatgtgaacctgcccaaggctgaccttgacgtctcaggacccaaggtggacattgatgttcctgatgtgaatatcgaaggtccagatgcgaaactaaagggccctaaattcaagatgcctgagatgaacatcaaagcccccaagatctccatgcctgactttgatttgcatctgaaaggtcccaaggtgaagggtgatgtggatgtttcccttcctaaagtggaaggtgacctcaagggcccagaagttgacatcaagggccccaaagtggacatcgatgcccctgatgtagatgttcatggcccagactggcacctgaagatgcccaaggtgaaaatgcccaaattcagcatgccaggattcaaaggagagggcccagatgtggatgttacccttcctaaggctgacattgagatttctggccccaaagtggacattgatgcccctgatgtcagtatcgaaggtccagatgcaaaactcaagggtccaaagttcaagatgccagagatgaacatcaaggcccccaaaatctccatgcctgacattgactttaacttgaagggtcccaaagtgaaaggtgatgtggatgtctctctgcccaaagtggaaggtgatctcaagggccctgaaattgacataaaaggccccagtttggacattgacacacctgatgtcaatattgaaggtccggaaggaaaattgaaggggcccaaatttaagatgcctgagatgaacatcaaagctcccaaaatctctatgcctgactttgatttgcacctgaaaggtcccaaggtgaagggtgatgtggatgtttcactacctaaggtggaaagtgatctgaaagggccagaggtagacattgaaggtcctgaagggaagctcaaaggtcccaagtttaagatgcctgatgtacatttcaaaagcccacaaatctccatgagtgacattgatttgaatttgaaaggacctaagataaaaggagatatggacatttccgttcctaaactggagggagatctgaaaggtcccaaagtggatgtcaaaggccctaaagtgggcattgacactcctgatattgacattcatggtccagaagggaaactgaagggccccaaatttaaaatgcctgacttacacctcaaggcaccgaagatctctatgcctgaagttgacctgaatctgaaaggtccaaaggtgaagggcgacatggacatttctctgcccaaagtggaaggcgacctcaagggccccgaagttgacatcagggaccccaaagtggacattgatgtcccagatgtggacgttcaaggcccagactggcacctaaaaatgcccaaagtgaaaatgcccaagttcagcatgcctggcttcaaaggagagggcccagatgtggatgtgaacctgcccaaggctgacattgatgtctcaggacccaaagtggacgttgatgttcctgatgtgaatatcgaaggtccagatgcgaaactaaagggccccaagttcaagatgcctgagatgagcatcaaagcccccaagatctccatgcctgatattgacttaaacctgaaaggacccaaagtgaagggcgatgtggatgttacccttcctaaagtggaaggtgacctcaagggcccagaagctgacatcaagggcccaaaagtggacatcaacacccctgatgtggatgttcatggcccagactggcacctgaagatgcccaaggtgaaaatgcccaaattcagcatgcctggcttcaaaggagaaggtccagatgtggatgtgagcctgcccaaggccgacatcgatgtctcgggacccaaggtggacgttgatattccagatgtgaatatcgaaggtccagacgcaaaactgaagggccccaagttcaagatgcctgaaataaatatcaaagctcccaagatctccatacctgatgttgacctggatttgaaaggacccaaagtaaaaggagattttgatgtgtctgtccctaaggttgaagggactttgaaaggcccagaagtagatcttaaaggtccacgtctggatttcgaaggccctgatgccaaactcagtggcccatctttgaagatgccatcgctggagatatctgctcctaaagtaactgctcctgatgttgatttgcatctcaaggcaccaaaaattggattttcaggtccgaagttagaaggtggtgaagtggacctcaagggacccaaagttgaagctccaagcttagatgtacacatggacagcccagatattaacatcgaagggccagatgttaaaatccccaaatttaagaaacccaagtttggatttggggcaaaaagccccaaagctgacatcaagtcaccttcactggatgtcactgttcctgaggcagagctgaaccttgagactcctgaaattagtgttggtggcaagggcaagaaaagtaagtttaaaatgcctaaaattcatatgagtggtcctaagattaaggccaaaaaacagggatttgacctgaatgttcctgggggtgaaattgatgccagcctcaaggctccggatgtagatgtcaacatcgcagggccggatgctgcactcaaagtcgacgtgaaatcgcccaaaaccaagaaaacgatgtttggaaaaatgtacttcccagatgtagagtttgacattaaatcacctaaatttaaagctgaggcccctctccctagccccaaactggagggtgaactccaggcacctgatctggaactttctttgccagcgattcacgtcgaaggtcttgacatcaaggcgaaggctcccaaggtcaagatgccagatgtggacatctcagtgccaaaaatagagggtgacctgaaaggccccaaagtgcaggcaaacttgggtgcacctgacatcaacatcgaaggcctagatgctaaagtcaaaacaccgtccttcggcatttctgcccctcaagtctccatccctgatgtgaatgtaaacttgaaaggaccaaagataaagggtgatgtccccagcgtgggactggaaggaccagatgtagatctgcaaggtccagaagcaaaaattaagttccccaagttttccatgcccaagatcggcatcccaggtgtgaaaatggagggtgggggagccgaggtccatgcccagctaccctctcttgaaggagacttgagaggaccagatgttaagctcgaagggcccgatgtttctctaaaggggccaggagtagacttgccttcagtgaacctctctatgccaaaagtctctgggcctgaccttgatctgaacttgaaaggaccaagtttgaagggagacctggatgcatctgttcccagcatgaaggtgcatgctccagggctcaacctcagtggtgtcggtggcaaaatgcaggtgggaggagacggtgtgaaagtgccagggatcgatgccacaacaaagcttaacgttggggcaccagatgtgacactgaggggaccaagcctgcagggagatctggctgtctctggtgacatcaaatgccctaaagtatccgtaggagctcctgatctaagcttggaggcatccgaaggcagcattaaacttcccaaaatgaagctgccccaatttggcatctctactccggggtccgacttgcacgtcaatgccaaggggccacaggtttctggcgaactgaaggggccaggtgtggatgtgaacctgaaagggcctcggatttcagcaccgaatgtggactttaacttggaaggaccaaaagtgaaagggagccttggggccactggtgagatcaaaggccccactgtcggaggaggtcttccaggcattggtgttcaaggcctagaaggaaacctccagatgcctggaattaagtcctctggatgtgatgtgaacctgccaggcgtgaatgtgaaactcccaactgggcagatttctgggcctgaaatcaaaggtggtctgaaaggttcagaagtaggtttccatggggctgctcctgatatcagtgtgaaggggcctgcctttaatatggcatctcctgagtcagattttggcatcaacttgaagggcccaaaaatcaaaggaggtgcggatgtttcagggggtgtcagtgccccagacatcagccttggtgaagggcatttgagtgttaaaggttccgggggtgagtggaagggaccccaagtctcctctgctctcaacttggacacatctaagtttgctgggggccttcatttctcaggaccaaaggtggaaggaggtgtgaaaggaggtcagattggactccaggctcctgggctgagtgtgtctgggcctcaaggtcacttggaaagtggatctggaaaagtaacattccctaaaatgaagatccccaaatttaccttctctggccgtgagctggttggcagagaaatgggggtggatgttcacttccctaaagcagaggccagcatccaagctggtgctggagacggcgagtgggaagagtctgaagtcaaactgaaaaagtccaagatcaaaatgcccaagtttaatttttccaaacctaaagggaaaggtggtgtcactggctcaccagaagcatcaatttctgggtccaaaggtgacctgaaaagttcaaaggccagcctgggctctctggaaggagaggcagaggccgaagcctcttcaccgaaaggcaaattctccttatttaaaagtaagaagccacggcaccgctcaaattcattcagtgatgaaagagagttctctggaccttccaccccgacggggacgctggagtttgaaggtggggaagtgtctctggaaggtgggaaagttaaagggaaacacgggaagctgaaattcggtacctttggtggattggggtcaaagagcaaaggtcattatgaggtgactgggagcgatgatgagacaggcaagttacaggggagtggggtgtccctggcctctaagaagtcccgactgtcctcctcttctagcaatgacagtgggaataaggttggcatccagcttcccgaggtggagctgtcagtttccacaaagaaagagtagcaggcctttgtatgtgtgtacatatatatatatataacaaaacatcagccttgggtggtgtgttcctatataaactccaaagggaaacacaccgactgcctcagcaatcatgcaaagaccttgcctggcccggtggcaagcgctgaaaaaccgaccgcctgtaggctcctggaactatacagataggtaaagagttccaagttcgtccagcccatgtgcaaagtcaacagtatttgccttaagatttcatatatatatatttttttgcattgactgctgagagctcctgtttactaagcaagcttttgtgtttattatcctcatttttactgaacattgttagttttggggtaatggaaacccactttttcattgtaatgactttgggggcttttgttagtaagggtgggtggggtgatgggttgcagacggaggtcaggtcttcctctttcctgagactggatctgttcaaacagcaaacgcccacagatggcccagaggtggtggtagtcagggtgtgtgggtgtttttagggttctttagtgttgtttctttcacccaggggtggtggtcccagccagtttggtgctgacggtgagaggaaattagaatctgtttgcaaattgtccaacccaccccctcaacatgaggggcttccattttctgtgttttgtaagggaactgtttccttcatgccgccatgttcctgatattagttctgatttctttttaacaaatgttatcatgattaagaaaatttccagcactttaatggccaattaactgagaatgtaagaaaattgatgctgtacaaggcaaataaagctgtttattaacct

SEQ ID NO: 270 - DNA, 568 bp, Homo sapiens
  source 1..568: mol_type = genomic DNA
agctgcgctcgctggaaccctgcgctccagcggtgcgcgccaggagagggggcccgaagcgaggtctcgcctagagttggaaaggcagcgtgcttagggttgtgaccgagattcccgacgagagagactgaggggaagagaggaaggaggggcgggctcctggcaaggcattcgctcctgagcggaatcctgcaaagatggagaaggaggagacaacccgggagctgctgctgcccaactggcagggtagtggctcccacgggctgaccatcgcccagagggacgacggcgtctttgtgcaggaggtgacgcagaactcccctgcggcccgcactggggtggtcaaggagggggaccagattgtgggtgccaccatctactttgacaacctgcagtcgggtgaggtgacccagctgctgaacaccatggggcaccacacggtgggcctgaagctgcaccgcaagggggaccgctctcccgagcctggccagacctggacccgtgaagtcttcagctcctgcagctctgaagtggttctgagcggggatgatgaggagtaccagcgcat

SEQ ID NO: 271 - DNA, 580 bp, Homo sapiens
  source 1..580: mol_type = genomic DNA
gagctggcgacccgactccatggtccagcacatggcacagagactggggttgtgaccgagattcccgacgagagagactgaggggaagagaggaaggaggggcgggctcctggcaaggcattcgctcctgagcggaatcctgcaaagatggagaaggaggagacaacccgggagctgctgctgcccaactggcagggtagtggctcccacgggctgaccatcgcccagagggacgacggcgtctttgtgcaggaggtgacgcagaactcccctgcggcccgcactggggtggtcaaggagggggaccagattgtgggtgccaccatctactttgacaacctgcagtcgggtgaggtgacccagctgctgaacaccatggggcaccacacggtgggcctgaagctgcaccgcaagggggaccgctctcccgagcctggccagacctggacccgtgaagtcttcagctcctgcagctctgaagtggttctgagcggggatgatgaggagtaccagcgcatctacaccacgaagatcaagccacggctgaagtcggaagatggagtggaaggagacctcgggg

SEQ ID NO: 272 - DNA, 579 bp, Homo sapiens
  source 1..579: mol_type = genomic DNA
aagagccgcctccgcgcacgggggcccggccactcggagctgctctgccgcggggactgcaccgcccgccctgccagacccgcccggaacggggctcgtcgccgccagtagccgcagcaccgcagccttgggcctcgcgccggctatggccgtgccctggggctgagccctcaggttgtgaccgagattcccgacgagagagactgaggggaagagaggaaggaggggcgggctcctggcaaggcattcgctcctgagcggaatcctgcaaagtggaaggacgtgagacgaattaccccacccccaacacctcacctggcagatggagaaggaggagacaacccgggagctgctgctgcccaactggcagggtagtggctcccacgggctgaccatcgcccagagggacgacggcgtctttgtgcaggaggtgacgcagaactcccctgcggcccgcactggggtggtcaaggagggggaccagattgtgggtgccaccatctactttgacaacctgcagtcgggtgaggtgacccagctgctgaacaccatggggcaccacacggtgggcctgaagct

SEQ ID NO: 273 - DNA, 584 bp, Homo sapiens
  source 1..584: mol_type = genomic DNA
gggcttggcgtgggaggagggctaagctgcgctcgctggaaccctgcgctccagcggtgcgcgccaggagagggggcccgaagcgaggtctcgcctagagttggaaaggcagcgtgcttagggttgtgaccgagattcccgacgagagagactgaggggaagagaggaaggaggggcgggctcctggcaaggcattcgctcctgagcggaatcctgcaaagatggagaaggaggagacaacccgggagctgctgctgcccaactggcagggtagtggctcccacgggctgaccatcgcccagagggacgacggcgtctttgtgcaggaggtgacgcagaactcccctgcggcccgcactggggtggtcaaggagggggaccagattgtgggtgccaccatctactttgacaacctgcagtcgggtgaggtgacccagctgctgaacaccatggggcaccacacggtgggcctgaagctgcaccgcaagggggaccgctctcccgagcctggccagacctggacccgtgaagtcttcagctcctgcagctctgaagtggttctgaacacaccacagccatcagca

SEQ ID NO: 274 - DNA, 3678 bp, Homo sapiens
  source 1..3678: mol_type = genomic DNA
ggagtccagtgctggaggggcagggacggcggcggcgcagctcggaacccgccagggtccagggtccaggttccagcgcccggcggcccaggcaccccccgagcccagctccacacaccgttcctggatctcctctccccaggcggagcgtgcccctgcccagtccagtgaccttcgcctgttggagccctggttaatttttgcccagtctgcctgttgtggggctcctcccctttggggatataagcccggcctggggctgctccgttctctgcctggcctgaggctccctgagccgcctccccaccatcaccatggccaagggcttctatatttccaagtccctgggcatcctggggatcctcctgggcgtggcagccgtgtgcacaatcatcgcactgtcagtggtgtactcccaggagaagaacaagaacgccaacagctcccccgtggcctccaccaccccgtccgcctcagccaccaccaaccccgcctcggccaccaccttggaccaaagtaaagcgtggaatcgttaccgcctccccaacacgctgaaacccgattcctaccgggtgacgctgagaccgtacctcacccccaatgacaggggcctgtacgtttttaagggctccagcaccgtccgtttcacctgcaaggaggccactgacgtcatcatcatccacagcaagaagctcaactacaccctcagccaggggcacagggtggtcctgcgtggtgtgggaggctcccagccccccgacattgacaagactgagctggtggagcccaccgagtacctggtggtgcacctcaagggctccctggtgaaggacagccagtatgagatggacagcgagttcgagggggagttggcagatgacctggcgggcttctaccgcagcgagtacatggagggcaatgtcagaaaggtggtggccactacacagatgcaggctgcagatgcccggaagtccttcccatgcttcgatgagccggccatgaaggccgagttcaacatcacgcttatccaccccaaggacctgacagccctgtccaacatgcttcccaaaggtcccagcaccccacttccagaagaccccaactggaatgtcactgagttccacaccacgcccaagatgtccacgtacttgctggccttcattgtcagtgagttcgactacgtggagaagcaggcatccaatggtgtcttgatccggatctgggcccggcccagtgccattgcggcgggccacggcgattatgccctgaacgtgacgggccccatccttaacttctttgctggtcattatgacacaccctacccactcccaaaatcagaccagattggcctgccagacttcaacgccggcgccatggagaactggggactggtgacctaccgggagaactccctgctgttcgaccccctgtcctcctccagcagcaacaaggagcgggtggtcactgtgattgctcatgagctggcccaccagtggttcgggaacctggtgaccatagagtggtggaatgacctgtggctgaacgagggcttcgcctcctacgtggagtacctgggtgctgactatgcggagcccacctggaacttgaaagacctcatggtgctgaatgatgtgtaccgcgtgatggcagtggatgcactggcctcctcccacccgctgtccacacccgcctcggagatcaacacgccggcccagatcagtgagctgtttgacgccatctcctacagcaagggcgcctcagtcctcaggatgctctccagcttcctgtccgaggacgtattcaagcagggcctggcgtcctacctccacacctttgcctaccagaacaccatctacctgaacctgtgggaccacctgcaggaggctgtgaacaaccggtccatccaactccccaccaccgtgcgggacatcatgaaccgctggaccctgcagatgggcttcccggtcatcacggtggataccagcacggggaccctttcccaggagcacttcctccttgaccccgattccaatgttacccgcccctcagaattcaactacgtgtggattgtgcccatcacatccatcagagatggcagacagcagcaggactactggctgatagatgtaagagcccagaacgatctcttcagcacatcaggcaatgagtgggtcctgctgaacctcaatgtgacgggctattaccgggtgaactacgacgaagagaactggaggaagattcagactcagctgcagagagaccactcggccatccctgtcatcaatcgggcacagatcattaatgacgccttcaacctggccagtgcccataaggtccctgtcactctggcgctgaacaacaccctcttcctgattgaagagagacagtacatgccctgggaggccgccctgagcagcctgagctacttcaagctcatgtttgaccgctccgaggtctatggccccatgaagaactacctgaagaagcaggtcacacccctcttcattcacttcagaaataataccaacaactggagggagatcccagaaaacctgatggaccagtacagcgaggttaatgccatcagcaccgcctgctccaacggagttccagagtgtgaggagatggtctctggccttttcaagcagtggatggagaaccccaataataacccgatccaccccaacctgcggtccaccgtctactgcaacgctatcgcccagggcggggaggaggagtgggacttcgcctgggagcagttccgaaatgccacactggtcaatgaggctgacaagctccgggcagccctggcctgcagcaaagagttgtggatcctgaacaggtacctgagctacaccctgaacccggacttaatccggaagcaggacgccacctctaccatcatcagcattaccaacaacgtcattgggcaaggtctggtctgggactttgtccagagcaactggaagaagctttttaacgattatggtggtggctcgttctccttctccaacctcatccaggcagtgacacgacgattctccaccgagtatgagctgcagcagctggagcagttcaagaaggacaacgaggaaacaggcttcggctcaggcacccgggccctggagcaagccctggagaagacgaaagccaacatcaagtgggtgaaggagaacaaggaggtggtgctccagtggttcacagaaaacagcaaatagtccccagcccttgaagtcacccggcccccatgcaaggtgcccacatgtgtccatcccagcggctggtgcagggcctccattcctggagcccgaggcaccagtgtcctcccctcaaggacaaagtctccagcccacgttctctctgcctgtgagccagtctagttcctgatgacccaggctgcctgagcacctcccagcccctgcccctcatgccaaccccgccctaggcctggcatggcacctgtcgcccagtgccctggggctgatctcagggaagcccagctccagggccagatgagcagaagctctcgatggacaatgaacggccttgctgggggccgccctgtaccctctttcacctttccctaaagaccctaaatctgaggaatcaacagggcagcagatctgtatatttttttctaagagaaaatgtaaataaaggatttctagatgagtgaga

SEQ ID NO: 275 - DNA, 663 bp, Homo sapiens
  source 1..663: mol_type = genomic DNA
gagcgacagagcgagactctgtctcaaaaacaaataaaggaaaaagaaaaaaatgagaagcgcgtgttcccgactccggtgctttttcgcaaggtcgtgctactgcgccttctgaactacgagtcccaggcaccccccgagcccagctccacacaccgttcctggatctcctctccccaggcggagcgtgcccctgcccagtccagtgaccttcgcctgttggagccctggttaatttttgcccagtctgcctgttgtggggctcctcccctttggggatataagcccggcctggggctgctccgttctctgcctggcctgaggctccctgagccgcctccccaccatcaccatggccaagggcttctatatttccaagtccctgggcatcctggggatcctcctgggcgtggcagccgtgtgcacaatcatcgcactgtcagtggtgtactcccaggagaagaacaagaacgccaacagctcccccgtggcctccaccaccccgtccgcctcagccaccaccaaccccgcctcggccaccaccttggaccaaagtaaagcgtggaatcgttaccgcctccccaacacgctgaaacccgattcctaccgggtgacgctgagaccgtacctcacccccaatgacaggggcctgtacgtttttaa

SEQ ID NO: 276 - DNA, 638 bp, Homo sapiens
  source 1..638: mol_type = genomic DNA
gaggagtccagtgctggaggggcagggacggcggcggcgcagctcggaacccgccagggtccagggtccaggttccagcgcccggcggcccagctctcaagcagatcaatgcaatgccacctggccgcttgctttgcccactgggcctacagccggaagcctgcccttcagccctcgggcctgatcccaggccgcctgcagcctgtaaccagacactgtttgcttccagcaggcaccccccgagcccagctccacacaccgttcctggatctcctctccccaggcggagcgtgcccctgcccagtccagtgaccttcgcctgttggagccctggttaatttttgcccagtctgcctgttgtggggctcctcccctttggggatataagcccggcctggggctgctccgttctctgcctggcctgaggctccctgagccgcctccccaccatcaccatggccaagggcttctatatttccaagtccctgggcatcctggggatcctcctgggcgtggcagccgtgtgcacaatcatcgcactgtcagtggtgtactcccaggagaagaacaagaacgccaacagctcccccgtggcctccaccaccccgtccgcctcagccaccaccaaccccgcctcg

SEQ ID NO: 277 - DNA, 589 bp, Homo sapiens
  source 1..589: mol_type = genomic DNA
tgaaagcaagttgaatacattggtgcagaagcttcatgacttccttgcacactcatcagaagaatctgaagaaacaagttctcctccacgacttgcaatgaatcaaaacacagataaaatcagtggttctggaagtaactctgatatgatggaaaacagcaaggaagagggaactagctcttcagaaaaatccaagtcttcaggatcgtcacgatcaaagaggaaaccttcaattgtaacaaagtatgtagaatcagatgatgaaaaacctttggatgatgaaactgtaaatgaagatgcgtctaatgaaaattcagaaaatgatattactatgcagagcttgccaaaaggtacagtgattgtacagccagagccagtgctgaatgaagacaaagatgattttaaagggcctgaatttagaagcagaagtaaaatgaaaactgaaaatctcaaaaaacgcggaggtaaatacaagtgaaaatgaaacatgaatttaaattgctgtttatgaccatattggaaaatcggatgtgcttactaaaaatacctccacttttctgccttttgtttattaaaagcactacttaaa

SEQ ID NO: 278 - DNA, 11145 bp, Homo sapiens
  source 1..11145: mol_type = genomic DNA
ctcggcccaacaaaatggcggcggcagcggtgtcgctttgtttccgcggctcctgcggcggtggcagtggtagcggcctttgagctgtggggaggttccagcagcagctacagtgacgactaagactccagtgcatttctatcgtaaccgggcgcgggggagcgcagatcggcgcccagcaatcacagaagccgacaaggcgttcaagcgaaaacatgaccgctgagcccatgagtgaaagcaagttgaatacattggtgcagaagcttcatgacttccttgcacactcatcagaagaatctgaagaaacaagttctcctccacgacttgcaatgaatcaaaacacagataaaatcagtggttctggaagtaactctgatatgatggaaaacagcaaggaagagggaactagctcttcagaaaaatccaagtcttcaggatcgtcacgatcaaagaggaaaccttcaattgtaacaaagtatgtagaatcagatgatgaaaaacctttggatgatgaaactgtaaatgaagatgcgtctaatgaaaattcagaaaatgatattactatgcagagcttgccaaaaggtacagtgattgtacagccagagccagtgctgaatgaagacaaagatgattttaaagggcctgaatttagaagcagaagtaaaatgaaaactgaaaatctcaaaaaacgcggagaagatgggcttcatgggattgtgagctgcactgcttgtggacaacaggtcaatcattttcaaaaagattccatttatagacacccttcattgcaagttcttatttgtaagaattgctttaagtattacatgagtgatgatattagccgtgactcagatggaatggatgaacaatgtaggtggtgtgcggaaggtggaaacttgatttgttgtgacttttgccataatgctttctgcaagaaatgcattctacgcaaccttggtcgaaaggagttgtccacaataatggatgaaaacaaccaatggtattgctacatttgtcacccagagcctttgttggacttggtcactgcatgtaacagcgtatttgagaatttagaacagttgttgcagcaaaataagaagaagataaaagttgacagtgaaaagagtaataaagtatatgaacatacatccagattttctccaaagaagactagttcaaattgtaatggagaagaaaagaaattagatgattcctgttctggctctgtaacctactcttattccgcactaattgtgcccaaagagatgattaagaaggcaaaaaaactgattgagaccacagccaacatgaactccagttatgttaaatttttaaagcaggcaacagataattcagaaatcagttctgctacaaaattacgtcagcttaaggcttttaagtctgtgttggctgatattaagaaggctcatcttgcattggaagaagacttaaattccgagtttcgagcgatggatgctgtaaacaaagagaaaaataccaaagagcataaagtcatagatgctaagtttgaaacaaaagcacgaaaaggagaaaaaccttgtgctttggaaaagaaggatatttcaaagtcagaagctaaactttcaagaaaacaggtagatagtgagcacatgcatcagaatgttccaacagaggaacaaagaacaaataaaagtaccggtggtgaacataagaaatctgatagaaaagaagaacctcaatatgaacctgccaacacttctgaagatttagacatggatattgtgtctgttccttcctcagttccagaagacatttttgagaatcttgagactgctatggaagttcagagttcagttgatcatcaaggggatggcagcagtggaactgaacaagaagtggagagttcatctgtaaaattaaatatttcttcaaaagacaacagaggaggtattaaatcaaaaactacagctaaagtaacaaaagaattatatgttaaactcactcctgtttccctttctaattccccaattaaaggtgctgattgtcaggaagttccacaagataaagatggctataaaagttgtggtctgaaccccaagttagagaaatgtggacttggacaggaaaacagtgataatgagcatttggttgaaaatgaagtttcattacttttagaggaatctgatcttcgaagatccccacgtgtaaagactacacccttgaggcgaccgacagaaactaaccctgtaacatctaattcagatgaagaatgtaatgaaacagttaaggagaaacaaaaactatcagttccagtgagaaaaaaggataagcgtaattcttctgacagtgctatagataatcctaagcctaataaattgccaaaatctaagcaatcagagactgtggatcaaaattcagattctgatgaaatgctagcaatcctcaaagaggtgagcaggatgagtcacagttcttcttcagatactgatattaatgaaattcatacaaaccataagactttgtatgatttaaagactcaggcggggaaagatgataaaggaaaaaggaaacgaaaaagttctacatctggctcagattttgatactaaaaagggcaaatcagctaagagctctataatttctaaaaagaaacgacaaacccagtctgagtcttctaattatgactcagaattagaaaaagagataaagagcatgagtaaaattggtgctgccagaaccaccaaaaaaagaattccaaatacaaaagattttgactcttctgaagatgagaaacacagcaaaaaaggaatggataatcaagggcacaaaaatttgaagacctcacaagaaggatcatctgatgatgctgaaagaaaacaagagagagagactttctcttcagcagaaggcacagttgataaagacacgaccatcatggaattaagagatcgacttcctaagaagcagcaagcaagtgcttccactgatggtgtcgataagctttctgggaaagagcagagttttacttctttggaagttagaaaagttgctgaaactaaagaaaagagcaagcatctcaaaaccaaaacatgtaaaaaagtacaggatggcttatctgatattgcagagaaattcctaaagaaagaccagagcgatgaaacttctgaagatgataaaaagcagagcaaaaagggaactgaagaaaaaaagaaaccttcagactttaagaaaaaagtaattaaaatggaacaacagtatgaatcttcatctgatggcactgaaaagttacctgagcgagaagaaatttgtcattttcctaagggcataaaacaaattaagaatggaacaactgatggagaaaagaaaagtaaaaaaataagagataaaacttctaaaaagaaggatgaattatctgattatgctgagaagtcaacagggaaaggagatagttgtgactcttcagaggataaaaagagtaagaatggagcatatggtagagagaagaaaaggtgcaagttgcttggaaagagttcaaggaagagacaagattgttcatcatctgatactgagaaatattccatgaaagaagatggttgtaactcttctgataagagactgaaaagaatagaattgagggaaagaagaaatttaagttcaaagagaaatactaaggaaatacaaagtggctcatcatcatctgatgctgaggaaagttctgaagataataaaaagaagaagcaaagaacttcatctaaaaagaaggcagtcattgtcaaggagaaaaagagaaactccctaagaacaagcactaaaaggaagcaagctgacattacatcctcatcttcttctgatatagaagatgatgatcagaattctataggtgagggaagcagcgatgaacagaaaattaagcctgtgactgaaaatttagtgctgtcttcacatactggattttgccaatcttcaggagatgaagccttatctaaatcagtgcctgtcacagtggatgatgatgatgacgacaatgatcctgagaatagaattgccaagaagatgcttttagaagaaattaaagccaatctttcctctgatgaggatggatcttcagatgatgagccagaagaagggaaaaaaagaactggaaaacaaaatgaagaaaacccaggagatgaggaagcaaaaaatcaagtcaattctgaatcagattcagattctgaagaatctaagaagccaagatacagacataggcttttgcggcacaaattgactgtgagtgacggagaatctggagaagaaaaaaagacaaagcctaaagagcataaagaagtcaaaggcagaaacagaagaaaggtgagcagtgaagattcagaagattctgattttcaggaatcaggagttagtgaagaagttagtgaatccgaagatgaacagcggcccagaacaaggtctgcaaagaaagcagagttggaagaaaatcagcggagctataaacagaaaaagaaaaggcgacgtattaaggttcaagaagattcatccagtgaaaacaagagtaattctgaggaagaagaggaggaaaaagaagaggaggaggaagaggaggaggaggaggaagaggaggaggaagatgaaaatgatgattccaagtctcctggaaaaggcagaaagaaaattcggaagattcttaaagatgataaactgagaacagaaacacaaaatgctcttaaggaagaggaagagagacgaaaacgtattgctgagagggagcgtgagcgagaaaaattgagagaggtgatagaaattgaagatgcttcacccaccaagtgtccaataacaaccaagttggttttagatgaagatgaagaaaccaaagaacctttagtgcaggttcatagaaatatggttatcaaattgaaaccccatcaagtagatggtgttcagtttatgtgggattgctgctgtgagtctgtgaaaaaaacaaagaaatctccaggttcaggatgcattcttgcccactgtatgggccttggtaagactttacaggtggtaagttttcttcatacagttcttttgtgtgacaaactggatttcagcacggcgttagtggtttgtcctcttaatactgctttgaattggatgaatgaatttgagaagtggcaagagggattaaaagatgatgagaagcttgaggtttctgaattagcaactgtgaaacgtcctcaggagagaagctacatgctgcagaggtggcaagaagatggtggtgttatgatcataggctatgagatgtatagaaatcttgctcaaggaaggaatgtgaagagtcggaaacttaaagaaatatttaacaaagctttggttgatccaggccctgattttgttgtttgtgatgaaggccatattctaaaaaatgaagcatctgctgtttctaaagctatgaattctatacgatcaaggaggaggattattttaacaggaacaccacttcaaaataacctaattgagtatcattgtatggttaattttatcaaggaaaatttacttggatccattaaggagttcaggaatagatttataaatccaattcaaaatggtcagtgtgcagattctaccatggtagatgtcagagtgatgaaaaaacgtgctcacattctctatgagatgttagctggatgtgttcagaggaaagattatacagcattaacaaaattcttgcctccaaaacacgaatatgtgttagctgtgagaatgacttctattcagtgcaagctctatcagtactacttagatcacttaacaggtgtgggcaataatagtgaaggtggaagaggaaaggcaggtgcaaagcttttccaagattttcagatgttaagtagaatatggactcatccttggtgtttgcagctagactacattagcaaagaaaataagggttattttgatgaagacagtatggatgaatttatagcctcagattctgatgaaacctccatgagtttaagctccgatgattatacaaaaaagaagaaaaaagggaaaaaggggaaaaaagatagtagctcaagtggaagtggcagtgacaatgatgttgaagtgattaaggtctggaattcaagatctcggggaggtggtgaaggaaatgtggatgaaacaggaaacaatccttctgtttctttaaaactggaagaaagtaaagctacttcttcttctaatccaagcagcccagctccagactggtacaaagattttgttacagatgctgatgctgaggttttagagcattctgggaaaatggtacttctctttgaaattcttcgaatggcagaggaaattggggataaagtccttgttttcagccagtccctcatatctctggacttgattgaagattttcttgaattagctagtagggagaagacagaagataaagataaaccccttatttataaaggtgaggggaagtggcttcgaaacattgactattaccgtttagatggttccactactgcacagtcaaggaagaagtgggctgaagaatttaatgatgaaactaatgtgagaggacgattatttatcatttctactaaagcaggatctctaggaattaatctggtagctgctaatcgagtaattatattcgacgcttcttggaatccatcttatgacatccagagtatattcagagtttatcgctttggacaaactaagcctgtttatgtatataggttcttagctcagggaaccatggaagataagatttatgatcggcaagtaactaagcagtcactgtcttttcgagttgttgatcagcagcaggtggagcgtcattttactatgaatgagcttactgaactttatacttttgagccagacttattagatgaccctaattcagaaaagaagaagaagagggatactcccatgctgccaaaggataccatacttgcagagctccttcagatacataaagaacacattgtaggataccatgaacatgattctcttttggaccacaaagaagaagaagagttgactgaagaagaaagaaaagcagcttgggctgagtatgaagcagagaagaagggactgaccatgcgtttcaacataccaactgggaccaatttaccccctgtcagtttcaactctcaaactccttatattcctttcaatttgggagccctgtcagcaatgagtaatcaacagctggaggacctcattaatcaaggaagagaaaaagttgtagaagcaacaaacagtgtgacagcagtgaggattcaacctcttgaggatataatttcagctgtatggaaggagaacatgaatctctcagaggcccaagtacaggcgttagcattaagtagacaagccagccaggagcttgatgttaaacgaagagaagcaatctacaatgatgtattgacaaaacaacagatgttaatcagctgtgttcagcgaatacttatgaacagaaggctccagcagcagtacaatcagcagcaacagcaacaaatgacttatcaacaagcaacactgggtcacctcatgatgccaaagcccccaaatttgatcatgaatccttctaactaccagcagattgatatgagaggaatgtatcagccagtggctggtggtatgcagccaccaccattacagcgtgcaccacccccaatgagaagcaaaaatccaggaccttcccaagggaaatcaatgtgattttgcactaaaagcttaatggattgttaaaatcatagaaagatcttttatttttttaggaatcaatgacttaacagaactcaactgtataaatagtttggtccccttaaatgccaatcttccatattagttttactttttttttttttaaatagggcataccatttcttcctgacatttgtcagtgatgttgcctagaatcttcttacacacgctgagtacagaagatatttcaaattgttttcagtgaaaacaagtccttccataatagtaacaactccacagatttcctctctaaatttttatgcctgcttttagcaaccataaaattgtcataaaattaataaatttaggaaagaataaagatttatatattcattctttacatataaaaacacacagctgagttcttagagttgattcctcaagttatgaaatacttttgtacttaatccatttcttgattaaagtgattgaaatggttttaatgttcttttgactgaagtctgaaactgggctcctgctttattgtctctgtgactgaaagttagaaactgagggttatctttgacacagaattgtgtgcaatattcttaaatactactgctctaaaagttggagaagtcttgcagttatcttagcattgtataaacagccttaagtatagcctaagaagagaattcctttttcttctttagtccttctgccattttttattttcagttatatgtgctgaaataattactggtaaaatttcagggttgtggattatcttccacacatgaattttctctctcctggcacgaatataaagcacatctcttaactgcatggtgccagtgctaatgcttcatcctgttgctggcagtgggatgtggacttagaaaatcaagttctagcattttagtaggttaacactgaagttgtggttgttaggttcacaccctgttttataaacaacatcaaaatggcagaaccattgctgactttaggttcacatgaggaatgtacttttaacaattcccagtactatcagtattgtgaaataattcctctgaaagataagaatcactggcttctatgcgcttcttttctctcatcatcatgttcttttaccccagtttccttacatttttttaaattgtttcagagtttgttttttttttagtttagattgtgaggcaattattaaatcaaaattaattcatccaatacccctttactagaagttttactagaaaatgtattacattttattttttcttaatccagttctgcaaaaatgacctataaatttattcatgtacaattttggttacttgaattgttaaagaaaacattgtttttgactatgggagtcaactcaacatggcagaaccatttttgagatgatgatacaacaggtagtgaaacagcttaagaattccaaaaaaaaaaaaaaaaaaaaaaaaaagaaaactgggtttgggctttgctttaggtatcactggattagaatgagtttaacattagctaaaactgctttgagttgtttggatgattaagagattgccatttttatcttggaagaactagtggtaaaacatccaagagcactaggattgtgatacagaatttgtgaggtttggtggatccacgcccctctcccccactttcccatgatgaaatatcactaataaatcctgtatatttagatattatgctagccatgtaatcagatttatttaattgggtggggcaggtgtgtatttactttagaaaaaatgaaaaagacaagatttatgagaaatatttgaaggcagtacactctggccaactgttaccagttggtatttctacaagttcagaatattttaaacctgatttactagacctgggaattttcaacatggtctaattatttactcaaagacatagatgtgaaaattttaggcaaccttctaaatctttttcaccatggatgaaactataacttaaagaataatacttagaagggttaattggaaatcagagtttgaaataaaacttggaccactttgtatacactcttctcacttgacattttagctatataatatgtactttgagtataacatcaagctttaacaaatatttaaagacaaaaaaatcacgtcagtaaaatactaaaaggctcatttttatatttgttttagatgttttaaatagttgcaatggattaaaaatgatgatttaaaatgttgcttgtaatacagttttgcctgctaaattctccacattttgtaacctgttttatttctttgggtgtaaagcgtttttgcttagtattgtgatattgtatatgttttgtcccagttgtatagtaatgtttcagtccatcatccagctttggctgctgaaatcatacagctgtgaagacttgcctttgtttctgttagactgcttttcagttctgtattgagtatcttaagtactgtagaaaagatgtcacttcttcctttaaggctgttttgtaatatatataaggactggaattgtgtttttaaagaaaagcattcaagtatgacaatatactatctgtgttttcaccattcaaagtgctgtttagtagttgaaacttaaactatttaatgtcatttaataaagtgaccaaaatgtgttgtgctctttattgtattttcacagctttgaaaatctgtgcacatactgtttcatagaaaatgtatagcttttgttgtcctatataatggtggttcttttgcacatttagttatttaatattgagaggtcacgaagtttggttattgaatctgttatatactaaattctgtaaagggagatctctcatctcaaaaagaatttacataccaggaagtccatgtgtgtttgtgttagttttggatgtctttgtgtaatccagccccatttcctgtttcccaacagctgtaacactcattttaagtcaagcagggctaccaacccacacttgatagaaaagctgcttaccattcagaagcttccttattacctggcctccaaatgagctgaatattttgtagccttcccttagctatgttcattttccctccattatcataaaatcagatcgatatttatgtgccccaaacaaaactttaagagcagttacattctgtcccagtagcccttgtttcctttgagagtagcatgttgtgaggctatagagacttattctaccagtaaaacaggtcaatccttttacatgtttattatactaaaaattatgttcagggtatttactactttatttcaccagactcagtctcaagtgacttggctatctccaaatcagatctacccttagagaataaacatttttctaccgttattttttttcaagtctataatctgagccagtcccaaaggagtgatcaagtttcagaaatgctttcatcttcacaacattttatatatactattatatggggtgaat

SEQ ID NO: 279 - DNA, 11031 bp, Homo sapiens
  source 1..11031: mol_type = genomic DNA
ctcggcccaacaaaatggcggcggcagcggtgtcgctttgtttccgcggctcctgcggcggtggcagtggtagcggcctttgagctgtggggaggttccagcagcagctacagtgacgactaagactccagtgcatttctatcgtaaccgggcgcgggggagcgcagatcggcgcccagcaatcacagaagccgacaaggcgttcaagcgaaaacatgaccgctgagcccatgagtgaaagcaagttgaatacattggtgcagaagcttcatgacttccttgcacactcatcagaagaatctgaagaaacaagttctcctccacgacttgcaatgaatcaaaacacagataaaatcagtggttctggaagtaactctgatatgatggaaaacagcaaggaagagggaactagctcttcagaaaaatccaagtcttcaggatcgtcacgatcaaagaggaaaccttcaattgtaacaaagtatgtagaatcagatgatgaaaaacctttggatgatgaaactgtaaatgaagatgcgtctaatgaaaattcagaaaatgatattactatgcagagcttgccaaaagaagatgggcttcatgggattgtgagctgcactgcttgtggacaacaggtcaatcattttcaaaaagattccatttatagacacccttcattgcaagttcttatttgtaagaattgctttaagtattacatgagtgatgatattagccgtgactcagatggaatggatgaacaatgtaggtggtgtgcggaaggtggaaacttgatttgttgtgacttttgccataatgctttctgcaagaaatgcattctacgcaaccttggtcgaaaggagttgtccacaataatggatgaaaacaaccaatggtattgctacatttgtcacccagagcctttgttggacttggtcactgcatgtaacagcgtatttgagaatttagaacagttgttgcagcaaaataagaagaagataaaagttgacagtgaaaagagtaataaagtatatgaacatacatccagattttctccaaagaagactagttcaaattgtaatggagaagaaaagaaattagatgattcctgttctggctctgtaacctactcttattccgcactaattgtgcccaaagagatgattaagaaggcaaaaaaactgattgagaccacagccaacatgaactccagttatgttaaatttttaaagcaggcaacagataattcagaaatcagttctgctacaaaattacgtcagcttaaggcttttaagtctgtgttggctgatattaagaaggctcatcttgcattggaagaagacttaaattccgagtttcgagcgatggatgctgtaaacaaagagaaaaataccaaagagcataaagtcatagatgctaagtttgaaacaaaagcacgaaaaggagaaaaaccttgtgctttggaaaagaaggatatttcaaagtcagaagctaaactttcaagaaaacaggtagatagtgagcacatgcatcagaatgttccaacagaggaacaaagaacaaataaaagtaccggtggtgaacataagaaatctgatagaaaagaagaacctcaatatgaacctgccaacacttctgaagatttagacatggatattgtgtctgttccttcctcagttccagaagacatttttgagaatcttgagactgctatggaagttcagagttcagttgatcatcaaggggatggcagcagtggaactgaacaagaagtggagagttcatctgtaaaattaaatatttcttcaaaagacaacagaggaggtattaaatcaaaaactacagctaaagtaacaaaagaattatatgttaaactcactcctgtttccctttctaattccccaattaaaggtgctgattgtcaggaagttccacaagataaagatggctataaaagttgtggtctgaaccccaagttagagaaatgtggacttggacaggaaaacagtgataatgagcatttggttgaaaatgaagtttcattacttttagaggaatctgatcttcgaagatccccacgtgtaaagactacacccttgaggcgaccgacagaaactaaccctgtaacatctaattcagatgaagaatgtaatgaaacagttaaggagaaacaaaaactatcagttccagtgagaaaaaaggataagcgtaattcttctgacagtgctatagataatcctaagcctaataaattgccaaaatctaagcaatcagagactgtggatcaaaattcagattctgatgaaatgctagcaatcctcaaagaggtgagcaggatgagtcacagttcttcttcagatactgatattaatgaaattcatacaaaccataagactttgtatgatttaaagactcaggcggggaaagatgataaaggaaaaaggaaacgaaaaagttctacatctggctcagattttgatactaaaaagggcaaatcagctaagagctctataatttctaaaaagaaacgacaaacccagtctgagtcttctaattatgactcagaattagaaaaagagataaagagcatgagtaaaattggtgctgccagaaccaccaaaaaaagaattccaaatacaaaagattttgactcttctgaagatgagaaacacagcaaaaaaggaatggataatcaagggcacaaaaatttgaagacctcacaagaaggatcatctgatgatgctgaaagaaaacaagagagagagactttctcttcagcagaaggcacagttgataaagacacgaccatcatggaattaagagatcgacttcctaagaagcagcaagcaagtgcttccactgatggtgtcgataagctttctgggaaagagcagagttttacttctttggaagttagaaaagttgctgaaactaaagaaaagagcaagcatctcaaaaccaaaacatgtaaaaaagtacaggatggcttatctgatattgcagagaaattcctaaagaaagaccagagcgatgaaacttctgaagatgataaaaagcagagcaaaaagggaactgaagaaaaaaagaaaccttcagactttaagaaaaaagtaattaaaatggaacaacagtatgaatcttcatctgatggcactgaaaagttacctgagcgagaagaaatttgtcattttcctaagggcataaaacaaattaagaatggaacaactgatggagaaaagaaaagtaaaaaaataagagataaaacttctaaaaagaaggatgaattatctgattatgctgagaagtcaacagggaaaggagatagttgtgactcttcagaggataaaaagagtaagaatggagcatatggtagagagaagaaaaggtgcaagttgcttggaaagagttcaaggaagagacaagattgttcatcatctgatactgagaaatattccatgaaagaagatggttgtaactcttctgataagagactgaaaagaatagaattgagggaaagaagaaatttaagttcaaagagaaatactaaggaaatacaaagtggctcatcatcatctgatgctgaggaaagttctgaagataataaaaagaagaagcaaagaacttcatctaaaaagaaggcagtcattgtcaaggagaaaaagagaaactccctaagaacaagcactaaaaggaagcaagctgacattacatcctcatcttcttctgatatagaagatgatgatcagaattctataggtgagggaagcagcgatgaacagaaaattaagcctgtgactgaaaatttagtgctgtcttcacatactggattttgccaatcttcaggagatgaagccttatctaaatcagtgcctgtcacagtggatgatgatgatgacgacaatgatcctgagaatagaattgccaagaagatgcttttagaagaaattaaagccaatctttcctctgatgaggatggatcttcagatgatgagccagaagaagggaaaaaaagaactggaaaacaaaatgaagaaaacccaggagatgaggaagcaaaaaatcaagtcaattctgaatcagattcagattctgaagaatctaagaagccaagatacagacataggcttttgcggcacaaattgactgtgagtgacggagaatctggagaagaaaaaaagacaaagcctaaagagcataaagaagtcaaaggcagaaacagaagaaaggtgagcagtgaagattcagaagattctgattttcaggaatcaggagttagtgaagaagttagtgaatccgaagatgaacagcggcccagaacaaggtctgcaaagaaagcagagttggaagaaaatcagcggagctataaacagaaaaagaaaaggcgacgtattaaggttcaagaagattcatccagtgaaaacaagagtaattctgaggaagaagaggaggaaaaagaagaggaggaggaagaggaggaggaggaggaagaggaggaggaagatgaaaatgatgattccaagtctcctggaaaaggcagaaagaaaattcggaagattcttaaagatgataaactgagaacagaaacacaaaatgctcttaaggaagaggaagagagacgaaaacgtattgctgagagggagcgtgagcgagaaaaattgagagaggtgatagaaattgaagatgcttcacccaccaagtgtccaataacaaccaagttggttttagatgaagatgaagaaaccaaagaacctttagtgcaggttcatagaaatatggttatcaaattgaaaccccatcaagtagatggtgttcagtttatgtgggattgctgctgtgagtctgtgaaaaaaacaaagaaatctccaggttcaggatgcattcttgcccactgtatgggccttggtaagactttacaggtggtaagttttcttcatacagttcttttgtgtgacaaactggatttcagcacggcgttagtggtttgtcctcttaatactgctttgaattggatgaatgaatttgagaagtggcaagagggattaaaagatgatgagaagcttgaggtttctgaattagcaactgtgaaacgtcctcaggagagaagctacatgctgcagaggtggcaagaagatggtggtgttatgatcataggctatgagatgtatagaaatcttgctcaaggaaggaatgtgaagagtcggaaacttaaagaaatatttaacaaagctttggttgatccaggccctgattttgttgtttgtgatgaaggccatattctaaaaaatgaagcatctgctgtttctaaagctatgaattctatacgatcaaggaggaggattattttaacaggaacaccacttcaaaataacctaattgagtatcattgtatggttaattttatcaaggaaaatttacttggatccattaaggagttcaggaatagatttataaatccaattcaaaatggtcagtgtgcagattctaccatggtagatgtcagagtgatgaaaaaacgtgctcacattctctatgagatgttagctggatgtgttcagaggaaagattatacagcattaacaaaattcttgcctccaaaacacgaatatgtgttagctgtgagaatgacttctattcagtgcaagctctatcagtactacttagatcacttaacaggtgtgggcaataatagtgaaggtggaagaggaaaggcaggtgcaaagcttttccaagattttcagatgttaagtagaatatggactcatccttggtgtttgcagctagactacattagcaaagaaaataagggttattttgatgaagacagtatggatgaatttatagcctcagattctgatgaaacctccatgagtttaagctccgatgattatacaaaaaagaagaaaaaagggaaaaaggggaaaaaagatagtagctcaagtggaagtggcagtgacaatgatgttgaagtgattaaggtctggaattcaagatctcggggaggtggtgaaggaaatgtggatgaaacaggaaacaatccttctgtttctttaaaactggaagaaagtaaagctacttcttcttctaatccaagcagcccagctccagactggtacaaagattttgttacagatgctgatgctgaggttttagagcattctgggaaaatggtacttctctttgaaattcttcgaatggcagaggaaattggggataaagtccttgttttcagccagtccctcatatctctggacttgattgaagattttcttgaattagctagtagggagaagacagaagataaagataaaccccttatttataaaggtgaggggaagtggcttcgaaacattgactattaccgtttagatggttccactactgcacagtcaaggaagaagtgggctgaagaatttaatgatgaaactaatgtgagaggacgattatttatcatttctactaaagcaggatctctaggaattaatctggtagctgctaatcgagtaattatattcgacgcttcttggaatccatcttatgacatccagagtatattcagagtttatcgctttggacaaactaagcctgtttatgtatataggttcttagctcagggaaccatggaagataagatttatgatcggcaagtaactaagcagtcactgtcttttcgagttgttgatcagcagcaggtggagcgtcattttactatgaatgagcttactgaactttatacttttgagccagacttattagatgaccctaattcagaaaagaagaagaagagggatactcccatgctgccaaaggataccatacttgcagagctccttcagatacataaagaacacattgtaggataccatgaacatgattctcttttggaccacaaagaagaagaagagttgactgaagaagaaagaaaagcagcttgggctgagtatgaagcagagaagaagggactgaccatgcgtttcaacataccaactgggaccaatttaccccctgtcagtttcaactctcaaactccttatattcctttcaatttgggagccctgtcagcaatgagtaatcaacagctggaggacctcattaatcaaggaagagaaaaagttgtagaagcaacaaacagtgtgacagcagtgaggattcaacctcttgaggatataatttcagctgtatggaaggagaacatgaatctctcagaggcccaagtacaggcgttagcattaagtagacaagccagccaggagcttgatgttaaacgaagagaagcaatctacaatgatgtattgacaaaacaacagatgttaatcagctgtgttcagcgaatacttatgaacagaaggctccagcagcagtacaatcagcagcaacagcaacaaatgacttatcaacaagcaacactgggtcacctcatgatgccaaagcccccaaatttgatcatgaatccttctaactaccagcagattgatatgagaggaatgtatcagccagtggctggtggtatgcagccaccaccattacagcgtgcaccacccccaatgagaagcaaaaatccaggaccttcccaagggaaatcaatgtgattttgcactaaaagcttaatggattgttaaaatcatagaaagatcttttatttttttaggaatcaatgacttaacagaactcaactgtataaatagtttggtccccttaaatgccaatcttccatattagttttactttttttttttttaaatagggcataccatttcttcctgacatttgtcagtgatgttgcctagaatcttcttacacacgctgagtacagaagatatttcaaattgttttcagtgaaaacaagtccttccataatagtaacaactccacagatttcctctctaaatttttatgcctgcttttagcaaccataaaattgtcataaaattaataaatttaggaaagaataaagatttatatattcattctttacatataaaaacacacagctgagttcttagagttgattcctcaagttatgaaatacttttgtacttaatccatttcttgattaaagtgattgaaatggttttaatgttcttttgactgaagtctgaaactgggctcctgctttattgtctctgtgactgaaagttagaaactgagggttatctttgacacagaattgtgtgcaatattcttaaatactactgctctaaaagttggagaagtcttgcagttatcttagcattgtataaacagccttaagtatagcctaagaagagaattcctttttcttctttagtccttctgccattttttattttcagttatatgtgctgaaataattactggtaaaatttcagggttgtggattatcttccacacatgaattttctctctcctggcacgaatataaagcacatctcttaactgcatggtgccagtgctaatgcttcatcctgttgctggcagtgggatgtggacttagaaaatcaagttctagcattttagtaggttaacactgaagttgtggttgttaggttcacaccctgttttataaacaacatcaaaatggcagaaccattgctgactttaggttcacatgaggaatgtacttttaacaattcccagtactatcagtattgtgaaataattcctctgaaagataagaatcactggcttctatgcgcttcttttctctcatcatcatgttcttttaccccagtttccttacatttttttaaattgtttcagagtttgttttttttttagtttagattgtgaggcaattattaaatcaaaattaattcatccaatacccctttactagaagttttactagaaaatgtattacattttattttttcttaatccagttctgcaaaaatgacctataaatttattcatgtacaattttggttacttgaattgttaaagaaaacattgtttttgactatgggagtcaactcaacatggcagaaccatttttgagatgatgatacaacaggtagtgaaacagcttaagaattccaaaaaaaaaaaaaaaaaaaaaaaaaagaaaactgggtttgggctttgctttaggtatcactggattagaatgagtttaacattagctaaaactgctttgagttgtttggatgattaagagattgccatttttatcttggaagaactagtggtaaaacatccaagagcactaggattgtgatacagaatttgtgaggtttggtggatccacgcccctctcccccactttcccatgatgaaatatcactaataaatcctgtatatttagatattatgctagccatgtaatcagatttatttaattgggtggggcaggtgtgtatttactttagaaaaaatgaaaaagacaagatttatgagaaatatttgaaggcagtacactctggccaactgttaccagttggtatttctacaagttcagaatattttaaacctgatttactagacctgggaattttcaacatggtctaattatttactcaaagacatagatgtgaaaattttaggcaaccttctaaatctttttcaccatggatgaaactataacttaaagaataatacttagaagggttaattggaaatcagagtttgaaataaaacttggaccactttgtatacactcttctcacttgacattttagctatataatatgtactttgagtataacatcaagctttaacaaatatttaaagacaaaaaaatcacgtcagtaaaatactaaaaggctcatttttatatttgttttagatgttttaaatagttgcaatggattaaaaatgatgatttaaaatgttgcttgtaatacagttttgcctgctaaattctccacattttgtaacctgttttatttctttgggtgtaaagcgtttttgcttagtattgtgatattgtatatgttttgtcccagttgtatagtaatgtttcagtccatcatccagctttggctgctgaaatcatacagctgtgaagacttgcctttgtttctgttagactgcttttcagttctgtattgagtatcttaagtactgtagaaaagatgtcacttcttcctttaaggctgttttgtaatatatataaggactggaattgtgtttttaaagaaaagcattcaagtatgacaatatactatctgtgttttcaccattcaaagtgctgtttagtagttgaaacttaaactatttaatgtcatttaataaagtgaccaaaatgtgttgtgctctttattgtattttcacagctttgaaaatctgtgcacatactgtttcatagaaaatgtatagcttttgttgtcctatataatggtggttcttttgcacatttagttatttaatattgagaggtcacgaagtttggttattgaatctgttatatactaaattctgtaaagggagatctctcatctcaaaaagaatttacataccaggaagtccatgtgtgtttgtgttagttttggatgtctttgtgtaatccagccccatttcctgtttcccaacagctgtaacactcattttaagtcaagcagggctaccaacccacacttgatagaaaagctgcttaccattcagaagcttccttattacctggcctccaaatgagctgaatattttgtagccttcccttagctatgttcattttccctccattatcataaaatcagatcgatatttatgtgccccaaacaaaactttaagagcagttacattctgtcccagtagcccttgtttcctttgagagtagcatgttgtgaggctatagagacttattctaccagtaaaacaggtcaatccttttacatgtttattatactaaaaattatgttcagggtatttactactttatttcaccagactcagtctcaagtgacttggctatctccaaatcagatctacccttagagaataaacatttttctaccgttattttttttcaagtctataatctgagccagtcccaaaggagtgatcaagtttcagaaatgctttcatcttcacaacattttatatatactattatatggggtgaat

SEQ ID NO: 280 - DNA, 2737 bp, Homo sapiens
  source 1..2737: mol_type = genomic DNA
ataaactacaacagagataaaatcagtggttctggaagtaactctgatatgatggaaaacagcaaggaagagggaactagctcttcagaaaaatccaagtcttcaggatcgtcacgatcaaagaggaaaccttcaattgtaacaaagtatgtagaatcagatgatgaaaaacctttggatgatgaaactgtaaatgaagatgcgtctaatgaaaattcagaaaatgatattactatgcagagcttgccaaaaggtacagtgattgtacagccagagccagtgctgaatgaagacaaagatgattttaaagggcctgaatttagaagcagaagtaaaatgaaaactgaaaatctcaaaaaacgcggagaagatgggcttcatgggattgtgagctgcactgcttgtggacaacaggtcaatcattttcaaaaagattccatttatagacacccttcattgcaagttcttatttgtaagaattgctttaagtattacatgagtgatgatattagccgtgactcagatggaatggatgaacaatgtaggtggtgtgcggaaggtggaaacttgatttgttgtgacttttgccataatgctttctgcaagaaatgcattctacgcaaccttggtcgaaaggagttgtccacaataatggatgaaaacaaccaatggtattgctacatttgtcacccagagcctttgttggacttggtcactgcatgtaacagcgtatttgagaatttagaacagttgttgcagcaaaataagaagaagataaaagttgacagtgaaaagagtaataaagtatatgaacatacatccagattttctccaaagaagactagttcaaattgtaatggagaagaaaagaaattagatgattcctgttctggctctgtaacctactcttattccgcactaattgtgcccaaagagatgattaagaaggcaaaaaaactgattgagaccacagccaacatgaactccagttatgttaaatttttaaagcaggcaacagataattcagaaatcagttctgctacaaaattacgtcagcttaaggcttttaagtctgtgttggctgatattaagaaggctcatcttgcattggaagaagacttaaattccgagtttcgagcgatggatgctgtaaacaaagagaaaaataccaaagagcataaagtcatagatgctaagtttgaaacaaaagcacgaaaaggagaaaaaccttgtgctttggaaaagaaggatatttcaaagtcagaagctaaactttcaagaaaacaggtagatagtgagcacatgcatcagaatgttccaacagaggaacaaagaacaaataaaagtaccggtggtgaacataagaaatctgatagaaaagaagaacctcaatatgaacctgccaacacttctgaagatttagacatggatattgtgtctgttccttcctcagttccagaagacatttttgagaatcttgagactgctatggaagttcagagttcagttgatcatcaaggggatggcagcagtggaactgaacaagaagtggagagttcatctgtaaaattaaatatttcttcaaaagacaacagaggaggtgctgattgtcaggaagttccacaagataaagatggctataaaagttgtggtctgaaccccaagttagagaaatgtggacttggacaggaaaacagtgataatgagcatttggttgaaaatgaagtttcattacttttagaggaatctgatcttcgaagatccccacgtgtaaagactacacccttgaggcgaccgacagaaactaaccctgtaacatctaattcagatgaagaatgtaatgaaacagttaaggagaaacaaaaactatcagttccagtgagaaaaaaggataagcgtaattcttctgacagtgctatagataatcctaagcctaataaattgccaaaatctaagcaatcagagactgtggatcaaaattcagattctgatgaaatgctagcaatcctcaaagaggtgagcaggatgagtcacagttcttcttcagatactgatattaatgaaattcatacaaaccataagactttgtatgatttaaagactcaggcggggaaagatgataaaggaaaaaggaaacgaaaaagttctacatctggctcagattttgatactaaaaagggcaaatcagctaagagctctataatttctaaaaagaaacgacaaacccagtctgagtcttctaattatgactcagaattagaaaaagagataaagagcatgagtaaaattggtgctgccagaaccaccaaaaaaagaattccaaatacaaaagattttgactcttctgaagatgagaaacacagcaaaaaaggaatggataatcaagggcacaaaaatttgaagacctcacaagaaggatcatctgatgatgctgaaagaaaacaagagagagagactttctcttcagcagaaggcacagttgataaagacacgaccatcatggaattaagagatcgacttcctaagaagcagcaagcaagtgcttccactgatggtgtcgataagctttctgggaaagagcagagttttacttctttggaagttagaaaagttgctgaaactaaagaaaagagcaagcatctcaaaaccaaaacatgtaaaaaagtacaggatggcttatctgatattgcagagaaattcctaaagaaagaccagagcgatgaaacttctgaagatg

SEQ ID NO: 281 - DNA, 4252 bp, Homo sapiens
  source 1..4252: mol_type = genomic DNA
ggcggcggcagcggtgtcgctttgtttccgcggctcctgcggcggtggcagtggtagcggcctttgagctgtggggaggttccagcagcagctacagtgacgactaagactccagtgcatttctatcgtaaccgggcgcgggggagcgcagatcggcgcccagcaatcacagaagccgacaaggcgttcaagcgaaaacatgaccgctgagcccatgagtgaaagcaagttgaatacattggtgcagaagcttcatgacttccttgcacactcatcagaagaatctgaagaaacaagttctcctccacgacttgcaatgaatcaaaacacagataaaatcagtggttctggaagtaactctgatatgatggaaaacagcaaggaagagggaactagctcttcagaaaaatccaagtcttcaggatcgtcacgatcaaagaggaaaccttcaattgtaacaaagtatgtagaatcagatgatgaaaaacctttggatgatgaaactgtaaatgaagatgcgtctaatgaaaattcagaaaatgatattactatgcagagcttgccaaaagatgggcttcatgggattgtgagctgcactgcttgtggacaacaggtcaatcattttcaaaaagattccatttatagacacccttcattgcaagttcttatttgtaagaattgctttaagtattacatgagtgatgatattagccgtgactcagatggaatggatgaacaatgtaggtggtgtgcggaaggtggaaacttgatttgttgtgacttttgccataatgctttctgcaagaaatgcattctacgcaaccttggtcgaaaggagttgtccacaataatggatgaaaacaaccaatggtattgctacatttgtcacccagagcctttgttggacttggtcactgcatgtaacagcgtatttgagaatttagaacagttgttgcagcaaaataagaagaagataaaagttgacagtgaaaagagtaataaagtatatgaacatacatccagattttctccaaagaagactagttcaaattgtaatggagaagaaaagaaattagatgattcctgttctggctctgtaacctactcttattccgcactaattgtgcccaaagagatgattaagaaggcaaaaaaactgattgagaccacagccaacatgaactccagttatgttaaatttttaaagcaggcaacagataattcagaaatcagttctgctacaaaattacgtcagcttaaggcttttaagtctgtgttggctgatattaagaaggctcatcttgcattggaagaagacttaaattccgagtttcgagcgatggatgctgtaaacaaagagaaaaataccaaagagcataaagtcatagatgctaagtttgaaacaaaagcacgaaaaggagaaaaaccttgtgctttggaaaagaaggatatttcaaagtcagaagctaaactttcaagaaaacaggtagatagtgagcacatgcatcagaatgttccaacagaggaacaaagaacaaataaaagtaccggtggtgaacataagaaatctgatagaaaagaagaacctcaatatgaacctgccaacacttctgaagatttagacatggatattgtgtctgttccttcctcagttccagaagacatttttgagaatcttgagactgctatggaagttcagagttcagttgatcatcaaggggatggcagcagtggaactgaacaagaagtggagagttcatctgtaaaattaaatatttcttcaaaagacaacagaggaggtgctgattgtcaggaagttccacaagataaagatggctataaaagttgtggtctgaaccccaagttagagaaatgtggacttggacaggaaaacagtgataatgagcatttggttgaaaatgaagtttcattacttttagaggaatctgatcttcgaagatccccacgtgtaaagactacacccttgaggcgaccgacagaaactaaccctgtaacatctaattcagatgaagaatgtaatgaaacagttaaggagaaacaaaaactatcagttccagtgagaaaaaaggataagcgtaattcttctgacagtgctatagataatcctaagcctaataaattgccaaaatctaagcaatcagagactgtggatcaaaattcagattctgatgaaatgctagcaatcctcaaagaggtgagcaggatgagtcacagttcttcttcagatactgatattaatgaaattcatacaaaccataagactttgtatgatttaaagactcaggcggggaaagatgataaaggaaaaaggaaacgaaaaagttctacatctggctcagattttgatactaaaaagggcaaatcagctaagagctctataatttctaaaaagaaacgacaaacccagtctgagtcttctaattatgactcagaattagaaaaagagataaagagcatgagtaaaattggtgctgccagaaccaccaaaaaaagaattccaaatacaaaagattttgactcttctgaagatgagaaacacagcaaaaaaggaatggataatcaagggcacaaaaatttgaagacctcacaagaaggatcatctgatgatgctgaaagaaaacaagagagagagactttctcttcagcagaaggcacagttgataaagacacgaccatcatggaattaagagatcgacttcctaagaagcagcaagcaagtgcttccactgatggtgtcgataagctttctgggaaagagcagagttttacttctttggaagttagaaaagttgctgaaactaaagaaaagagcaagcatctcaaaaccaaaacatgtaaaaaagtacaggatggcttatctgatattgcagagaaattcctaaagaaagaccagagcgatgaaacttctgaagatgataaaaagcagagcaaaaagggaactgaagaaaaaaagaaaccttcagactttaagaaaaaagtaattaaaatggaacaacagtatgaatcttcatctgatggcactgaaaagttacctgagcgagaagaaatttgtcattttcctaagggcataaaacaaattaagaatggaacaactgatggagaaaagaaaagtaaaaaaataagagataaaacttctaaaaagaaggatgaattatctgattatgctgagaagtcaacagggaaaggagatagttgtgactcttcagaggataaaaagagtaagaatggagcatatggtagagagaagaaaaggtgcaagttgcttggaaagagttcaaggaagagacaagattgttcatcatctgatactgagaaatattccatgaaagaagatggttgtaactcttctgataagagactgaaaagaatagaattgagggaaagaagaaatttaagttcaaagagaaatactaaggaaatacaaagtggctcatcatcatctgatgctgaggaaagttctgaagataataaaaagaagaagcaaagaacttcatctaaaaagaaggcagtcattgtcaaggagaaaaagagaaactccctaagaacaagcactaaaaggaagcaagctgacattacatcctcatcttcttctgatatagaagatgatgatcagaattctataggtgagggaagcagcgatgaacagaaaattaagcctgtgactgaaaatttagtgctgtcttcacatactggattttgccaatcttcaggagatgaagccttatctaaatcagtgcctgtcacagtggatgatgatgatgacgacaatgatcctgagaatagaattgccaagaagatgcttttagaagaaattaaagccaatctttcctctgatgaggatggatcttcagatgatgagccagaagaagggaaaaaaagaactggaaaacaaaatgaagaaaacccaggagatgaggaagcaaaaaatcaagtcaattctgaatcagattcagattctgaagaatctaagaagccaagatacagacataggcttttgcggcacaaattgactgtgagtgacggagaatctggagaagaaaaaaagacaaagcctaaagagcataaagaagtcaaaggcagaaacagaagaaaggtgagcagtgaagattcagaagattctgattttcaggaatcaggagttagtgaagaagttagtgaatccgaagatgaacagcggcccagaacaaggtctgcaaagaaagcagagttggaagaaaatcagcggagctat

SEQ ID NO: 282 - DNA, 692 bp, Homo sapiens
  source 1..692: mol_type = genomic DNA
gccctgattttgttgtttgtgatgaaggccatattctaaaaaatgaagcatctgctgtttctaaagctatgaattctatacgatcaaggaggaggattattttaacaggaacaccacttcaaaataacctaattgagtatcattgtatggttaattttatcaaggaaaatttacttggatccattaaggagttcaggaatagatttataaatccaattcaaaatggtcagtgtgcagattctaccatggtagatgtcagagtgatgaaaaaacgtgctcacattctctatgagatgttagctggatgtgttcagaggaaagattatacagcattaacaaaattcttgcctccaaaacacgaatatgtgttagctgtgagaatgacttctattcagtgcaagctctatcagtactacttagatcacttaacagttttgcatttgaataaaatgggtatgcttaaaagcataaaatatttctaattaaaacactgatgctgtcaaaattaaaatcaagaagcaaattgatgaaaaagatatacagcacatatgaataatgcccttaatttgtaaagagcttttatttcagaaaaattatgaatgtgaataaatccataaaagaagatatacaaaattccagagtatttttttaaaaagtatttacccacattaataataaaaggtgtataagtt

SEQ ID NO: 283 - DNA, 3776 bp, Homo sapiens
  source 1..3776: mol_type = genomic DNA
ggcggcggcggcggcggcggcagctgcggcgggagaagatggtggcgctggaggcagcagcggctggagcggagctttattcccaggcttggcaccagcgctgtcactagcgccgcctgctcccgcgggcccgcggacccagctgtcaggcaagcccagtggagcaaaatgagagcgcagtgagccgggcccagcttctctcctagccgttccgactcccaccatgaaccacttggaggggtctgcggaggtggaggtgaccgacgaggcggcaggtggggaggtgaacgagtcggtggaggccgacctggagcaccccgaggtggaagaggaacagcagcagccgccgcagcagcagcactatgtgggccgccaccagcgcgggcgagccctcgaggacctccgcgcccagctcggccaggaggaagaggagcgcggggaatgcctggcgcgctcagccagcacggagagcggcttccacaaccacacggacaccgccgagggcgacgtgatcgccgcggcccgcgacggctacgatgcggagcgcgcgcaggaccccgaggacgagagcgcctatgctgtgcagtaccggcccgaggccgaggagtacacggagcaggcagaggccgagcacgccgaggccacgcaccgccgcgcgctgcccaaccacctgcacttccactcgctggagcacgaggaagccatgaatgcggcctactcaggctacgtctacacgcaccggctcttccaccgcggtgaggacgagccctactccgagccctatgccgactacggcggcctccaggagcacgtgtacgaggagataggggacgcgcccgagctggacgcacgcgacggcctgcggctctacgagcaggagcgcgacgaggcggccgcgtaccgccaggaggccctgggcgcgcggctgcaccattacgacgagcgctccgacggcgagtccgacagccccgagaaggaggccgagttcgcgccctacccgcgcatggacagctacgagcaggaggaggacatcgaccagatagtggccgaggtgaagcagagcatgagctcgcagagcctcgacaaggcagccgaggacatgcctgaggccgagcaggacctggagcgtccccctaccccggccgggggtcgccccgacagccccgggctgcaggcgccggcggggcagcagcgggcggtgggccccgcgggcggcggcgaggcggggcagcggtacagcaaggagaagcgcgatgccatctcgctggccatcaaggacatcaaggaggccatcgaggaggtgaaaaccaggaccatccgttcgccttacacccccgacgagcccaaagagcccatctgggtcatgcgccaggacattagccccaccagggactgtgacgaccagaggccgatggacggagattctccgtctcctggcagctcctcccccttgggtgcagagtcatcaagcacatctcttcaccccagtgaccctgtggaagcgtccactaataaagagtcaagaaaaagcttggcttcattcccaacctacgttgaagttccgggaccctgcgaccccgaagacttgatcgatggaatcatttttgccgccaattaccttggctccactcagctgctctcagacaaaactccttccaaaaacgtgcgcatgatgcaggcccaggaagccgtaagcaggatcaagatggcccagaaattagccaaaagcaggaagaaggctcctgaaggcgaatctcagccaatgactgaagtggatctcttcatttctacccagagaatcaaagtgctgaacgccgacacacaggagacaatgatggaccaccctctgaggaccatttcctacattgcggacattgggaacatcgttgtgctgatggcccgccggcggatgcctcgctccaactcccaggagaacgtggaagcgtcccacccatcccaggatgggaaaaggcagtacaagatgatctgccacgtcttcgagtctgaggatgctcagctgattgcacagtccatcggacaggcatttagcgtggcataccaggaattcctcagggccaatgggattaaccccgaagatctcagccagaaggagtatagtgacctgctcaatacccaggacatgtacaacgatgacctgatccacttctccaagtcggaaaactgtaaagatgttttcatagagaagcagaaaggagaaatcctaggtgtggtgattgtggagtctggctggggatccatcctccccaccgtgatcattgccaacatgatgcatggtggccctgcggagaaatctgggaagctgaatatcggtgaccagatcatgtccattaatggcaccagcctggtgggcctgcctctgtccacctgccagagcattattaagggcttaaagaatcagtcccgagtcaagctgaatatcgtgagatgtcctccggtgaccaccgtgttaatcagaagaccagaccttcgctaccagctcggtttcagcgtccagaatggaattatctgcagcctcatgcgagggggaatagctgagagaggaggcgtccgtgtggggcaccggatcattgaaatcaatggacagagcgtcgtggccaccccccacgagaagatcgtccacattctctccaatgctgttggggagattcatatgaagacaatgccagccgcgatgtacaggctgctgacggcccaggagcagcctgtttacatctgaccgcggccacacgcggtggcatgcatggaggactctcctcttcgtggttgtgtttctcgtgctgcatccctgtgtccactgagactttcccctctcgcgcccagcatttggttttacacaggaagagaagaatccacaaggacctctttactctctccgatttgcttttttttttttttttttttcaataccagggaagtttcgtatgcactcccttgaggatggagagcagccagcacccacctggtactgacccaggaccatcctggagggctttctgggtgtgtccagggggtgggctgtcactgcttgagggagaatcctcccttcccaggaggtgcagacttcttaaaaggagctcgcggggcagcaaagcagctgattcagcagtgcctaaaacccagttgctgatccctgctctctgagtttatctgtgggaatgtggtagtacccagggccagcccacgtcattaaggttatgcactgcctgccatgtagttggggcaccatacattatttcttcccagaatctctgagccaaccttaaacctcttctattgctagttctaatttcaacgtatgtgtgttttctaatacgagccttctcaccccaggataaaaggggaaataactgccttgggcaaggacaccatagtgtcacagagagcttggcaattcatggggcatctgaagctttaccaggttgtcctcaagttatcaaccattagataaacacaggcaggtactgtctgcttctctctctctcacacacacacacacacacacagtcccatttgcatatcacccttccctgctcccaccaccagtgagacaagctgaagattaggcacacagatcccctggaaacccacctctctggaaggccccttccctggcaggtggccaggcaggcgggggctgctcagcctcatcctgagagacctgccctctctgcgctgaggcccagcccctccagcaccactttggcttaaagcatcctcctcctggactcccctccctgccgaacacacatcccagg

SEQ ID NO: 284 - DNA, 2632 bp, Homo sapiens
  source 1..2632: mol_type = genomic DNA
tgcagatggcggcggcagttgtggtggcggagggggacagcgactcccggcccggacaggagttgttagtggcctggaacaccgtgagcaccggcctggtgccgccggctgcgctggggctggtgtcttcccggaccagcggtgcagtcccgccaaaggaagaggagctccgggcggcggtggaggttctgaggggccacgggctacactcggtcctggaggagtggttcgtggaggtgctgcagaacgatctgcaggccaacatctcccctgagttctggaatgccatctcccaatgcgagaactctgcggatgagccccagtgccttttgctactccttgacgcttttggcctgctggagagccgcctggatccctacctgcgtagcctagagctgctggagaaatggactcgcctgggcttgctgatgggcactggtgctcaggggctgcgagaagaagtccacactatgttgcgcggagtcttgttctttagcacccccagaaccttccaagagatgatccagcgtctgtatgggtgcttcttgagagtctatatgcagagtaagaggaagggggaagggggcacagacccggaactggaaggggagctggacagccggtatgcccgtcgccggtactaccggctcctgcagagcccgctgtgtgcagggtgcagcagtgacaagcaacagtgctggtgtcgccaggctctggagcagttccatcagctcagccaggtcttacacaggctcagtctgctggagcgggtcagtgccgaggctgtgaccaccaccctgcaccaggtgacccgggagaggatggaggaccgttgccggggcgagtacgagcgctccttcctgcgtgagttccacaagtggatcgagcgggtggtcggctggctcggcaaggtgttcctgcaggacggccccgccaggcccgcatctcccgaggccggcaacaccctgcgccgctggcgctgccacgtgcaaaggttcttctaccgcatctacgccagcctgcgcatcgaggagctcttcagcatcgtccgagacttcccagactcccggccagccatcgaggacctcaagtactgcctggagaggacggaccagaggcagcagctgctcgtgtccctcaaggctgccctggagactcggctcctgcatccaggcgtcaacacgtgtgacatcatcaccctctatatctctgccatcaaggcgctgcgcgtgctggacccttccatggtcatcctggaggtggcctgtgagcctatccgccgctacctgaggacgcgggaggacacagtgcggcagattgtggctgggctgacgggggactcggacgggacaggggacctggctgttgagctgtccaagaccgacccggcgagcctggagacaggccaggacagtgaggatgactcaggcgagccagaggactgggtcccggaccctgtggatgccgatccagggaagtcgagctccaagcggcgttcatcggacatcatcagcctgctggtcagcatctacggcagcaaggacctcttcatcaatgagtaccgctcgctgctggccgaccgcctgctgcaccagttcagcttcagccccgagcgggagatccgcaacgtggagctgctgaagctgcgctttggcgaggccccaatgcacttctgtgaagtcatgctgaaggacatggcggactcccgccgcatcaatgccaacatccgggaggaggatgagaagcggccagcagaggagcagccaccgttcggggtctacgctgtcatcctgtccagtgagttctggccgcccttcaaggacgagaagctggaggtccccgaggatatcagggcagccctggaggcttactgcaagaagtatgagcagctcaaggccatgcggaccctcagttggaagcacaccctgggcctggtgaccatggacgtggagctggccgaccgcacgctgtctgtggcggtcaccccagtacaggcggtgatcttgctgtattttcaggaccaagccagctggaccctggaggaactgagcaaggcggtgaagatgcccgtggcgctgctgcggcggcggatgtccgtgtggctgcagcagggtgtgctgcgtgaggagccccccggcaccttctctgtcattgaggaggagcggcctcaggaccgggacaacatggtgctcattgacagtgacgacgagagcgactccggcatggcctcccaggccgaccagaaggaggaggagctgctgctcttctggacgtacatccaggccatgctgaccaacctggagagcctctcactggatcgtatctacaacatgctccgcatgtttgtggtgactgggcctgcactggccgagattgacctgcaggagctgcagggctacctgcagaagaaggtgcgggaccagcagctcgtctactcggccggcgtctaccgcctgcccaagaactgcagctgacacatcgcccgcccgcccgcccgcccgccaggcgctgccctgcaggtgctctcgtcctcccgtgccagcccccgcccgcccgtgtcccagaatgcactgctgaggagcatgcccacccccacccccgcagtgtgcagattaaagcaagtcagatcatc

SEQ ID NO: 285 - DNA, 6220 bp, Homo sapiens
  source 1..6220: mol_type = genomic DNA
gggggcggcagcggtggtagcagctggtacctcccgccgcctctgttcggagggtcgcggggcaccgaggtgctttccggccgccctctggtcggccacccaaagccgcgggcgctgatgatgggtgaggagggggcggcaagatttcgggcgcccctgccctgaacgccctcagctgctgccgccggggccgctccagtgcctgcgaactctgaggagccgaggcgccggtgagagcaaggacgctgcaaacttgcgcagcgcgggggctgggattcacgcccagaagttcagcaggcagacagtccgaagccttcccgcagcggagagatagcttgagggtgcgcaagacggcagcctccgccctcggttcccgcccagaccgggcagaagagcttggaggagccaaaaggaacgcaaaaggcggccaggacagcgtgcagcagctgggagccgccgttctcagccttaaaagttgcagagattggaggctgccccgagaggggacagaccccagctccgactgcggggggcaggagaggacggtacccaactgccacctcccttcaaccatagtagttcctctgtaccgagcgcagcgagctacagacgggggcgcggcactcggcgcggagagcgggaggctcaaggtcccagccagtgagcccagtgtgcttgagtgtctctggactcgcccctgagcttccaggtctgtttcatttagactcctgctcgcctccgtgcagttgggggaaagcaagagacttgcgcgcacgcacagtcctctggagatcaggtggaaggagccgctgggtaccaaggactgttcagagcctcttcccatctcggggagagcgaagggtgaggctgggcccggagagcagtgtaaacggcctcctccggcgggatgggagccatcgggctcctgtggctcctgccgctgctgctttccacggcagctgtgggctccgggatggggaccggccagcgcgcgggctccccagctgcggggccgccgctgcagccccgggagccactcagctactcgcgcctgcagaggaagagtctggcagttgacttcgtggtgccctcgctcttccgtgtctacgcccgggacctactgctgccaccatcctcctcggagctgaaggctggcaggcccgaggcccgcggctcgctagctctggactgcgccccgctgctcaggttgctggggccggcgccgggggtctcctggaccgccggttcaccagccccggcagaggcccggacgctgtccagggtgctgaagggcggctccgtgcgcaagctccggcgtgccaagcagttggtgctggagctgggcgaggaggcgatcttggagggttgcgtcgggccccccggggaggcggctgtggggctgctccagttcaatctcagcgagctgttcagttggtggattcgccaaggcgaagggcgactgaggatccgcctgatgcccgagaagaaggcgtcggaagtgggcagagagggaaggctgtccgcggcaattcgcgcctcccagccccgccttctcttccagatcttcgggactggtcatagctccttggaatcaccaacaaacatgccttctccttctcctgattattttacatggaatctcacctggataatgaaagactccttccctttcctgtctcatcgcagccgatatggtctggagtgcagctttgacttcccctgtgagctggagtattcccctccactgcatgacctcaggaaccagagctggtcctggcgccgcatcccctccgaggaggcctcccagatggacttgctggatgggcctggggcagagcgttctaaggagatgcccagaggctcctttctccttctcaacacctcagctgactccaagcacaccatcctgagtccgtggatgaggagcagcagtgagcactgcacactggccgtctcggtgcacaggcacctgcagccctctggaaggtacattgcccagctgctgccccacaacgaggctgcaagagagatcctcctgatgcccactccagggaagcatggttggacagtgctccagggaagaatcgggcgtccagacaacccatttcgagtggccctggaatacatctccagtggaaaccgcagcttgtctgcagtggacttctttgccctgaagaactgcagtgaaggaacatccccaggctccaagatggccctgcagagctccttcacttgttggaatgggacagtcctccagcttgggcaggcctgtgacttccaccaggactgtgcccagggagaagatgagagccagatgtgccggaaactgcctgtgggtttttactgcaactttgaagatggcttctgtggctggacccaaggcacactgtcaccccacactcctcaatggcaggtcaggaccctaaaggatgcccggttccaggaccaccaagaccatgctctattgctcagtaccactgatgtccccgcttctgaaagtgctacagtgaccagtgctacgtttcctgcaccgatcaagagctctccatgtgagctccgaatgtcctggctcattcgtggagtcttgaggggaaacgtgtccttggtgctagtggagaacaaaaccgggaaggagcaaggcaggatggtctggcatgtcgccgcctatgaaggcttgagcctgtggcagtggatggtgttgcctctcctcgatgtgtctgacaggttctggctgcagatggtcgcatggtggggacaaggatccagagccatcgtggcttttgacaatatctccatcagcctggactgctacctcaccattagcggagaggacaagatcctgcagaatacagcacccaaatcaagaaacctgtttgagagaaacccaaacaaggagctgaaacccggggaaaattcaccaagacagacccccatctttgaccctacagttcattggctgttcaccacatgtggggccagcgggccccatggccccacccaggcacagtgcaacaacgcctaccagaactccaacctgagcgtggaggtggggagcgagggccccctgaaaggcatccagatctggaaggtgccagccaccgacacctacagcatctcgggctacggagctgctggcgggaaaggcgggaagaacaccatgatgcggtcccacggcgtgtctgtgctgggcatcttcaacctggagaaggatgacatgctgtacatcctggttgggcagcagggagaggacgcctgccccagtacaaaccagttaatccagaaagtctgcattggagagaacaatgtgatagaagaagaaatccgtgtgaacagaagcgtgcatgagtgggcaggaggcggaggaggagggggtggagccacctacgtatttaagatgaaggatggagtgccggtgcccctgatcattgcagccggaggtggtggcagggcctacggggccaagacagacacgttccacccagagagactggagaataactcctcggttctagggctaaacggcaattccggagccgcaggtggtggaggtggctggaatgataacacttccttgctctgggccggaaaatctttgcaggagggtgccaccggaggacattcctgcccccaggccatgaagaagtgggggtgggagacaagagggggtttcggagggggtggaggggggtgctcctcaggtggaggaggcggaggatatataggcggcaatgcagcctcaaacaatgaccccgaaatggatggggaagatggggtttccttcatcagtccactgggcatcctgtacaccccagctttaaaagtgatggaaggccacggggaagtgaatattaagcattatctaaactgcagtcactgtgaggtagacgaatgtcacatggaccctgaaagccacaaggtcatctgcttctgtgaccacgggacggtgctggctgaggatggcgtctcctgcattgtgtcacccaccccggagccacacctgccactctcgctgatcctctctgtggtgacctctgccctcgtggccgccctggtcctggctttctccggcatcatgattgtgtaccgccggaagcaccaggagctgcaagccatgcagatggagctgcagagccctgagtacaagctgagcaagctccgcacctcgaccatcatgaccgactacaaccccaactactgctttgctggcaagacctcctccatcagtgacctgaaggaggtgccgcggaaaaacatcaccctcattcggggtctgggccatggcgcctttggggaggtgtatgaaggccaggtgtccggaatgcccaacgacccaagccccctgcaagtggctgtgaagacgctgcctgaagtgtgctctgaacaggacgaactggatttcctcatggaagccctgatcatcagcaaattcaaccaccagaacattgttcgctgcattggggtgagcctgcaatccctgccccggttcatcctgctggagctcatggcggggggagacctcaagtccttcctccgagagacccgccctcgcccgagccagccctcctccctggccatgctggaccttctgcacgtggctcgggacattgcctgtggctgtcagtatttggaggaaaaccacttcatccaccgagacattgctgccagaaactgcctcttgacctgtccaggccctggaagagtggccaagattggagacttcgggatggcccgagacatctacagggcgagctactatagaaagggaggctgtgccatgctgccagttaagtggatgcccccagaggccttcatggaaggaatattcacttctaaaacagacacatggtcctttggagtgctgctatgggaaatcttttctcttggatatatgccataccccagcaaaagcaaccaggaagttctggagtttgtcaccagtggaggccggatggacccacccaagaactgccctgggcctgtataccggataatgactcagtgctggcaacatcagcctgaagacaggcccaactttgccatcattttggagaggattgaatactgcacccaggacccggatgtaatcaacaccgctttgccgatagaatatggtccacttgtggaagaggaagagaaagtgcctgtgaggcccaaggaccctgagggggttcctcctctcctggtctctcaacaggcaaaacgggaggaggagcgcagcccagctgccccaccacctctgcctaccacctcctctggcaaggctgcaaagaaacccacagctgcagagatctctgttcgagtccctagagggccggccgtggaagggggacacgtgaatatggcattctctcagtccaaccctccttcggagttgcacaaggtccacggatccagaaacaagcccaccagcttgtggaacccaacgtacggctcctggtttacagagaaacccaccaaaaagaataatcctatagcaaagaaggagccacacgacaggggtaacctggggctggagggaagctgtactgtcccacctaacgttgcaactgggagacttccgggggcctcactgctcctagagccctcttcgctgactgccaatatgaaggaggtacctctgttcaggctacgtcacttcccttgtgggaatgtcaattacggctaccagcaacagggcttgcccttagaagccgctactgcccctggagctggtcattacgaggataccattctgaaaagcaagaatagcatgaaccagcctgggccctgagctcggtcgcacactcacttctcttccttgggatccctaagaccgtggaggagagagaggcaatggctccttcacaaaccagagaccaaatgtcacgttttgttttgtgccaacctattttgaagtaccaccaaaaaagctgtattttgaaaatgctttagaaaggttttgagcatgggttcatcctattctttcgaaagaagaaaatatcataaaaatgagtgataaatacaaggcccagatgtggttgcataaggtttttatgcatgtttgttgtatacttccttatgcttctttcaaattgtgtgtgctctgcttcaatgtagtcagaattagctgcttctatgtttcatagttggggtcatagatgtttccttgccttgttgatgtggacatgagccatttgaggggagagggaacggaaataaaggagttatttgtaatgactaa

SEQ ID NO: 286 - DNA, 1353 bp, Homo sapiens
  source 1..1353: mol_type = genomic DNA
atgggagccatcgggctcctgtggctcctgccgctgctgctttccacggcagctgtgggctccgggatggggaccggccagcgcgcgggctccccagctgcggggccgccgctgcagccccgggagccactcagctactcgcgcctgcagaggaagagtctggcagttgacttcgtggtgccctcgctcttccgtgtctacgcccgggacctactgctgccaccatcctcctcggagctgaaggctggcaggcccgaggcccgcggctcgctagctctggactgcgccccgctgctcaggttgctggggccggcgccgggggtctcctggaccgccggttcaccagccccggcagaggcccggacgctgtccagggtgctgaagggcggctccgtgcgcaagctccggcgtgccaagcagttggtgctggagctgggcgaggaggcgatcttggagggttgcgtcgggccccccggggaggcggctgtggggctgctccagttcaatctcagcgagctgttcagttggtggattcgccaaggcgaagggcgactgaggatccgcctgatgcccgagaagaaggcgtcggaagtgggcagagagggaaggctgtccgcggcaattcgcgcctcccagccccgccttctcttccagatcttcgggactggtcatagctccttggaatcaccaacaaacatgccttctccttctcctgattattttacatggaatctcacctggataatgaaagactccttccctttcctgtctcatcgcagccgatatggtaaagagcgcagcccagctgccccaccacctctgcctaccacctcctctggcaaggctgcaaagaaacccacagctgcagagatctctgttcgagtccctagagggccggccgtggaagggggacacgtgaatatggcattctctcagtccaaccctccttcggagttgcacaaggtccacggatccagaaacaagcccaccagcttgtggaacccaacgtacggctcctggtttacagagaaacccaccaaaaagaataatcctatagcaaagaaggagccacacgacaggggtaacctggggctggagggaagctgtactgtcccacctaacgttgcaactgggagacttccgggggcctcactgctcctagagccctcttcgctgactgccaatatgaaggaggtacctctgttcaggctacgtcacttcccttgtgggaatgtcaattacggctaccagcaacagggcttgcccttagaagccgctactgcccctggagctggtcattacgaggataccattctgaaaagcaagaatagcatgaaccagcctgggccctga

SEQ ID NO: 287 - DNA, 3615 bp, Homo sapiens
  source 1..3615: mol_type = genomic DNA
gacactgaatttggaaggtggaggattttgtttttttcttttaagatctgggcatcttttgaatctacccttcaagtattaagagacagactgtgagcctagcagggcagatcttgtccaccgtgtgtcttcttctgcacgagactttgaggctgtcagagcgctttttgcgtggttgctcccgcaagtttccttctctggagcttcccgcaggtgggcagctagctgcagcgactaccgcatcatcacagcctgttgaactcttctgagcaagagaaggggaggcggggtaagggaagtaggtggaagattcagccaagctcaaggatggaagtgcagttagggctgggaagggtctaccctcggccgccgtccaagacctaccgaggagctttccagaatctgttccagagcgtgcgcgaagtgatccagaacccgggccccaggcacccagaggccgcgagcgcagcacctcccggcgccagtttgctgctgctgcagcagcagcagcagcagcagcagcagcagcagcagcagcagcagcagcagcagcagcagcagcagcaagagactagccccaggcagcagcagcagcagcagggtgaggatggttctccccaagcccatcgtagaggccccacaggctacctggtcctggatgaggaacagcaaccttcacagccgcagtcggccctggagtgccaccccgagagaggttgcgtcccagagcctggagccgccgtggccgccagcaaggggctgccgcagcagctgccagcacctccggacgaggatgactcagctgccccatccacgttgtccctgctgggccccactttccccggcttaagcagctgctccgctgaccttaaagacatcctgagcgaggccagcaccatgcaactccttcagcaacagcagcaggaagcagtatccgaaggcagcagcagcgggagagcgagggaggcctcgggggctcccacttcctccaaggacaattacttagggggcacttcgaccatttctgacaacgccaaggagttgtgtaaggcagtgtcggtgtccatgggcctgggtgtggaggcgttggagcatctgagtccaggggaacagcttcggggggattgcatgtacgccccacttttgggagttccacccgctgtgcgtcccactccttgtgccccattggccgaatgcaaaggttctctgctagacgacagcgcaggcaagagcactgaagatactgctgagtattcccctttcaagggaggttacaccaaagggctagaaggcgagagcctaggctgctctggcagcgctgcagcagggagctccgggacacttgaactgccgtctaccctgtctctctacaagtccggagcactggacgaggcagctgcgtaccagagtcgcgactactacaactttccactggctctggccggaccgccgccccctccgccgcctccccatccccacgctcgcatcaagctggagaacccgctggactacggcagcgcctgggcggctgcggcggcgcagtgccgctatggggacctggcgagcctgcatggcgcgggtgcagcgggacccggttctgggtcaccctcagccgccgcttcctcatcctggcacactctcttcacagccgaagaaggccagttgtatggaccgtgtggtggtggtgggggtggtggcggcggcggcggcggcggcggcggcggcggcggcggcggcggcggcggcgaggcgggagctgtagccccctacggctacactcggccccctcaggggctggcgggccaggaaagcgacttcaccgcacctgatgtgtggtaccctggcggcatggtgagcagagtgccctatcccagtcccacttgtgtcaaaagcgaaatgggcccctggatggatagctactccggaccttacggggacatgcgtttggagactgccagggaccatgttttgcccattgactattactttccaccccagaagacctgcctgatctgtggagatgaagcttctgggtgtcactatggagctctcacatgtggaagctgcaaggtcttcttcaaaagagccgctgaagggaaacagaagtacctgtgcgccagcagaaatgattgcactattgataaattccgaaggaaaaattgtccatcttgtcgtcttcggaaatgttatgaagcagggatgactctgggagaaaaattccgggttggcaattgcaagcatctcaaaatgaccagaccctgaagaaaggctgacttgcctcattcaaaatgagggctctagagggctctagtggatagtctggagaaacctggcgtctgaggcttaggagcttaggtttttgctcctcaacacagactttgacgttggggttgggggctactctcttgattgctgactccctccagcgggaccaatagtgttttcctacctcacagggatgttgtgaggacgggctgtagaagtaatagtggttaccattcatgtagttgtgagtatcatgattattgtttcctgtaatgtggcttggcattggcaaagtgctttttgattgttcttgatcacatatgatgggggccaggcactgactcaggcggatgcagtgaagctctggctcagtcgcttgcttttcgtggtgtgctgccaggaagaaactttgctgatgggactcaaggtgtcaccttggacaagaagcaactgtgtctgtctgaggttcctgtggccatctttatttgtgtattaggcaattcgtatttcccccttaggttctagccttctggatcccagccagtgacctagatcttagcctcaggccctgtcactgagctgaaggtagtagctgatccacagaagttcagtaaacaaggaccagatttctgcttctccaggagaagaagccagccaacccctctcttcaaacacactgagagactacagtccgactttccctcttacatctagccttactgtagccacactccttgattgctctctcacatcacatgcttctcttcatcagttgtaagcctctcattcttctcccaagccagactcaaatattgtattgatgtcaaagaagaatcacttagagtttggaatatcttgttctctctctgctccatagcttccatattgacaccagtttctttctagtggagaagtggagtctgtgaagccagggaaacacacatgtgagagtcagaaggactctccctgacttgcctggggcctgtctttcccaccttctccagtctgtctaaacacacacacacacacacacacacacacacacacgctctctctctctctccccccccaacacacacacactctctctctctctcacacacacacacatacacacacacttctttctctttcccctgactcagcaacattctggagaaaagccaaggaaggacttcaggaggggagtttcccccttctcagggcagaattttaatctccagaccaacaagaagttccctaatgtggattgaaaggctaatgaggtttatttttaactactttctatttgtttgaatgttgcatatttctactagtgaaattttcccttaataaagccattaatacacc

SEQ ID NO: 288 - DNA, 3899 bp, Homo sapiens
  source 1..3899: mol_type = genomic DNA
gacactgaatttggaaggtggaggattttgtttttttcttttaagatctgggcatcttttgaatctacccttcaagtattaagagacagactgtgagcctagcagggcagatcttgtccaccgtgtgtcttcttctgcacgagactttgaggctgtcagagcgctttttgcgtggttgctcccgcaagtttccttctctggagcttcccgcaggtgggcagctagctgcagcgactaccgcatcatcacagcctgttgaactcttctgagcaagagaaggggaggcggggtaagggaagtaggtggaagattcagccaagctcaaggatggaagtgcagttagggctgggaagggtctaccctcggccgccgtccaagacctaccgaggagctttccagaatctgttccagagcgtgcgcgaagtgatccagaacccgggccccaggcacccagaggccgcgagcgcagcacctcccggcgccagtttgctgctgctgcagcagcagcagcagcagcagcagcagcagcagcagcagcagcagcagcagcagcagcagcagcagcaagagactagccccaggcagcagcagcagcagcagggtgaggatggttctccccaagcccatcgtagaggccccacaggctacctggtcctggatgaggaacagcaaccttcacagccgcagtcggccctggagtgccaccccgagagaggttgcgtcccagagcctggagccgccgtggccgccagcaaggggctgccgcagcagctgccagcacctccggacgaggatgactcagctgccccatccacgttgtccctgctgggccccactttccccggcttaagcagctgctccgctgaccttaaagacatcctgagcgaggccagcaccatgcaactccttcagcaacagcagcaggaagcagtatccgaaggcagcagcagcgggagagcgagggaggcctcgggggctcccacttcctccaaggacaattacttagggggcacttcgaccatttctgacaacgccaaggagttgtgtaaggcagtgtcggtgtccatgggcctgggtgtggaggcgttggagcatctgagtccaggggaacagcttcggggggattgcatgtacgccccacttttgggagttccacccgctgtgcgtcccactccttgtgccccattggccgaatgcaaaggttctctgctagacgacagcgcaggcaagagcactgaagatactgctgagtattcccctttcaagggaggttacaccaaagggctagaaggcgagagcctaggctgctctggcagcgctgcagcagggagctccgggacacttgaactgccgtctaccctgtctctctacaagtccggagcactggacgaggcagctgcgtaccagagtcgcgactactacaactttccactggctctggccggaccgccgccccctccgccgcctccccatccccacgctcgcatcaagctggagaacccgctggactacggcagcgcctgggcggctgcggcggcgcagtgccgctatggggacctggcgagcctgcatggcgcgggtgcagcgggacccggttctgggtcaccctcagccgccgcttcctcatcctggcacactctcttcacagccgaagaaggccagttgtatggaccgtgtggtggtggtgggggtggtggcggcggcggcggcggcggcggcggcggcggcggcggcggcggcggcggcgaggcgggagctgtagccccctacggctacactcggccccctcaggggctggcgggccaggaaagcgacttcaccgcacctgatgtgtggtaccctggcggcatggtgagcagagtgccctatcccagtcccacttgtgtcaaaagcgaaatgggcccctggatggatagctactccggaccttacggggacatgcgtttggagactgccagggaccatgttttgcccattgactattactttccaccccagaagacctgcctgatctgtggagatgaagcttctgggtgtcactatggagctctcacatgtggaagctgcaaggtcttcttcaaaagagccgctgaaggatttttcagaatgaacaaattaaaagaatcataatcagacactaaccccaagccatactgcatggcagcaccaatgggactgacagaaaacaacagaaataggaagaaatcctacagagaaacaaacttgaaagctgtctcatggcctttgaatcatacttaagttttatgatggaaggatacgactatgaagaaagacacagagcaacatcagacagtcaagaatttcagagccagctggcatgcagtggacctcatgccagcccattttatgactatttagggaaacagaagtacctgtgcgccagcagaaatgattgcactattgataaattccgaaggaaaaattgtccatcttgtcgtcttcggaaatgttatgaagcagggatgactctgggagaaaaattccgggttggcaattgcaagcatctcaaaatgaccagaccctgaagaaaggctgacttgcctcattcaaaatgagggctctagagggctctagtggatagtctggagaaacctggcgtctgaggcttaggagcttaggtttttgctcctcaacacagactttgacgttggggttgggggctactctcttgattgctgactccctccagcgggaccaatagtgttttcctacctcacagggatgttgtgaggacgggctgtagaagtaatagtggttaccattcatgtagttgtgagtatcatgattattgtttcctgtaatgtggcttggcattggcaaagtgctttttgattgttcttgatcacatatgatgggggccaggcactgactcaggcggatgcagtgaagctctggctcagtcgcttgcttttcgtggtgtgctgccaggaagaaactttgctgatgggactcaaggtgtcaccttggacaagaagcaactgtgtctgtctgaggttcctgtggccatctttatttgtgtattaggcaattcgtatttcccccttaggttctagccttctggatcccagccagtgacctagatcttagcctcaggccctgtcactgagctgaaggtagtagctgatccacagaagttcagtaaacaaggaccagatttctgcttctccaggagaagaagccagccaacccctctcttcaaacacactgagagactacagtccgactttccctcttacatctagccttactgtagccacactccttgattgctctctcacatcacatgcttctcttcatcagttgtaagcctctcattcttctcccaagccagactcaaatattgtattgatgtcaaagaagaatcacttagagtttggaatatcttgttctctctctgctccatagcttccatattgacaccagtttctttctagtggagaagtggagtctgtgaagccagggaaacacacatgtgagagtcagaaggactctccctgacttgcctggggcctgtctttcccaccttctccagtctgtctaaacacacacacacacacacacacacacacacacacgctctctctctctctccccccccaacacacacacactctctctctctctcacacacacacacatacacacacacttctttctctttcccctgactcagcaacattctggagaaaagccaaggaaggacttcaggaggggagtttcccccttctcagggcagaattttaatctccagaccaacaagaagttccctaatgtggattgaaaggctaatgaggtttatttttaactactttctatttgtttgaatgttgcatatttctactagtgaaattttcccttaataaagccattaatacacc

SEQ ID NO: 289 - DNA, 1222 bp, Homo sapiens
  source 1..1222: mol_type = genomic DNA
gtcctgccaaagaaagcagcagcgaataagtacgtggcagatggtgctgtcgaccagtgtcaagaccaagtttcatgggttcctggacgctcagccaggggtagtctctgaagggccgcctggcaattgggagcagaagccagtttcccgccatctgctctccgtggaggcagtgctctcgcggctgctgcccgttggggtccagctgaggaaggagcgcggatcccaggctcgttctttgcctgggctgcccctgcggcccctggggcgggtgctgctgcggcgccagctccaagggcggatccaggcgggaggggcctcctcggagaagcggggcgcggtcccaactacgcagaggctggcacgccgaccctccacacctcaccacgcccccatctccgtccgtgtacacacactcacacaaggacgccaaccccacctagatgcaaagcaggattcaaaagaacatctttgcgttttctaccggctccccatcatcgtactagggaggaagaagcgggtgagaaacaaaacttctttccattgtcctgcccgtttctgcggacttgttctgaggccgaggagcctgtgttggaagagatggtgatgggcctgggcgttttgttgttggtcttcgtgctgggtctgggtctgaccccaccgaccctggctcaggataactccaggtacacacacttcctgacccagcactatgatgccaaaccacagggccgggatgacagatactgtgaaagcatcatgaggagacggggcctgacctcaccctgcaaagacatcaacacatttattcatggcaacaagcgcagcatcaaggccatctgtgaaaacaagaatggaaaccctcacagagaaaacctaagaataagcaagtcttctttccaggtcaccacttgcaagctacatggaggttccccctggcctccatgccagtaccgagccacagcggggttcagaaacgttgttgttgcttgtgaaaatggcttacctgtccacttggatcagtcaattttccgtcgtccgtaaccagcgggcccctggtcaagtgctggctctgctgtccttgccttccatttcccctctgcacccagaacagtggtggcaacattcattgccaagggcccaaagaaagagctacctggaccttttgttttctgtttgacaacatgtttaataaataaaaatgtcttgatatcagtaagaa

SEQ ID NO: 290 - DNA, 742 bp, Homo sapiens
  source 1..742: mol_type = genomic DNA
tccaggttcacacaactggaacccatctccaggaacaaacagctggaacccatctcccgttgaagggaaactgccagatttttgtaagattcttcctcctgggagcctgtgttggaagagatggtgatgggcctgggcgttttgttgttggtcttcgtgctgggtctgggtctgaccccaccgaccctggctcaggataactccaggtacacacacttcctgacccagcactatgatgccaaaccacagggccgggatgacagatactgtgaaagcatcatgaggagacggggcctgacctcaccctgcaaagacatcaacacatttattcatggcaacaagcgcagcatcaaggccatctgtgaaaacaagaatggaaaccctcacagagaaaacctaagaataagcaagtcttctttccaggtcaccacttgcaagctacatggaggttccccctggcctccatgccagtaccgagccacagcggggttcagaaacgttgttgttgcttgtgaaaatggcttacctgtccacttggatcagtcaattttccgtcgtccgtaaccagcgggcccctggtcaagtgctggctctgctgtccttgccttccatttcccctctgcacccagaacagtggtggcaacattcattgccaagggcccaaagaaagagctacctggaccttttgttttctgtttgacaacatgtttaataaataaaaatgtcttgatatcagtaagaa

SEQ ID NO: 291 - DNA, 4353 bp, Homo sapiens
  source 1..4353: mol_type = genomic DNA
gccctaagccatcagcaatccttagtataggggcacactcatgcattcctgtcaagtcatcttgtgaaaggctgcctgcttccagcttggcttggatgtgcaaccttaataaaactcactgaggtctgggagaaaatagcagatctgcagcagatagggtagaggaaagggtctagaatatgtacacgcagctgactcaggcaggctccatgctgaacggtcacacagagaggaaacaataaatctcagctactatgcaataaatatctcaagttttaacgaagaaaaacatcattgcagtgaaataaaaaattttaaaattttagaacaaagctaacaaatggctagttttctatgattcttcttcaaacgctttctttgagggggaaagagtcaaacaaacaagcagttttacctgaaataaagaactagttttagaggtcagaagaaaggagcaagttttgcgagaggcacggaaggagtgtgctggcagtacaatgacagttttcctttcctttgctttcctcgctgccattctgactcacatagggtgcagcaatcagcgccgaagtccagaaaacagtgggagaagatataaccggattcaacatgggcaatgtgcctacactttcattcttccagaacacgatggcaactgtcgtgagagtacgacagaccagtacaacacaaacgctctgcagagagatgctccacacgtggaaccggatttctcttcccagaaacttcaacatctggaacatgtgatggaaaattatactcagtggctgcaaaaacttgagaattacattgtggaaaacatgaagtcggagatggcccagatacagcagaatgcagttcagaaccacacggctaccatgctggagataggaaccagcctcctctctcagactgcagagcagaccagaaagctgacagatgttgagacccaggtactaaatcaaacttctcgacttgagatacagctgctggagaattcattatccacctacaagctagagaagcaacttcttcaacagacaaatgaaatcttgaagatccatgaaaaaaacagtttattagaacataaaatcttagaaatggaaggaaaacacaaggaagagttggacaccttaaaggaagagaaagagaaccttcaaggcttggttactcgtcaaacatatataatccaggagctggaaaagcaattaaacagagctaccaccaacaacagtgtccttcagaagcagcaactggagctgatggacacagtccacaaccttgtcaatctttgcactaaagaagttttactaaagggaggaaaaagagaggaagagaaaccatttagagactgtgcagatgtatatcaagctggttttaataaaagtggaatctacactatttatattaataatatgccagaacccaaaaaggtgttttgcaatatggatgtcaatgggggaggttggactgtaatacaacatcgtgaagatggaagtctagatttccaaagaggctggaaggaatataaaatgggttttggaaatccctccggtgaatattggctggggaatgagtttatttttgccattaccagtcagaggcagtacatgctaagaattgagttaatggactgggaagggaaccgagcctattcacagtatgacagattccacataggaaatgaaaagcaaaactataggttgtatttaaaaggtcacactgggacagcaggaaaacagagcagcctgatcttacacggtgctgatttcagcactaaagatgctgataatgacaactgtatgtgcaaatgtgccctcatgttaacaggaggatggtggtttgatgcttgtggcccctccaatctaaatggaatgttctatactgcgggacaaaaccatggaaaactgaatgggataaagtggcactacttcaaagggcccagttactccttacgttccacaactatgatgattcgacctttagatttttgaaagcgcaatgtcagaagcgattatgaaagcaacaaagaaatccggagaagctgccaggtgagaaactgtttgaaaacttcagaagcaaacaatattgtctcccttccagcaataagtggtagttatgtgaagtcaccaaggttcttgaccgtgaatctggagccgtttgagttcacaagagtctctacttggggtgacagtgctcacgtggctcgactatagaaaactccactgactgtcgggctttaaaaagggaagaaactgctgagcttgctgtgcttcaaactactactggaccttattttggaactatggtagccagatgataaatatggttaatttcatgtaaaacagaaaaaaagagtgaaaaagagaatatacatgaagaatagaaacaagcctgccataatcctttggaaaagatgtattataccagtgaaaaggtgttatatctatgcaaacctactaacaaattatactgttgcacaattttgataaaaatttagaacagcattgtcctctgagttggttaaatgttaatggatttcagaagcctaattccagtatcatacttactagttgatttctgcttacccatcttcaaatgaaaattccatttttgtaagccataatgaactgtagtacatggacaataagtgtgtggtagaaacaaactccattactctgatttttgatacagttttcagaaaaagaaatgaacataatcaagtaaggatgtatgtggtgaaaacttaccacccccatactatggttttcatttactctaaaaactgattgaatgatatataaatatatttatagcctgagtaaagttaaaagaatgtaaaatatatcatcaagttcttaaaataatatacatgcatttaatatttcctttgatattatacaggaaagcaatattttggagtatgttaagttgaagtaaaagcaagtactctggagcagttcattttacagtatctacttgcatgtgtatacatacatgtaacttcattattttaaaaatatttttagaactccaatactcaccctgttatgtcttgctaatttaaattttgctaattaactgaaacatgcttaccagattcacactgttccagtgtctataaaagaaacactttgaagtctataaaaaataaaataattataaatatcattgtacatagcatgtttatatctgcaaaaaacctaatagctaattaatctggaatatgcaacattgtccttaattgatgcaaataacacaaatgctcaaagaaatctactatatcccttaatgaaatacatcattcttcatatatttctccttcagtccattcccttaggcaatttttaatttttaaaaattattatcaggggagaaaaattggcaaaactattatatgtaagggaaatatatacaaaaagaaaattaatcatagtcacctgactaagaaattctgactgctagttgccataaataactcaatggaaatattcctatgggataatgtattttaagtgaatttttggggtgcttgaagttactgcattattttatcaagaagtcttctctgcctgtaagtgtccaaggttatgacagtaaacagtttttattaaaacatgagtcactatgggatgagaaaattgaaataaagctactgggcctcctctcataaaagagacagttgttggcaaggtagcaataccagtttcaaacttggtgacttgatccactatgccttaatggtttcctccatttgagaaaataaagctattcacattgttaagaaaaatactttttaaagtttaccatcaagtcttttttatatttatgtgtctgtattctacccctttttgccttacaagtgatatttgcaggtattataccatttttctattcttggtggcttcttcatagcaggtaagcctctccttctaaaaacttctcaactgttttcatttaagggaaagaaaatgagtattttgtccttttgtgttcctacagacactttcttaaaccagtttttggataaagaatactatttccaaactcatattacaaaaacaaaataaaataataaaaaaagaaagcatgatatttactgttttgttgtctgggtttgagaaatgaaatattgtttccaattatttataataaatcagtataaaatgttttatgattgttatgtgtattatgtaatacgtacatgtttatggcaatttaacatgtgtattcttttaattgtttcagaataggataattaggtattcgaattttgtctttaaaattcatgtggtttctatgcaaagttcttcatatcatcacaacattatttgatttaaataaaattgaaagtaa

SEQ ID NO: 292 - DNA, 3293 bp, Homo sapiens
  source 1..3293: mol_type = genomic DNA
acagtttcaaatttattagaacataaaatcttagaaatggaaggaaaacacaaggaagagttggacaccttaaaggaagagaaagagaaccttcaaggcttggttactcgtcaaacatatataatccaggagctggaaaagcaattaaacagagctaccaccaacaacagtgtccttcagaagcagcaactggagctgatggacacagtccacaaccttgtcaatctttgcactaaagaaggtgttttactaaagggaggaaaaagagaggaagagaaaccatttagagactgtgcagatgtatatcaagctggttttaataaaagtggaatctacactatttatattaataatatgccagaacccaaaaaggtgttttgcaatatggatgtcaatgggggaggttggactgtaatacaacatcgtgaagatggaagtctagatttccaaagaggctggaaggaatataaaatgggttttggaaatccctccggtgaatattggctggggaatgagtttatttttgccattaccagtcagaggcagtacatgctaagaattgagttaatggactgggaagggaaccgagcctattcacagtatgacagattccacataggaaatgaaaagcaaaactataggttgtatttaaaaggtcacactgggacagcaggaaaacagagcagcctgatcttacacggtgctgatttcagcactaaagatgctgataatgacaactgtatgtgcaaatgtgccctcatgttaacaggaggatggtggtttgatgcttgtggcccctccaatctaaatggaatgttctatactgcgggacaaaaccatggaaaactgaatgggataaagtggcactacttcaaagggcccagttactccttacgttccacaactatgatgattcgacctttagatttttgaaagcgcaatgtcagaagcgattatgaaagcaacaaagaaatccggagaagctgccaggtgagaaactgtttgaaaacttcagaagcaaacaatattgtctcccttccagcaataagtggtagttatgtgaagtcaccaaggttcttgaccgtgaatctggagccgtttgagttcacaagagtctctacttggggtgacagtgctcacgtggctcgactatagaaaactccactgactgtcgggctttaaaaagggaagaaactgctgagcttgctgtgcttcaaactactactggaccttattttggaactatggtagccagatgataaatatggttaatttcatgtaaaacagaaaaaaagagtgaaaaagagaatatacatgaagaatagaaacaagcctgccataatcctttggaaaagatgtattataccagtgaaaaggtgttatatctatgcaaacctactaacaaattatactgttgcacaattttgataaaaatttagaacagcattgtcctctgagttggttaaatgttaatggatttcagaagcctaattccagtatcatacttactagttgatttctgcttacccatcttcaaatgaaaattccatttttgtaagccataatgaactgtagtacatggacaataagtgtgtggtagaaacaaactccattactctgatttttgatacagttttcagaaaaagaaatgaacataatcaagtaaggatgtatgtggtgaaaacttaccacccccatactatggttttcatttactctaaaaactgattgaatgatatataaatatatttatagcctgagtaaagttaaaagaatgtaaaatatatcatcaagttcttaaaataatatacatgcatttaatatttcctttgatattatacaggaaagcaatattttggagtatgttaagttgaagtaaaagcaagtactctggagcagttcattttacagtatctacttgcatgtgtatacatacatgtaacttcattattttaaaaatatttttagaactccaatactcaccctgttatgtcttgctaatttaaattttgctaattaactgaaacatgcttaccagattcacactgttccagtgtctataaaagaaacactttgaagtctataaaaaataaaataattataaatatcattgtacatagcatgtttatatctgcaaaaaacctaatagctaattaatctggaatatgcaacattgtccttaattgatgcaaataacacaaatgctcaaagaaatctactatatcccttaatgaaatacatcattcttcatatatttctccttcagtccattcccttaggcaatttttaatttttaaaaattattatcaggggagaaaaattggcaaaactattatatgtaagggaaatatatacaaaaagaaaattaatcatagtcacctgactaagaaattctgactgctagttgccataaataactcaatggaaatattcctatgggataatgtattttaagtgaatttttggggtgcttgaagttactgcattattttatcaagaagtcttctctgcctgtaagtgtccaaggttatgacagtaaacagtttttattaaaacatgagtcactatgggatgagaaaattgaaataaagctactgggcctcctctcataaaagagacagttgttggcaaggtagcaataccagtttcaaacttggtgacttgatccactatgccttaatggtttcctccatttgagaaaataaagctattcacattgttaagaaaaatactttttaaagtttaccatcaagtcttttttatatttatgtgtctgtattctacccctttttgccttacaagtgatatttgcaggtattataccatttttctattcttggtggcttcttcatagcaggtaagcctctccttctaaaaacttctcaactgttttcatttaagggaaagaaaatgagtattttgtccttttgtgttcctacagacactttcttaaaccagtttttggataaagaatactatttccaaactcatattacaaaaacaaaataaaataataaaaaaagaaagcatgatatttactgttttgttgtctgggtttgagaaatgaaatattgtttccaattatttataataaatcagtataaaatgttttatgattgttatgtgtattatgtaatacgtacatgtttatggcaatttaacatgtgtattcttttaattgtttcagaataggataattaggtattcgaattttgtctttaaaattcatgtggtttctatgcaaagttcttcatatcatcacaacattatttgatttaaataaaattgaaagt

SEQ ID NO: 293 - DNA, 4311 bp, Homo sapiens
  source 1..4311: mol_type = genomic DNA
ttcctgtcaagtcatcttgtgaaaggctgcctgcttccagcttggcttggatgtgcaaccttaataaaactcactgaggtctgggagaaaatagcagatctgcagcagatagggtagaggaaagggtctagaatatgtacacgcagctgactcaggcaggctccatgctgaacggtcacacagagaggaaacaataaatctcagctactatgcaataaatatctcaagttttaacgaagaaaaacatcattgcagtgaaataaaaaattttaaaattttagaacaaagctaacaaatggctagttttctatgattcttcttcaaacgctttctttgagggggaaagagtcaaacaaacaagcagttttacctgaaataaagaactagttttagaggtcagaagaaaggagcaagttttgcgagaggcacggaaggagtgtgctggcagtacaatgacagttttcctttcctttgctttcctcgctgccattctgactcacatagggtgcagcaatcagcgccgaagtccagaaaacagtgggagaagatataaccggattcaacatgggcaatgtgcctacactttcattcttccagaacacgatggcaactgtcgtgagagtacgacagaccagtacaacacaaacgctctgcagagagatgctccacacgtggaaccggatttctcttcccagaaacttcaacatctggaacatgtgatggaaaattatactcagtggctgcaaaaacttgagaattacattgtggaaaacatgaagtcggagatggcccagatacagcagaatgcagttcagaaccacacggctaccatgctggagataggaaccagcctcctctctcagactgcagagcagaccagaaagctgacagatgttgagacccaggtactaaatcaaacttctcgacttgagatacagctgctggagaattcattatccacctacaagctagagaagcaacttcttcaacagacaaatgaaatcttgaagatccatgaaaaaaacagtttattagaacataaaatcttagaaatggaaggaaaacacaaggaagagttggacaccttaaaggaagagaaagagaaccttcaaggcttggttactcgtcaaacatatataatccaggagctggaaaagcaattaaacagagctaccaccaacaacagtgtccttcagaagcagcaactggagctgatggacacagtccacaaccttgtcaatctttgcactaaagaaggtgttttactaaagggaggaaaaagagaggaagagaaaccatttagagactgtgcagatgtatatcaagctggttttaataaaagtggaatctacactatttatattaataatatgccagaacccaaaaaggtgttttgcaatatggatgtcaatgggggaggttggactgtaatacaacatcgtgaagatggaagtctagatttccaaagaggctggaaggaatataaaatgggttttggaaatccctccggtgaatattggctggggaatgagtttatttttgccattaccagtcagaggcagtacatgctaagaattgagttaatggactgggaagggaaccgagcctattcacagtatgacagattccacataggaaatgaaaagcaaaactataggttgtatttaaaaggtcacactgggacagcaggaaaacagagcagcctgatcttacacggtgctgatttcagcactaaagatgctgataatgacaactgtatgtgcaaatgtgccctcatgttaacaggaggatggtggtttgatgcttgtggcccctccaatctaaatggaatgttctatactgcgggacaaaaccatggaaaactgaatgggataaagtggcactacttcaaagggcccagttactccttacgttccacaactatgatgattcgacctttagatttttgaaagcgcaatgtcagaagcgattatgaaagcaacaaagaaatccggagaagctgccaggtgagaaactgtttgaaaacttcagaagcaaacaatattgtctcccttccagcaataagtggtagttatgtgaagtcaccaaggttcttgaccgtgaatctggagccgtttgagttcacaagagtctctacttggggtgacagtgctcacgtggctcgactatagaaaactccactgactgtcgggctttaaaaagggaagaaactgctgagcttgctgtgcttcaaactactactggaccttattttggaactatggtagccagatgataaatatggttaatttcatgtaaaacagaaaaaaagagtgaaaaagagaatatacatgaagaatagaaacaagcctgccataatcctttggaaaagatgtattataccagtgaaaaggtgttatatctatgcaaacctactaacaaattatactgttgcacaattttgataaaaatttagaacagcattgtcctctgagttggttaaatgttaatggatttcagaagcctaattccagtatcatacttactagttgatttctgcttacccatcttcaaatgaaaattccatttttgtaagccataatgaactgtagtacatggacaataagtgtgtggtagaaacaaactccattactctgatttttgatacagttttcagaaaaagaaatgaacataatcaagtaaggatgtatgtggtgaaaacttaccacccccatactatggttttcatttactctaaaaactgattgaatgatatataaatatatttatagcctgagtaaagttaaaagaatgtaaaatatatcatcaagttcttaaaataatatacatgcatttaatatttcctttgatattatacaggaaagcaatattttggagtatgttaagttgaagtaaaagcaagtactctggagcagttcattttacagtatctacttgcatgtgtatacatacatgtaacttcattattttaaaaatatttttagaactccaatactcaccctgttatgtcttgctaatttaaattttgctaattaactgaaacatgcttaccagattcacactgttccagtgtctataaaagaaacactttgaagtctataaaaaataaaataattataaatatcattgtacatagcatgtttatatctgcaaaaaacctaatagctaattaatctggaatatgcaacattgtccttaattgatgcaaataacacaaatgctcaaagaaatctactatatcccttaatgaaatacatcattcttcatatatttctccttcagtccattcccttaggcaatttttaatttttaaaaattattatcaggggagaaaaattggcaaaactattatatgtaagggaaatatatacaaaaagaaaattaatcatagtcacctgactaagaaattctgactgctagttgccataaataactcaatggaaatattcctatgggataatgtattttaagtgaatttttggggtgcttgaagttactgcattattttatcaagaagtcttctctgcctgtaagtgtccaaggttatgacagtaaacagtttttattaaaacatgagtcactatgggatgagaaaattgaaataaagctactgggcctcctctcataaaagagacagttgttggcaaggtagcaataccagtttcaaacttggtgacttgatccactatgccttaatggtttcctccatttgagaaaataaagctattcacattgttaagaaaaatactttttaaagtttaccatcaagtcttttttatatttatgtgtctgtattctacccctttttgccttacaagtgatatttgcaggtattataccatttttctattcttggtggcttcttcatagcaggtaagcctctccttctaaaaacttctcaactgttttcatttaagggaaagaaaatgagtattttgtccttttgtgttcctacagacactttcttaaaccagtttttggataaagaatactatttccaaactcatattacaaaaacaaaataaaataataaaaaaagaaagcatgatatttactgttttgttgtctgggtttgagaaatgaaatattgtttccaattatttataataaatcagtataaaatgttttatgattgttatgtgtattatgtaatacgtacatgtttatggcaatttaacatgtgtattcttttaattgtttcagaataggataattaggtattcgaattttgtctttaaaattcatgtggtttctatgcaaagttcttcatatcatcacaacattatttgatttaaataaaattgaaagtaa

SEQ ID NO: 294 - DNA, 1523 bp, Homo sapiens
  source 1..1523: mol_type = genomic DNA
cggctaagtttttgtatttttagtagagacggggtttcaccatgtttgccaggatggtctcgatctcttgacctcgtgatccacccgccttggcctcccaaagtgctgggattacaggcgtgagccactgcgcccggcggtactaaatcaaacttctcgacttgagatacagctgctggagaattcattatccacctacaagctagagaagcaacttcttcaacagacaaatgaaatcttgaagatccatgaaaaaaacagtttattagaacataaaatcttagaaatggaaggaaaacacaaggaagagttggacaccttaaaggaagagaaagagaaccttcaaggcttggttactcgtcaaacatatataatccaggagctggaaaagcaattaaacagagctaccaccaacaacagtgtccttcagaagcagcaactggagctgatggacacagtccacaaccttgtcaatctttgcactaaagaagttttactaaagggaggaaaaagagaggaagagaaaccatttagagactgtgcagatgtatatcaagctggttttaataaaagtggaatctacactatttatattaataatatgccagaacccaaaaaggtgttttgcaatatggatgtcaatgggggaggttggactgtaatacaacatcgtgaagatggaagtctagatttccaaagaggctggaaggaatataaaatgggttttggaaatccctccggtgaatattggctggggaatgagtttatttttgccattaccagtcagaggcagtacatgctaagaattgagttaatggactgggaagggaaccgagcctattcacagtatgacagattccacataggaaatgaaaagcaaaactataggttgtatttaaaaggtcacactgggacagcaggaaaacagagcagcctgatcttacacggtgctgatttcagcactaaagatgctgataatgacaactgtatgtgcaaatgtgccctcatgttaacaggaggatggtggtttgatgcttgtggcccctccaatctaaatggaatgttctatactgcgggacaaaaccatggaaaactgaatgggataaagtggcactacttcaaagggcccagttactccttacgttccacaactatgatgattcgacctttagatttttgaaagcgcaatgtcagaagcgattatgaaagcaacaaagaaatccggagaagctgccaggtgagaaactgtttgaaaacttcagaagcaaacaatattgtctcccttccagcaataagtggtagttatgtgaagtcaccaaggttcttgaccgtgaatctggagccgtttgagttcacaagagtctctacttggggtgacagtgctcacgtggctcgactatagaaaactccactgactgtcgggctttaaaaagggaagaaactgctgagcttgctgtgcttcaaactactactggaccttattttggaactatggtagccagatgataaatatggttaatttc

SEQ ID NO: 295 - DNA, 1526 bp, Homo sapiens
  source 1..1526: mol_type = genomic DNA
cggctaagtttttgtatttttagtagagacggggtttcaccatgtttgccaggatggtctcgatctcttgacctcgtgatccacccgccttggcctcccaaagtgctgggattacaggcgtgagccactgcgcccggcggtactaaatcaaacttctcgacttgagatacagctgctggagaattcattatccacctacaagctagagaagcaacttcttcaacagacaaatgaaatcttgaagatccatgaaaaaaacagtttattagaacataaaatcttagaaatggaaggaaaacacaaggaagagttggacaccttaaaggaagagaaagagaaccttcaaggcttggttactcgtcaaacatatataatccaggagctggaaaagcaattaaacagagctaccaccaacaacagtgtccttcagaagcagcaactggagctgatggacacagtccacaaccttgtcaatctttgcactaaagaaggtgttttactaaagggaggaaaaagagaggaagagaaaccatttagagactgtgcagatgtatatcaagctggttttaataaaagtggaatctacactatttatattaataatatgccagaacccaaaaaggtgttttgcaatatggatgtcaatgggggaggttggactgtaatacaacatcgtgaagatggaagtctagatttccaaagaggctggaaggaatataaaatgggttttggaaatccctccggtgaatattggctggggaatgagtttatttttgccattaccagtcagaggcagtacatgctaagaattgagttaatggactgggaagggaaccgagcctattcacagtatgacagattccacataggaaatgaaaagcaaaactataggttgtatttaaaaggtcacactgggacagcaggaaaacagagcagcctgatcttacacggtgctgatttcagcactaaagatgctgataatgacaactgtatgtgcaaatgtgccctcatgttaacaggaggatggtggtttgatgcttgtggcccctccaatctaaatggaatgttctatactgcgggacaaaaccatggaaaactgaatgggataaagtggcactacttcaaagggcccagttactccttacgttccacaactatgatgattcgacctttagatttttgaaagcgcaatgtcagaagcgattatgaaagcaacaaagaaatccggagaagctgccaggtgagaaactgtttgaaaacttcagaagcaaacaatattgtctcccttccagcaataagtggtagttatgtgaagtcaccaaggttcttgaccgtgaatctggagccgtttgagttcacaagagtctctacttggggtgacagtgctcacgtggctcgactatagaaaactccactgactgtcgggctttaaaaagggaagaaactgctgagcttgctgtgcttcaaactactactggaccttattttggaactatggtagccagatgataaatatggttaatttc

SEQ ID NO: 296 - DNA, 5416 bp, Homo sapiens
  source 1..5416: mol_type = genomic DNA
ctggttggagggcaggcattctgctctgatttttcctgttgcctggctagtgaccccctacaggaagataacggctaagccaggagggcggagcagcccactacacatgtctggctgctcttatcaacttatcatataaggaaaggaaagtgattgattcggatactgacactgtaggatctggggagagaggaacaaaggaccgtgaaagctgctctgtaaaagctgacacagccctcccaagtgagcaggactgttcttcccactgcaatctgacagtttactgcatgcctggagagaacacagcagtaaaaaccaggtttgctactggaaaaagaggaaagagaagactttcattgacggacccagccatggcagcgtagcagccctgcgttttagacggcagcagctcgggactctggacgtgtgtttgccctcaagtttgctaagctgctggtttattactgaagaaagaatgtggcagattgttttctttactctgagctgtgatcttgtcttggccgcagcctataacaactttcggaagagcatggacagcataggaaagaagcaatatcaggtccagcatgggtcctgcagctacactttcctcctgccagagatggacaactgccgctcttcctccagcccctacgtgtccaatgctgtgcagagggacgcgccgctcgaatacgatgactcggtgcagaggctgcaagtgctggagaacatcatggaaaacaacactcagtggctaatgaagcttgagaattatatccaggacaacatgaagaaagaaatggtagagatacagcagaatgcagtacagaaccagacggctgtgatgatagaaatagggacaaacctgttgaaccaaacagcggagcaaacgcggaagttaactgatgtggaagcccaagtattaaatcagaccacgagacttgaacttcagctcttggaacactccctctcgacaaacaaattggaaaaacagattttggaccagaccagtgaaataaacaaattgcaagataagaacagtttcctagaaaagaaggtgctagctatggaagacaagcacatcatccaactacagtcaataaaagaagagaaagatcagctacaggtgttagtatccaagcaaaattccatcattgaagaactagaaaaaaaaatagtgactgccacggtgaataattcagttcttcagaagcagcaacatgatctcatggagacagttaataacttactgactatgatgtccacatcaaactcagctaaggaccccactgttgctaaagaagaacaaatcagcttcagagactgtgctgaagtattcaaatcaggacacaccacgaatggcatctacacgttaacattccctaattctacagaagagatcaaggcctactgtgacatggaagctggaggaggcgggtggacaattattcagcgacgtgaggatggcagcgttgattttcagaggacttggaaagaatataaagtgggatttggtaacccttcaggagaatattggctgggaaatgagtttgtttcgcaactgactaatcagcaacgctatgtgcttaaaatacaccttaaagactgggaagggaatgaggcttactcattgtatgaacatttctatctctcaagtgaagaactcaattataggattcaccttaaaggacttacagggacagccggcaaaataagcagcatcagccaaccaggaaatgattttagcacaaaggatggagacaacgacaaatgtatttgcaaatgttcacaaatgctaacaggaggctggtggtttgatgcatgtggtccttccaacttgaacggaatgtactatccacagaggcagaacacaaataagttcaacggcattaaatggtactactggaaaggctcaggctattcgctcaaggccacaaccatgatgatccgaccagcagatttctaaacatcccagtccacctgaggaactgtctcgaactattttcaaagacttaagcccagtgcactgaaagtcacggctgcgcactgtgtcctcttccaccacagagggcgtgtgctcggtgctgacgggacccacatgctccagattagagcctgtaaactttatcacttaaacttgcatcacttaacggaccaaagcaagaccctaaacatccataattgtgattagacagaacacctatgcaaagatgaacccgaggctgagaatcagactgacagtttacagacgctgctgtcacaaccaagaatgttatgtgcaagtttatcagtaaataactggaaaacagaacacttatgttatacaatacagatcatcttggaactgcattcttctgagcactgtttatacactgtgtaaatacccatatgtcctgaattcaccatcactatcacaattaaaaggaagaaaaaaactctctaagccataaaaagacatattcagggatattctgagaaggggttactagaagtttaatatttggaaaaacagttagtgcatttttactccatctcttaggtgctttaaatttttatttcaaaaacagcgtatttacatttatgttgacagcttagttataagttaatgctcaaatacgtatttcaaatttatatggtagaaacttccagaatctctgaaattatcaacagaaacgtgccattttagtttatatgcagaccgtactatttttttctgcctgattgttaaatatgaaggtatttttagtaattaaatataacttattaggggatatgcctatgtttaacttttatgataatatttacaattttataatttgtttccaaaagacctaattgtgccttgtgataaggaaacttcttacttttaatgatgaggaaaattatacatttcattctatgacaaagaaactttactatcttctcactattctaaaacagaggtctgttttctttcctagtaagatatatttttatagaactagactacaatttaatttctggttgagaaaagccttctatttaagaaatttacaaagctatatgtctcaagattcacccttaaatttacttaaggaaaaaaataattgacactagtaagtttttttatgtcaatcagcaaactgaaaaaaaaaaaagggtttcaaagtgcaaaaacaaaatctgatgttcataatatatttaaatatttaccaaaaatttgagaacacagggctgggcgcagtggctcacacctataatcccagtacattggtaggcaaggtgggcagatcacctgaggtcaggagttcaagaccagcctggacaacatggtgaaaccctgtctctactaaataatacaaaaattagccaggcgtgctggcgggcacctgtaatcccagctactcgggaggctgaggcagggagaattgcttgcaccagggaggtagaggttgcagtgagccaagatcgcaccactgcactccagccggggcaacagagcaagactccatctcaaaaaaaaaaaaaaaaaaagaaagaaaagaaaatttgagaacacagctttatactcgggactacaaaaccataaactcctggagttttaactccttttgaaattttcatagtacaattaatactaatgaacatttgtgtaaagctttataatttaaaggcaatttctcatatattcttttctgaatcatttgcaaggaagttcagagtccagtctgtaactagcatctactatatgtctgtcttcaccttacagtgttctaccattattttttctttattccatttcaaaatctaatttattttaccccaacttctccccaccacttgacgtagttttagaacacacaggtgttgctacatatttggagtcaatgatggactctggcaaagtcaaggctctgttttatttccaccaaggtgcacttttccaacaactatttaactagttaagaacctccctatcttagaactgtatctactttatatttaagaaggttttatgaattcaacaacggtatcatggccttgtatcaagttgaaaaacaactgaaaataagaaaatttcacagcctcgaaagacaacaacaagtttctaggatatctcaatgacaagagtgatggatacttaggtagggaaacgctaatgcaggaaaaactggcaacaacacaatttatatcaattctctttgtaggcaggtgataaaaaattcaaggacaaatctcattatgtcattgtgcatcatatataatctcttatgagcgagaatggggggaatttgtgtttttactttacacttcaattccttacacggtatttcaaacaaacagttttgctgagaggagcttttgtctctccttaagaaaatgtttataaagctgaaaggaaatcaaacagtaatcttaaaaatgaaaacaaaacaacccaacaacctagataactacagtgatcagggagcacagttcaactccttgttatgttttagtcatatggcctactcaaacagctaaataacaacaccagtggcagataaaaatcaccatttatctttcagctattaatcttttgaatgaataaactgtgacaaacaaattaacatttttgaacatgaaaggcaacttctgcacaatcctgtatccaagcaaactttaaattatccacttaattattacttaatcttaaaaaaaattagaacccagaacttttcaatgaagcatttgaaagttgaagtggaatttaggaaagccataaaaatataaatactgttatcacagcaccagcaagccataatctttatacctatcagttctatttctattaacagtaaaaacattaagcaagatataagactacctgcccaagaattcagtcttttttcatttttgtttttctcagttctgaggatgttaatcgtcaaattttctttggactgcattcctcactactttttgcacaatggtctcacgttctcacatttgttctcgcgaataaattgataaaaggtgttaagttctgtgaatgtctttttaattatgggcataattgtgcttgactggataaaaacttaagtccacccttatgtttataataatttcttgagaacagcaaactgcatttaccatcgtaaaacaacatctgacttacgggagctgcagggaagtggtgagacagttcgaacggctcctcagaaatccagtgacccaattctaaagaccatagcacctgcaagtgacacaacaagcagatttattatacatttattagccttagcaggcaataaaccaagaatcactttgaagacacagcaaaaagtgatacactccgcagatctgaaatagatgtgttctcagacaacaaagtcccttcagaatcttcatgttgcataaatgttatgaatattaataaaaagttgattgagaaaaa

SEQ ID NO: 297 - DNA, 5244 bp, Homo sapiens
  source 1..5244: mol_type = genomic DNA
aaagtgattgattcggatactgacactgtaggatctggggagagaggaacaaaggaccgtgaaagctgctctgtaaaagctgacacagccctcccaagtgagcaggactgttcttcccactgcaatctgacagtttactgcatgcctggagagaacacagcagtaaaaaccaggtttgctactggaaaaagaggaaagagaagactttcattgacggacccagccatggcagcgtagcagccctgcgttttagacggcagcagctcgggactctggacgtgtgtttgccctcaagtttgctaagctgctggtttattactgaagaaagaatgtggcagattgttttctttactctgagctgtgatcttgtcttggccgcagcctataacaactttcggaagagcatggacagcataggaaagaagcaatatcaggtccagcatgggtcctgcagctacactttcctcctgccagagatggacaactgccgctcttcctccagcccctacgtgtccaatgctgtgcagagggacgcgccgctcgaatacgatgactcggtgcagaggctgcaagtgctggagaacatcatggaaaacaacactcagtggctaatgaagcttgagaattatatccaggacaacatgaagaaagaaatggtagagatacagcagaatgcagtacagaaccagacggctgtgatgatagaaatagggacaaacctgttgaaccaaacagcggagcaaacgcggaagttaactgatgtggaagcccaagtattaaatcagaccacgagacttgaacttcagctcttggaacactccctctcgacaaacaaattggaaaaacagattttggaccagaccagtgaaataaacaaattgcaagataagaacagtttcctagaaaagaaggtgctagctatggaagacaagcacatcatccaactacagtcaataaaagaagagaaagatcagctacaggtgttagtatccaagcaaaattccatcattgaagaactagaaaaaaaaatagtgactgccacggtgaataattcagttcttcagaagcagcaacatgatctcatggagacagttaataacttactgactatgatgtccacatcaaactctaaggaccccactgttgctaaagaagaacaaatcagcttcagagactgtgctgaagtattcaaatcaggacacaccacgaatggcatctacacgttaacattccctaattctacagaagagatcaaggcctactgtgacatggaagctggaggaggcgggtggacaattattcagcgacgtgaggatggcagcgttgattttcagaggacttggaaagaatataaagtgggatttggtaacccttcaggagaatattggctgggaaatgagtttgtttcgcaactgactaatcagcaacgctatgtgcttaaaatacaccttaaagactgggaagggaatgaggcttactcattgtatgaacatttctatctctcaagtgaagaactcaattataggattcaccttaaaggacttacagggacagccggcaaaataagcagcatcagccaaccaggaaatgattttagcacaaaggatggagacaacgacaaatgtatttgcaaatgttcacaaatgctaacaggaggctggtggtttgatgcatgtggtccttccaacttgaacggaatgtactatccacagaggcagaacacaaataagttcaacggcattaaatggtactactggaaaggctcaggctattcgctcaaggccacaaccatgatgatccgaccagcagatttctaaacatcccagtccacctgaggaactgtctcgaactattttcaaagacttaagcccagtgcactgaaagtcacggctgcgcactgtgtcctcttccaccacagagggcgtgtgctcggtgctgacgggacccacatgctccagattagagcctgtaaactttatcacttaaacttgcatcacttaacggaccaaagcaagaccctaaacatccataattgtgattagacagaacacctatgcaaagatgaacccgaggctgagaatcagactgacagtttacagacgctgctgtcacaaccaagaatgttatgtgcaagtttatcagtaaataactggaaaacagaacacttatgttatacaatacagatcatcttggaactgcattcttctgagcactgtttatacactgtgtaaatacccatatgtcctgaattcaccatcactatcacaattaaaaggaagaaaaaaactctctaagccataaaaagacatattcagggatattctgagaaggggttactagaagtttaatatttggaaaaacagttagtgcatttttactccatctcttaggtgctttaaatttttatttcaaaaacagcgtatttacatttatgttgacagcttagttataagttaatgctcaaatacgtatttcaaatttatatggtagaaacttccagaatctctgaaattatcaacagaaacgtgccattttagtttatatgcagaccgtactatttttttctgcctgattgttaaatatgaaggtatttttagtaattaaatataacttattaggggatatgcctatgtttaacttttatgataatatttacaattttataatttgtttccaaaagacctaattgtgccttgtgataaggaaacttcttacttttaatgatgaggaaaattatacatttcattctatgacaaagaaactttactatcttctcactattctaaaacagaggtctgttttctttcctagtaagatatatttttatagaactagactacaatttaatttctggttgagaaaagccttctatttaagaaatttacaaagctatatgtctcaagattcacccttaaatttacttaaggaaaaaaataattgacactagtaagtttttttatgtcaatcagcaaactgaaaaaaaaaaaagggtttcaaagtgcaaaaacaaaatctgatgttcataatatatttaaatatttaccaaaaatttgagaacacagggctgggcgcagtggctcacacctataatcccagtacattggtaggcaaggtgggcagatcacctgaggtcaggagttcaagaccagcctggacaacatggtgaaaccctgtctctactaaataatacaaaaattagccaggcgtgctggcgggcacctgtaatcccagctactcgggaggctgaggcagggagaattgcttgcaccagggaggtagaggttgcagtgagccaagatcgcaccactgcactccagccggggcaacagagcaagactccatctcaaaaaaaaaaaaaaaaaaagaaagaaaagaaaatttgagaacacagctttatactcgggactacaaaaccataaactcctggagttttaactccttttgaaattttcatagtacaattaatactaatgaacatttgtgtaaagctttataatttaaaggcaatttctcatatattcttttctgaatcatttgcaaggaagttcagagtccagtctgtaactagcatctactatatgtctgtcttcaccttacagtgttctaccattattttttctttattccatttcaaaatctaatttattttaccccaacttctccccaccacttgacgtagttttagaacacacaggtgttgctacatatttggagtcaatgatggactctggcaaagtcaaggctctgttttatttccaccaaggtgcacttttccaacaactatttaactagttaagaacctccctatcttagaactgtatctactttatatttaagaaggttttatgaattcaacaacggtatcatggccttgtatcaagttgaaaaacaactgaaaataagaaaatttcacagcctcgaaagacaacaacaagtttctaggatatctcaatgacaagagtgatggatacttaggtagggaaacgctaatgcaggaaaaactggcaacaacacaatttatatcaattctctttgtaggcaggtgataaaaaattcaaggacaaatctcattatgtcattgtgcatcatatataatctcttatgagcgagaatggggggaatttgtgtttttactttacacttcaattccttacacggtatttcaaacaaacagttttgctgagaggagcttttgtctctccttaagaaaatgtttataaagctgaaaggaaatcaaacagtaatcttaaaaatgaaaacaaaacaacccaacaacctagataactacagtgatcagggagcacagttcaactccttgttatgttttagtcatatggcctactcaaacagctaaataacaacaccagtggcagataaaaatcaccatttatctttcagctattaatcttttgaatgaataaactgtgacaaacaaattaacatttttgaacatgaaaggcaacttctgcacaatcctgtatccaagcaaactttaaattatccacttaattattacttaatcttaaaaaaaattagaacccagaacttttcaatgaagcatttgaaagttgaagtggaatttaggaaagccataaaaatataaatactgttatcacagcaccagcaagccataatctttatacctatcagttctatttctattaacagtaaaaacattaagcaagatataagactacctgcccaagaattcagtcttttttcatttttgtttttctcagttctgaggatgttaatcgtcaaattttctttggactgcattcctcactactttttgcacaatggtctcacgttctcacatttgttctcgcgaataaattgataaaaggtgttaagttctgtgaatgtctttttaattatgggcataattgtgcttgactggataaaaacttaagtccacccttatgtttataataatttcttgagaacagcaaactgcatttaccatcgtaaaacaacatctgacttacgggagctgcagggaagtggtgagacagttcgaacggctcctcagaaatccagtgacccaattctaaagaccatagcacctgcaagtgacacaacaagcagatttattatacatttattagccttagcaggcaataaaccaagaatcactttgaagacacagcaaaaagtgatacactccgcagatctgaaatagatgtgttctcagacaacaaagtcccttcagaatcttcatgttgcataaatgttatgaatatt

SEQ ID NO: 298 - DNA, 1466 bp, Homo sapiens
  source 1..1466: mol_type = genomic DNA
ccagccatggcagcgtagcagccctgcgttttagacggcagcagctcgggactctggacgtgtgtttgccctcaagtttgctaagctgctggtttattactgaagaaagaatgtggcagattgttttctttactctgagctgtgatcttgtcttggccgcagcctataacaactttcggaagagcatggacagcataggaaagaagcaatatcaggtccagcatgggtcctgcagctacactttcctcctgccagagatggacaactgccgctcttcctccagcccctacgtgtccaatgctgtgcagagggacgcgccgctcgaatacgatgactcggtgcagaggctgcaagtgctggagaacatcatggaaaacaacactcagtggctaatgaaggtattaaatcagaccacgagacttgaacttcagctcttggaacactccctctcgacaaacaaattggaaaaacagattttggaccagaccagtgaaataaacaaattgcaagataagaacagtttcctagaaaagaaggtgctagctatggaagacaagcacatcatccaactacagtcaataaaagaagagaaagatcagctacaggtgttagtatccaagcaaaattccatcattgaagaactagaaaaaaaaatagtgactgccacggtgaataattcagttcttcagaagcagcaacatgatctcatggagacagttaataacttactgactatgatgtccacatcaaactcagctaaggaccccactgttgctaaagaagaacaaatcagcttcagagactgtgctgaagtattcaaatcaggacacaccacgaatggcatctacacgttaacattccctaattctacagaagagatcaaggcctactgtgacatggaagctggaggaggcgggtggacaattattcagcgacgtgaggatggcagcgttgattttcagaggacttggaaagaatataaagtgggatttggtaacccttcaggagaatattggctgggaaatgagtttgtttcgcaactgactaatcagcaacgctatgtgcttaaaatacaccttaaagactgggaagggaatgaggcttactcattgtatgaacatttctatctctcaagtgaagaactcaattataggattcaccttaaaggacttacagggacagccggcaaaataagcagcatcagccaaccaggaaatgattttagcacaaaggatggagacaacgacaaatgtatttgcaaatgttcacaaatgctaacaggaggctggtggtttgatgcatgtggtccttccaacttgaacggaatgtactatccacagaggcagaacacaaataagttcaacggcattaaatggtactactggaaaggctcaggctattcgctcaaggccacaaccatgatgatccgaccagcagatttctaaacatcccagtccacctgagga

SEQ ID NO: 299 - DNA, 1903 bp, Homo sapiens
  source 1..1903: mol_type = genomic DNA
ataaaaaccgtcctcgggcgcggcggggagaagccgagctgagcggatcctcacacgactgtgatccgattctttccagcggcttctgcaaccaagcgggtcttacccccggtcctccgcgtctccagtcctcgcacctggaaccccaacgtccccgagagtccccgaatccccgctcccaggctacctaagaggatgagcggtgctccgacggccggggcagccctgatgctctgcgccgccaccgccgtgctactgagcgctcagggcggacccgtgcagtccaagtcgccgcgctttgcgtcctgggacgagatgaatgtcctggcgcacggactcctgcagctcggccaggggctgcgcgaacacgcggagcgcacccgcagtcagctgagcgcgctggagcggcgcctgagcgcgtgcgggtccgcctgtcagggaaccgaggggtccaccgacctcccgttagcccctgagagccgggtggaccctgaggtccttcacagcctgcagacacaactcaaggctcagaacagcaggatccagcaactcttccacaaggtggcccagcagcagcggcacctggagaagcagcacctgcgaattcagcatctgcaaagccagtttggcctcctggaccacaagcacctagaccatgaggtggccaagcctgcccgaagaaagaggctgcccgagatggcccagccagttgacccggctcacaatgtcagccgcctgcaccggctgcccagggattgccaggagctgttccaggttggggagaggcagagtggactatttgaaatccagcctcaggggtctccgccatttttggtgaactgcaagatgacctcagatggaggctggacagtaattcagaggcgccacgatggctcagtggacttcaaccggccctgggaagcctacaaggcggggtttggggatccccacggcgagttctggctgggtctggagaaggtgcatagcatcacgggggaccgcaacagccgcctggccgtgcagctgcgggactgggatggcaacgccgagttgctgcagttctccgtgcacctgggtggcgaggacacggcctatagcctgcagctcactgcacccgtggccggccagctgggcgccaccaccgtcccacccagcggcctctccgtacccttctccacttgggaccaggatcacgacctccgcagggacaagaactgcgccaagagcctctctggaggctggtggtttggcacctgcagccattccaacctcaacggccagtacttccgctccatcccacagcagcggcagaagcttaagaagggaatcttctggaagacctggcggggccgctactacccgctgcaggccaccaccatgttgatccagcccatggcagcagaggcagcctcctagcgtcctggctgggcctggtcccaggcccacgaaagacggtgactcttggctctgcccgaggatgtggccgttccctgcctgggcaggggctccaaggaggggccatctggaaacttgtggacagagaagaagaccacgactggagaagccccctttctgagtgcaggggggctgcatgcgttgcctcctgagatcgaggctgcaggatatgctcagactctagaggcgtggaccaaggggcatggagcttcactccttgctggccagggagttggggactcagagggaccacttggggccagccagactggcctcaatggcggactcagtcacattgactgacggggaccagggcttgtgtgggtcgagagcgccctcatggtgctggtgctgttgtgtgtaggtcccctggggacacaagcaggcgccaatggtatctgggcggagctcacagagttcttggaataaaagcaacctcagaacactt

SEQ ID NO: 300 - DNA, 1789 bp, Homo sapiens
  source 1..1789: mol_type = genomic DNA
ataaaaaccgtcctcgggcgcggcggggagaagccgagctgagcggatcctcacacgactgtgatccgattctttccagcggcttctgcaaccaagcgggtcttacccccggtcctccgcgtctccagtcctcgcacctggaaccccaacgtccccgagagtccccgaatccccgctcccaggctacctaagaggatgagcggtgctccgacggccggggcagccctgatgctctgcgccgccaccgccgtgctactgagcgctcagggcggacccgtgcagtccaagtcgccgcgctttgcgtcctgggacgagatgaatgtcctggcgcacggactcctgcagctcggccaggggctgcgcgaacacgcggagcgcacccgcagtcagctgagcgcgctggagcggcgcctgagcgcgtgcgggtccgcctgtcagggaaccgaggggtccaccgacctcccgttagcccctgagagccgggtggaccctgaggtccttcacagcctgcagacacaactcaaggctcagaacagcaggatccagcaactcttccacaaggtggcccagcagcagcggcacctggagaagcagcacctgcgaattcagcatctgcaaagccagtttggcctcctggaccacaagcacctagaccatgaggtggccaagcctgcccgaagaaagaggctgcccgagatggcccagccagttgacccggctcacaatgtcagccgcctgcaccatggaggctggacagtaattcagaggcgccacgatggctcagtggacttcaaccggccctgggaagcctacaaggcggggtttggggatccccacggcgagttctggctgggtctggagaaggtgcatagcatcacgggggaccgcaacagccgcctggccgtgcagctgcgggactgggatggcaacgccgagttgctgcagttctccgtgcacctgggtggcgaggacacggcctatagcctgcagctcactgcacccgtggccggccagctgggcgccaccaccgtcccacccagcggcctctccgtacccttctccacttgggaccaggatcacgacctccgcagggacaagaactgcgccaagagcctctctggaggctggtggtttggcacctgcagccattccaacctcaacggccagtacttccgctccatcccacagcagcggcagaagcttaagaagggaatcttctggaagacctggcggggccgctactacccgctgcaggccaccaccatgttgatccagcccatggcagcagaggcagcctcctagcgtcctggctgggcctggtcccaggcccacgaaagacggtgactcttggctctgcccgaggatgtggccgttccctgcctgggcaggggctccaaggaggggccatctggaaacttgtggacagagaagaagaccacgactggagaagccccctttctgagtgcaggggggctgcatgcgttgcctcctgagatcgaggctgcaggatatgctcagactctagaggcgtggaccaaggggcatggagcttcactccttgctggccagggagttggggactcagagggaccacttggggccagccagactggcctcaatggcggactcagtcacattgactgacggggaccagggcttgtgtgggtcgagagcgccctcatggtgctggtgctgttgtgtgtaggtcccctggggacacaagcaggcgccaatggtatctgggcggagctcacagagttcttggaataaaagcaacctcagaacactt

SEQ ID NO: 301 - DNA, 1719 bp, Homo sapiens
  source 1..1719: mol_type = genomic DNA
gaagccgagctgagcggatcctcacacgactgtgatccgattctttccagcggcttctgcaaccaagcgggtcttacccccggtcctccgcgtctccagtcctcgcacctggaaccccaacgtccccgagagtccccgaatccccgctcccaggctacctaagaggatgagcggtgctccgacggccggggcagccctgatgctctgcgccgccaccgccgtgctactgagcgctcagggcggacccgtgcagtccaagtcgccgcgctttgcgtcctgggacgagatgaatgtcctggcgcacggactcctgcagctcggccaggggctgcgcgaacacgcggagcgcacccgcagtcagctgagcgcgctggagcggcgcctgagcgcgtgcgggtccttcacagcctgcagacacaactcaaggctcagaacagcaggatccagcaactcttccacaaggtggcccagcagcagcggcacctggagaagcagcacctgcgaattcagcatctgcaaagccagtttggcctcctggaccacaagcacctagaccatgaggtggccaagcctgcccgaagaaagaggctgcccgagatggcccagccagttgacccggctcacaatgtcagccgcctgcaccggctgcccagggattgccaggagctgttccaggttggggagaggcagagtggactatttgaaatccagcctcaggggtctccgccatttttggtgaactgcaagatgacctcagatggaggctggacagtaattcagaggcgccacgatggctcagtggacttcaaccggccctgggaagcctacaaggcggggtttggggatccccacggcgagttctggctgggtctggagaaggtgcatagcatcacgggggaccgcaacagccgcctggccgtgcagctgcgggactgggatggcaacgccgagttgctgcagttctccgtgcacctgggtggcgaggacacggcctatagcctgcagctcactgcacccgtggccggccagctgggcgccaccaccgtcccacccagcggcctctccgtacccttctccacttgggaccaggatcacgacctccgcagggacaagaactgcgccaagagcctctctggaggctggtggtttggcacctgcagccattccaacctcaacggccagtacttccgctccatcccacagcagcggcagaagcttaagaagggaatcttctggaagacctggcggggccgctactacccgctgcaggccaccaccatgttgatccagcccatggcagcagaggcagcctcctagcgtcctggctgggcctggtcccaggcccacgaaagacggtgactcttggctctgcccgaggatgtggccgttccctgcctgggcaggggctccaaggaggggccatctggaaacttgtggacagagaagaagaccacgactggagaagccccctttctgagtgcaggggggctgcatgcgttgcctcctgagatcgaggctgcaggatatgctcagactctagaggcgtggaccaaggggcatggagcttcactccttgctggccagggagttggggactcagagggaccacttggggccagccagactggcctcaatggcggactcagtcacattgactgacggggaccagggcttgtgtgggtcgagagcgccctcatggtgctggtgctgttgtgtgta

SEQ ID NO: 302 - DNA, 2699 bp, Homo sapiens
  source 1..2699: mol_type = genomic DNA
gtcgccgcgcggccgccggtgagccgcatggagccccgggcggcggacggctgcttcctgggcgacgtgggtttctgggtggagcggacccctgtgcacgaggcagcccagcggggtgagagcctgcagctgcaacagctgatcgagagcggcgcctgcgtgaaccaggtcaccgtggactccatcacgcccctgcacgcagccagtctgcagggccaggcgcggtgtgtgcagctgctgctggcggctggggcccaggtggatgctcgcaacatcgacggcagcaccccgctctgcgatgcctgcgcctcgggcagcatcgagtgtgtgaagctcttgctgtcctacggggccaaggtcaaccctcccctgtacacagcgtcccccctgcacgaggcctgcatgagcgggagttccgaatgtgtgaggcttcttattgacgtcggggccaatctggaagcgcacgattgccattttgggacccctctgcacgttgcctgtgcccgggagcatctggactgtgtcaaagtgctgctcaatgcaggggccaacgtgaatgcggcaaagcttcatgagactgcccttcaccacgcggccaaggtcaagaatgttgacctcatcgagatgcttatcgagtttggcggcaacatctacgcccgggacaaccgcgggaagaagccgtctgactacacgtggagcagcagcgctcccgccaagtgcttcgagtactacgaaaagacacctctgactctgtcacagctctgcagggtgaacttgaggaaggccactggcgtccgagggctggagaagattgccaagttaaacatcccgccccggctcattgattacctctcctacaactgaattgcaggtggggtccggaccgtggctgcccccgttgtgcccagcattgcccgggtgagggctctgcctgttcctctgaagcagcgtgattgctgtagatagaacaacgctccttcgagtcccttcctgcgatcctgtttaggcttctctcctggatcctggataatgtttccagggtgttgggaaggcctgcgtctcaggtcacagttgtgggtgtggccctgcgctgttctacagaacctaccctctcaatgggcatgggcccaaccatccagttttcctcttttacggaccatcctcaaaggcactctcaggacagacggcgtggggagcacagaggaggctggcagagctggggactgagggcattgttgctgattctcactcaccggggcagcctgccgcagatgcacaggccccaggtgcaggccaccacctccgggtcggcaccaggactgccctcggtgctcatagggaatggctgggcccacggaaggtcggcctgggatgtggcctgggactgctgctctgctggctgctgtgtggatgcttttcctggagcactttccaaggcatcccccagccccaagcctgcgcgcatctgtcactcagggactttctatgggtctttgtgggggaaggccctggctttgtattccccacaagtagcactgagtttcttaggaaatttgtcttcagtattaggtctccaactcttgtaaaaagtttatatgtaggataaaaaccttttagaggacacgtaggcggtaccactaaggttttggtaatgagccattcaaaccgacagcagtgtgaaggtgtgtcaaggtgtatattctcgtggctcggcattctcagtgcaaaggcctgtttggagactctgtgggaattgtttttcatctgtttctatggttgtcaaatgaattcttcacccaccctacagtttgctaactccttgaagctatcaaattagtaagaccatctatcacatccagcattgtcccagtgctttgagttggacgggaatgggactctgcagccaaggcaggataagaaaatcttgcaatcccgtcctgcagtgatagaaacaggtcgttctgcattataagccataggtggagcattcggtagcgtattcagactgcatgggccggcctaggagtctttgccttcataaattttaagaaccccgcccacaacagggagttaaactggaggactttgcatgattagttcagggatgagtggtttctggggcatctgaggtcaggagtttgaaaccagcctggccaacttgatgaaaccccatctctacccattctggagaacaggtcacgcctgtcctggagacagtgtgccgggaaaagggaacgtggtactcactggatgcacccaggccggcccgagcctcccaccgcagacagtgtggaacagagtgagcctgagctgcccaaggcgatgccctttgtgctgtatgactggaggcctctccgcgtgggtacttgggggtggggccacaaatctggcgaaaaacttcatgctggccgccgtgaggttttactccagcgttcccgccattgtcatggcgggtcttcgtcctaaactgagaagaaaagcattcctgtttgatcaccgccttagttaccagttctggatcagtcagtgtttctgcatggaataacaaccattaaaaaaagcactgggttctgccctttcatctttgtaagagattcttgcctctagcaatgacaacctgtgatgtctcacagtagagcacttagcgcagaatcaggtccccacggctgttgctcaataaaagtggcggaataaagtgc

SEQ ID NO: 303 - DNA, 670 bp, Homo sapiens
  source 1..670: mol_type = genomic DNA
agattcacaaggccaacagacaacccaaagtcattaagccatgagagtggaatgaatctatgaaaactcaatgaagacagaacaagagaaaaatcttttcagccacgatgaattaggagaacaagatgtcaaattacactgatgctgagtcaagcttctcaaagcaagagataatcaggctgacctattgctgaggactatgagaaaaaagttattacagaatgagtcatatggaaaacacttgcaaacagaagaatattgagaacataagttgccatggagaaaattccagtgtcagcattcttgctccttgtggccctctcctacactctggccagagataccacagtcaaacctggagccaaaaaggacacaaaggactctcgacccaaactgccccagaccctctccagaggttggggtgaccaactcatctggactcagacatatgaagaagctctatataaatccaagacaagcaacaaacccttgatgattattcatcacttggatgagtgcccacacagtcaagctttaaagaaagtgtttgctgaaaataaagaaatccagaaattggcagagcagtttgtcctcctcaatctggtttatgaaacaactgacaaacacctttctcctgatggccagtatgtccccaggattatgtttgttg

SEQ ID NO: 304 - DNA, 1778 bp, Homo sapiens
  source 1..1778: mol_type = genomic DNA
tagcaacaagtaaatgcagcactagtgggtgggattgaggtatgccctggtgcataaatagagactcagctgtgctggcacactcagaagcttggaccgcatcctagccgccgactcacacaaggcaggtgggtgaggaaatccagagttgccatggagaaaattccagtgtcagcattcttgctccttgtggccctctcctacactctggccagagataccacagtcaaacctggagccaaaaaggacacaaaggactctcgacccaaactgccccagaccctctccagaggttggggtgaccaactcatctggactcagacatatgaagaagctctatataaatccaagacaagcaacaaacccttgatgattattcatcacttggatgagtgcccacacagtcaagctttaaagaaagtgtttgctgaaaataaagaaatccagaaattggcagagcagtttgtcctcctcaatctggtttatgaaacaactgacaaacacctttctcctgatggccagtatgtccccaggattatgtttgttgacccatctctgacagttagagccgatatcactggaagatattcaaatcgtctctatgcttacgaacctgcagatacagctctgttgcttgacaacatgaagaaagctctcaagttgctgaagactgaattgtaaagaaaaaaaatctccaagcccttctgtctgtcaggccttgagacttgaaaccagaagaagtgtgagaagactggctagtgtggaagcatagtgaacacactgattaggttatggtttaatgttacaacaactattttttaagaaaaacaagttttagaaatttggtttcaagtgtacatgtgtgaaaacaatattgtatactaccatagtgagccatgattttctaaaaaaaaaaataaatgttttgggggtgttctgttttctccaacttggtctttcacagtggttcgtttaccaaataggattaaacacacacaaaatgctcaaggaagggacaagacaaaaccaaaactagttcaaatgatgaagaccaaagaccaagttatcatctcaccacaccacaggttctcactagatgactgtaagtagacacgagcttaatcaacagaagtatcaagccatgtgctttagcataaaagaatatttagaaaaacatcccaagaaaatcacatcactacctagagtcaactctggccaggaactctaaggtacacactttcatttagtaattaaattttagtcagattttgcccaacctaatgctctcagggaaagcctctggcaagtagctttctccttcagaggtctaatttagtagaaaggtcatccaaagaacatctgcactcctgaacacaccctgaagaaatcctgggaattgaccttgtaatcgatttgtctgtcaaggtcctaaagtactggagtgaaataaattcagccaacatgtgactaattggaagaagagcaaagggtggtgacgtgttgatgaggcagatggagatcagaggttactagggtttaggaaacgtgaaaggctgtggcatcagggtaggggagcattctgcctaacagaaattagaattgtgtgttaatgtcttcactctatacttaatctcacattcattaatatatggaattcctctactgcccagcccctcctgatttctttggcccctggactatggtgctgtatataatgctttgcagtatctgttgcttgtcttgattaacttttttggataaaaccttttttgaacaga

SEQ ID NO: 305 - DNA, 854 bp, Homo sapiens
  source 1..854: mol_type = genomic DNA
atgtcaaattacactgatgctgagtcaagcttctcaaagcaagagataatcagagttgccatggagaaaattccagtgtcagcattcttgctccttgtggccctctcctacactctggccagagataccacagtcaaacctggagccaaaaaggacacaaaggactctcgacccaaactgccccagaccctctccagaggttggggtgaccaactcatctggactcagacatatgaagaagctctatataaatccaagacaagcaacaaacccttgatgattattcatcacttggatgagtgcccacacagtcaagctttaaagaaagtgtttgctgaaaataaagaaatccagaaattggcagagcagtttgtcctcctcaatctggtttatgaaacaactgacaaacacctttctcctgatggccagtatgtccccaggattatgtttgttgacccatctctgacagttagagccgatatcactggaagatattcaaatcgtctctatgcttacgaacctgcagatacagctctgttgcttgacaacatgaagaaagctctcaagttgctgaagactgaattgtaaagaaaaaaaatctccaagcccttctgtctgtcaggccttgagacttgaaaccagaagaagtgtgagaagactggctagtgtggaagcatagtgaacacactgattaggttatggtttaatgttacaacaactattttttaagaaaaacaagttttagaaatttggtttcaagtgtacatgtgtgaaaacaatattgtatactaccatagtgagccatgattttctaaaaaaaaaaataaatgttttgggggtgttctgttttctcc

SEQ ID NO: 306 - DNA, 11218 bp, Homo sapiens
  source 1..11218: mol_type = genomic DNA
taccgggcggaggtgagcgcggcgccggctcctcctgcggcggactttgggtgcgacttgacgagcggtggttcgacaagtggccttgcgggccggatcgtcccagtggaagagttgtaaatttgcttctggccttcccctacggattatacctggccttcccctacggattatactcaacttactgtttagaaaatgtggcccacgagacgcctggttactatcaaaaggagcggggtcgacggtccccactttcccctgagcctcagcacctgcttgtttggaaggtatgaaaatgaaagtcttcagaatggaaggaagtcaactgaatttccaagaaaaatacgtgaacaggagccagcacgtcgtgtctcaagatctagcttctcttctgaccctgatgagagtgagggaatacctttgaaaagaaggcgtgtgtcctttggtgggcacctaagacctgaactatttgatgaaaacttgcctcctaatacgcctctcaaaaggggagaagccccaaccaaaagaaagtctctggtaatgcacactccacctgtcctgaagaaaatcatcaaggaacagcctcaaccatcaggaaaacaagagtcaggttcagaaatccatgtggaagtgaaggcacaaagcttggttataagccctccagctcctagtcctaggaaaactccagttgccagtgatcaacgccgtaggtcctgcaaaacagcccctgcttccagcagcaaatctcagacagaggttcctaagagaggagggagaaagagtggcaacctgccttcaaagagagtgtctatcagccgaagtcaacatgatattttacagatgatatgttccaaaagaagaagtggtgcttcggaagcaaatctgattgttgcaaaatcatgggcagatgtagtaaaacttggtgcaaaacaaacacaaactaaagtcataaaacatggtcctcaaaggtcaatgaacaaaaggcaaagaagacctgctactccaaagaagcctgtgggcgaagttcacagtcaatttagtacaggccacgcaaactctccttgtaccataataatagggaaagctcatactgaaaaagtacatgtgcctgctcgaccctacagagtgctcaacaacttcatttccaaccaaaaaatggactttaaggaagatctttcaggaatagctgaaatgttcaagaccccagtgaaggagcaaccgcagttgacaagcacatgtcacatcgctatttcaaattcagagaatttgcttggaaaacagtttcaaggaactgattcaggagaagaacctctgctccccacctcagagagttttggaggaaatgtgttcttcagtgcacagaatgcagcaaaacagccatctgataaatgctctgcaagccctcccttaagacggcagtgtattagagaaaatggaaacgtagcaaaaacgcccaggaacacctacaaaatgacttctctggagacaaaaacttcagatactgagacagagccttcaaaaacagtatccactgcaaacaggtcaggaaggtctacagagttcaggaatatacagaagctacctgtggaaagtaagagtgaagaaacaaatacagaaattgttgagtgcatcctaaaaagaggtcagaaggcaacactactacaacaaaggagagaaggagagatgaaggaaatagaaagaccttttgagacatataaggaaaatattgaattaaaagaaaacgatgaaaagatgaaagcaatgaagagatcaagaacttgggggcagaaatgtgcaccaatgtctgacctgacagacctcaagagcttgcctgatacagaactcatgaaagacacggcacgtggccagaatctcctccaaacccaagatcatgccaaggcaccaaagagtgagaaaggcaaaatcactaaaatgccctgccagtcattacaaccagaaccaataaacaccccaacacacacaaaacaacagttgaaggcatccctggggaaagtaggtgtgaaagaagagctcctagcagtcggcaagttcacacggacgtcaggggagaccacgcacacgcacagagagccagcaggagatggcaagagcatcagaacgtttaaggagtctccaaagcagatcctggacccagcagcccgtgtaactggaatgaagaagtggccaagaacgcctaaggaagaggcccagtcactagaagacctggctggcttcaaagagctcttccagacaccaggtccctctgaggaatcaatgactgatgagaaaactaccaaaatagcctgcaaatctccaccaccagaatcagtggacactccaacaagcacaaagcaatggcctaagagaagtctcaggaaagcagatgtagaggaagaattcttagcactcaggaaactaacaccatcagcagggaaagccatgcttacgcccaaaccagcaggaggtgatgagaaagacattaaagcatttatgggaactccagtgcagaaactggacctggcaggaactttacctggcagcaaaagacagctacagactcctaaggaaaaggcccaggctctagaagacctggctggctttaaagagctcttccagactcctggtcacaccgaggaattagtggctgctggtaaaaccactaaaataccctgcgactctccacagtcagacccagtggacaccccaacaagcacaaagcaacgacccaagagaagtatcaggaaagcagatgtagagggagaactcttagcgtgcaggaatctaatgccatcagcaggcaaagccatgcacacgcctaaaccatcagtaggtgaagagaaagacatcatcatatttgtgggaactccagtgcagaaactggacctgacagagaacttaaccggcagcaagagacggccacaaactcctaaggaagaggcccaggctctggaagacctgactggctttaaagagctcttccagacccctggtcatactgaagaagcagtggctgctggcaaaactactaaaatgccctgcgaatcttctccaccagaatcagcagacaccccaacaagcacaagaaggcagcccaagacacctttggagaaaagggacgtacagaaggagctctcagccctgaagaagctcacacagacatcaggggaaaccacacacacagataaagtaccaggaggtgaggataaaagcatcaacgcgtttagggaaactgcaaaacagaaactggacccagcagcaagtgtaactggtagcaagaggcacccaaaaactaaggaaaaggcccaacccctagaagacctggctggcttgaaagagctcttccagacaccagtatgcactgacaagcccacgactcacgagaaaactaccaaaatagcctgcagatcacaaccagacccagtggacacaccaacaagctccaagccacagtccaagagaagtctcaggaaagtggacgtagaagaagaattcttcgcactcaggaaacgaacaccatcagcaggcaaagccatgcacacacccaaaccagcagtaagtggtgagaaaaacatctacgcatttatgggaactccagtgcagaaactggacctgacagagaacttaactggcagcaagagacggctacaaactcctaaggaaaaggcccaggctctagaagacctggctggctttaaagagctcttccagacacgaggtcacactgaggaatcaatgactaacgataaaactgccaaagtagcctgcaaatcttcacaaccagacccagacaaaaacccagcaagctccaagcgacggctcaagacatccctggggaaagtgggcgtgaaagaagagctcctagcagttggcaagctcacacagacatcaggagagactacacacacacacacagagccaacaggagatggtaagagcatgaaagcatttatggagtctccaaagcagatcttagactcagcagcaagtctaactggcagcaagaggcagctgagaactcctaagggaaagtctgaagtccctgaagacctggccggcttcatcgagctcttccagacaccaagtcacactaaggaatcaatgactaacgaaaaaactaccaaagtatcctacagagcttcacagccagacctagtggacaccccaacaagctccaagccacagcccaagagaagtctcaggaaagcagacactgaagaagaatttttagcatttaggaaacaaacgccatcagcaggcaaagccatgcacacacccaaaccagcagtaggtgaagagaaagacatcaacacgtttttgggaactccagtgcagaaactggaccagccaggaaatttacctggcagcaatagacggctacaaactcgtaaggaaaaggcccaggctctagaagaactgactggcttcagagagcttttccagacaccatgcactgataaccccacgactgatgagaaaactaccaaaaaaatactctgcaaatctccgcaatcagacccagcggacaccccaacaaacacaaagcaacggcccaagagaagcctcaagaaagcagacgtagaggaagaatttttagcattcaggaaactaacaccatcagcaggcaaagccatgcacacgcctaaagcagcagtaggtgaagagaaagacatcaacacatttgtggggactccagtggagaaactggacctgctaggaaatttacctggcagcaagagacggccacaaactcctaaagaaaaggccaaggctctagaagatctggctggcttcaaagagctcttccagacaccaggtcacactgaggaatcaatgaccgatgacaaaatcacagaagtatcctgcaaatctccacaaccagacccagtcaaaaccccaacaagctccaagcaacgactcaagatatccttggggaaagtaggtgtgaaagaagaggtcctaccagtcggcaagctcacacagacgtcagggaagaccacacagacacacagagagacagcaggagatggaaagagcatcaaagcgtttaaggaatctgcaaagcagatgctggacccagcaaactatggaactgggatggagaggtggccaagaacacctaaggaagaggcccaatcactagaagacctggccggcttcaaagagctcttccagacaccagaccacactgaggaatcaacaactgatgacaaaactaccaaaatagcctgcaaatctccaccaccagaatcaatggacactccaacaagcacaaggaggcggcccaaaacacctttggggaaaagggatatagtggaagagctctcagccctgaagcagctcacacagaccacacacacagacaaagtaccaggagatgaggataaaggcatcaacgtgttcagggaaactgcaaaacagaaactggacccagcagcaagtgtaactggtagcaagaggcagccaagaactcctaagggaaaagcccaacccctagaagacttggctggcttgaaagagctcttccagacaccaatatgcactgacaagcccacgactcatgagaaaactaccaaaatagcctgcagatctccacaaccagacccagtgggtaccccaacaatcttcaagccacagtccaagagaagtctcaggaaagcagacgtagaggaagaatccttagcactcaggaaacgaacaccatcagtagggaaagctatggacacacccaaaccagcaggaggtgatgagaaagacatgaaagcatttatgggaactccagtgcagaaattggacctgccaggaaatttacctggcagcaaaagatggccacaaactcctaaggaaaaggcccaggctctagaagacctggctggcttcaaagagctcttccagacaccaggcactgacaagcccacgactgatgagaaaactaccaaaatagcctgcaaatctccacaaccagacccagtggacaccccagcaagcacaaagcaacggcccaagagaaacctcaggaaagcagacgtagaggaagaatttttagcactcaggaaacgaacaccatcagcaggcaaagccatggacacaccaaaaccagcagtaagtgatgagaaaaatatcaacacatttgtggaaactccagtgcagaaactggacctgctaggaaatttacctggcagcaagagacagccacagactcctaaggaaaaggctgaggctctagaggacctggttggcttcaaagaactcttccagacaccaggtcacactgaggaatcaatgactgatgacaaaatcacagaagtatcctgtaaatctccacagccagagtcattcaaaacctcaagaagctccaagcaaaggctcaagatacccctggtgaaagtggacatgaaagaagagcccctagcagtcagcaagctcacacggacatcaggggagactacgcaaacacacacagagccaacaggagatagtaagagcatcaaagcgtttaaggagtctccaaagcagatcctggacccagcagcaagtgtaactggtagcaggaggcagctgagaactcgtaaggaaaaggcccgtgctctagaagacctggttgacttcaaagagctcttctcagcaccaggtcacactgaagagtcaatgactattgacaaaaacacaaaaattccctgcaaatctcccccaccagaactaacagacactgccacgagcacaaagagatgccccaagacacgtcccaggaaagaagtaaaagaggagctctcagcagttgagaggctcacgcaaacatcagggcaaagcacacacacacacaaagaaccagcaagcggtgatgagggcatcaaagtattgaagcaacgtgcaaagaagaaaccaaacccagtagaagaggaacccagcaggagaaggccaagagcacctaaggaaaaggcccaacccctggaagacctggccggcttcacagagctctctgaaacatcaggtcacactcaggaatcactgactgctggcaaagccactaaaataccctgcgaatctcccccactagaagtggtagacaccacagcaagcacaaagaggcatctcaggacacgtgtgcagaaggtacaagtaaaagaagagccttcagcagtcaagttcacacaaacatcaggggaaaccacggatgcagacaaagaaccagcaggtgaagataaaggcatcaaagcattgaaggaatctgcaaaacagacaccggctccagcagcaagtgtaactggcagcaggagacggccaagagcacccagggaaagtgcccaagccatagaagacctagctggcttcaaagacccagcagcaggtcacactgaagaatcaatgactgatgacaaaaccactaaaataccctgcaaatcatcaccagaactagaagacaccgcaacaagctcaaagagacggcccaggacacgtgcccagaaagtagaagtgaaggaggagctgttagcagttggcaagctcacacaaacctcaggggagaccacgcacaccgacaaagagccggtaggtgagggcaaaggcacgaaagcatttaagcaacctgcaaagcggaagctggacgcagaagatgtaattggcagcaggagacagccaagagcacctaaggaaaaggcccaacccctggaagatctggccagcttccaagagctctctcaaacaccaggccacactgaggaactggcaaatggtgctgctgatagctttacaagcgctccaaagcaaacacctgacagtggaaaacctctaaaaatatccagaagagttcttcgggcccctaaagtagaacccgtgggagacgtggtaagcaccagagaccctgtaaaatcacaaagcaaaagcaacacttccctgcccccactgcccttcaagaggggaggtggcaaagatggaagcgtcacgggaaccaagaggctgcgctgcatgccagcaccagaggaaattgtggaggagctgccagccagcaagaagcagagggttgctcccagggcaagaggcaaatcatccgaacccgtggtcatcatgaagagaagtttgaggacttctgcaaaaagaattgaacctgcggaagagctgaacagcaacgacatgaaaaccaacaaagaggaacacaaattacaagactcggtccctgaaaataagggaatatccctgcgctccagacgccaaaataagactgaggcagaacagcaaataactgaggtctttgtattagcagaaagaatagaaataaacagaaatgaaaagaagcccatgaagacctccccagagatggacattcagaatccagatgatggagcccggaaacccatacctagagacaaagtcactgagaacaaaaggtgcttgaggtctgctagacagaatgagagctcccagcctaaggtggcagaggagagcggagggcagaagagtgcgaaggttctcatgcagaatcagaaagggaaaggagaagcaggaaattcagactccatgtgcctgagatcaagaaagacaaaaagccagcctgcagcaagcactttggagagcaaatctgtgcagagagtaacgcggagtgtcaagaggtgtgcagaaaatccaaagaaggctgaggacaatgtgtgtgtcaagaaaataagaaccagaagtcatagggacagtgaagatatttgacagaaaaatcgaactgggaaaaatataataaagttagttttgtgataagttctagtgcagtttttgtcataaattacaagtgaattctgtaagtaaggctgtcagtctgcttaagggaagaaaactttggatttgctgggtctgaatcggcttcataaactccactgggagcactgctgggctcctggactgagaatagttgaacaccgggggctttgtgaaggagtctgggccaaggtttgccctcagctttgcagaatgaagccttgaggtctgtcaccacccacagccaccctacagcagccttaactgtgacacttgccacactgtgtcgtcgtttgtttgcctatgtcctccagggcacggtggcaggaacaactatcctcgtctgtcccaacactgagcaggcactcggtaaacacgaatgaatggatgagcgcacggatgaatggagcttacaagatctgtctttccaatggccgggggcatttggtccccaaattaaggctattggacatctgcacaggacagtcctatttttgatgtcctttcctttctgaaaataaagttttgtgctttggagaatgactcgtgagcacatctttagggaccaagagtgactttctgtaaggagtgactcgtggcttgccttggtctcttgggaatacttttctaactagggttgctctcacctgagacattctccacccgcggaatctcagggtcccaggctgtgggccatcacgacctcaaactggctcctaatctccagctttcctgtcattgaaagcttcggaagtttactggctctgctcccgcctgttttctttctgactctatctggcagcccgatgccacccagtacaggaagtgacaccagtactctgtaaagcatcatcatccttggagagactgagcactcagcaccttcagccacgatttcaggatcgcttccttgtgagccgctgcctccgaaatctcctttgaagcccagacatctttctccagcttcagacttgtagatataactcgttcatcttcatttactttccactttgccccctgtcctctctgtgttccccaaatcagagaatagcccgccatcccccaggtcacctgtctggattcctccccattcacccaccttgccaggtgcaggtgaggatggtgcaccagacagggtagctgtcccccaaaatgtgccctgtgcgggcagtgccctgtctccacgtttgtttccccagtgtctggcggggagccaggtgacatcataaatacttgctgaatgaatgcagaaatcagcggtactgacttgtactatattggctgccatgatagggttctcacagcgtcatccatgatcgtaagggagaatgacattctgcttgagggagggaatagaaaggggcagggaggggacatctgagggcttcacagggctgcaaagggtacagggattgcaccagggcagaacaggggagggtgttcaaggaagagtggctcttagcagaggcactttggaaggtgtgaggcataaatgcttccttctacgtaggccaacctcaaaactttcagtaggaatgttgctatgatcaagttgttctaacactttagacttagtagtaattatgaacctcacatagaaaaatttcatccagccatatgcctgtggagtggaatattctgtttagtagaaaaatcctttagagttcagctctaaccagaaatcttgctgaagtatgtcagcaccttttctcaccctggtaagtacagtatttcaagagcacgctaagggtggttttcattttacagggctgttgatgatgggttaaaaatgttcatttaagggctacccccgtgtttaatagatgaacaccacttctacacaaccctccttggtactgggggagggagagatctgacaaatactgcccattcccctaggctgactggatttgagaacaaatacccacccatttccaccatggtatggtaacttctctgagcttcagtttccaagtgaatttccatgtaataggacattcccattaaatacaagctgtttttactttttcgcctcccagggcctgtgggatctggtcccccagcctctcttgggctttcttacactaactctgtacctaccatctcctgcctcccttaggcaggcacctccaaccaccacacactccctgctgttttccctgcctggaactttccctcctgccccaccaagatcatttcatccagtcctgagctcagcttaagggaggcttcttgcctgtgggttccctcacccccatgcctgtcctccaggctggggcaggttcttagtttgcctggaattgttctgtacctctttgtagcacgtagtgttgtggaaactaagccactaattgagtttctggctcccctcctggggttgtaagttttgttcattcatgagggccgactgcatttcctggttactctatcccagtgaccagccacaggagatgtccaataaagtatgtgatgaaatggtctt

SEQ ID NO: 307 - DNA, 11417 bp, Homo sapiens
  source 1..11417: mol_type = genomic DNA
taccgggcggaggtgagcgcggcgccggctcctcctgcggcggactttgggtgcgacttgacgagcggtggttcgacaagtggccttgcgggccggatcgtcccagtggaagagttgtaaatttgcttctggccttcccctacggattatacctggccttcccctacggattatactcaacttactgtttagaaaatgtggcccacgagacgcctggttactatcaaaaggagcggggtcgacggtccccactttcccctgagcctcagcacctgcttgtttggaaggggtattgaatgtgacatccgtatccagcttcctgttgtgtcaaaacaacattgcaaaattgaaatccatgagcaggaggcaatattacataatttcagttccacaaatccaacacaagtaaatgggtctgttattgatgagcctgtacggctaaaacatggagatgtaataactattattgatcgttccttcaggtatgaaaatgaaagtcttcagaatggaaggaagtcaactgaatttccaagaaaaatacgtgaacaggagccagcacgtcgtgtctcaagatctagcttctcttctgaccctgatgagagtgagggaatacctttgaaaagaaggcgtgtgtcctttggtgggcacctaagacctgaactatttgatgaaaacttgcctcctaatacgcctctcaaaaggggagaagccccaaccaaaagaaagtctctggtaatgcacactccacctgtcctgaagaaaatcatcaaggaacagcctcaaccatcaggaaaacaagagtcaggttcagaaatccatgtggaagtgaaggcacaaagcttggttataagccctccagctcctagtcctaggaaaactccagttgccagtgatcaacgccgtaggtcctgcaaaacagcccctgcttccagcagcaaatctcagacagaggttcctaagagaggagggagaaagagtggcaacctgccttcaaagagagtgtctatcagccgaagtcaacatgatattttacagatgatatgttccaaaagaagaagtggtgcttcggaagcaaatctgattgttgcaaaatcatgggcagatgtagtaaaacttggtgcaaaacaaacacaaactaaagtcataaaacatggtcctcaaaggtcaatgaacaaaaggcaaagaagacctgctactccaaagaagcctgtgggcgaagttcacagtcaatttagtacaggccacgcaaactctccttgtaccataataatagggaaagctcatactgaaaaagtacatgtgcctgctcgaccctacagagtgctcaacaacttcatttccaaccaaaaaatggactttaaggaagatctttcaggaatagctgaaatgttcaagaccccagtgaaggagcaaccgcagttgacaagcacatgtcacatcgctatttcaaattcagagaatttgcttggaaaacagtttcaaggaactgattcaggagaagaacctctgctccccacctcagagagttttggaggaaatgtgttcttcagtgcacagaatgcagcaaaacagccatctgataaatgctctgcaagccctcccttaagacggcagtgtattagagaaaatggaaacgtagcaaaaacgcccaggaacacctacaaaatgacttctctggagacaaaaacttcagatactgagacagagccttcaaaaacagtatccactgcaaacaggtcaggaaggtctacagagttcaggaatatacagaagctacctgtggaaagtaagagtgaagaaacaaatacagaaattgttgagtgcatcctaaaaagaggtcagaaggcaacactactacaacaaaggagagaaggagagatgaaggaaatagaaagaccttttgagacatataaggaaaatattgaattaaaagaaaacgatgaaaagatgaaagcaatgaagagatcaagaacttgggggcagaaatgtgcaccaatgtctgacctgacagacctcaagagcttgcctgatacagaactcatgaaagacacggcacgtggccagaatctcctccaaacccaagatcatgccaaggcaccaaagagtgagaaaggcaaaatcactaaaatgccctgccagtcattacaaccagaaccaataaacaccccaacacacacaaaacaacagttgaaggcatccctggggaaagtaggtgtgaaagaagagctcctagcagtcggcaagttcacacggacgtcaggggagaccacgcacacgcacagagagccagcaggagatggcaagagcatcagaacgtttaaggagtctccaaagcagatcctggacccagcagcccgtgtaactggaatgaagaagtggccaagaacgcctaaggaagaggcccagtcactagaagacctggctggcttcaaagagctcttccagacaccaggtccctctgaggaatcaatgactgatgagaaaactaccaaaatagcctgcaaatctccaccaccagaatcagtggacactccaacaagcacaaagcaatggcctaagagaagtctcaggaaagcagatgtagaggaagaattcttagcactcaggaaactaacaccatcagcagggaaagccatgcttacgcccaaaccagcaggaggtgatgagaaagacattaaagcatttatgggaactccagtgcagaaactggacctggcaggaactttacctggcagcaaaagacagctacagactcctaaggaaaaggcccaggctctagaagacctggctggctttaaagagctcttccagactcctggtcacaccgaggaattagtggctgctggtaaaaccactaaaataccctgcgactctccacagtcagacccagtggacaccccaacaagcacaaagcaacgacccaagagaagtatcaggaaagcagatgtagagggagaactcttagcgtgcaggaatctaatgccatcagcaggcaaagccatgcacacgcctaaaccatcagtaggtgaagagaaagacatcatcatatttgtgggaactccagtgcagaaactggacctgacagagaacttaaccggcagcaagagacggccacaaactcctaaggaagaggcccaggctctggaagacctgactggctttaaagagctcttccagacccctggtcatactgaagaagcagtggctgctggcaaaactactaaaatgccctgcgaatcttctccaccagaatcagcagacaccccaacaagcacaagaaggcagcccaagacacctttggagaaaagggacgtacagaaggagctctcagccctgaagaagctcacacagacatcaggggaaaccacacacacagataaagtaccaggaggtgaggataaaagcatcaacgcgtttagggaaactgcaaaacagaaactggacccagcagcaagtgtaactggtagcaagaggcacccaaaaactaaggaaaaggcccaacccctagaagacctggctggcttgaaagagctcttccagacaccagtatgcactgacaagcccacgactcacgagaaaactaccaaaatagcctgcagatcacaaccagacccagtggacacaccaacaagctccaagccacagtccaagagaagtctcaggaaagtggacgtagaagaagaattcttcgcactcaggaaacgaacaccatcagcaggcaaagccatgcacacacccaaaccagcagtaagtggtgagaaaaacatctacgcatttatgggaactccagtgcagaaactggacctgacagagaacttaactggcagcaagagacggctacaaactcctaaggaaaaggcccaggctctagaagacctggctggctttaaagagctcttccagacacgaggtcacactgaggaatcaatgactaacgataaaactgccaaagtagcctgcaaatcttcacaaccagacccagacaaaaacccagcaagctccaagcgacggctcaagacatccctggggaaagtgggcgtgaaagaagagctcctagcagttggcaagctcacacagacatcaggagagactacacacacacacacagagccaacaggagatggtaagagcatgaaagcatttatggagtctccaaagcagatcttagactcagcagcaagtctaactggcagcaagaggcagctgagaactcctaagggaaagtctgaagtccctgaagacctggccggcttcatcgagctcttccagacaccaagtcacactaaggaatcaatgactaacgaaaaaactaccaaagtatcctacagagcttcacagccagacctagtggacaccccaacaagctccaagccacagcccaagagaagtctcaggaaagcagacactgaagaagaatttttagcatttaggaaacaaacgccatcagcaggcaaagccatgcacacacccaaaccagcagtaggtgaagagaaagacatcaacacgtttttgggaactccagtgcagaaactggaccagccaggaaatttacctggcagcaatagacggctacaaactcgtaaggaaaaggcccaggctctagaagaactgactggcttcagagagcttttccagacaccatgcactgataaccccacgactgatgagaaaactaccaaaaaaatactctgcaaatctccgcaatcagacccagcggacaccccaacaaacacaaagcaacggcccaagagaagcctcaagaaagcagacgtagaggaagaatttttagcattcaggaaactaacaccatcagcaggcaaagccatgcacacgcctaaagcagcagtaggtgaagagaaagacatcaacacatttgtggggactccagtggagaaactggacctgctaggaaatttacctggcagcaagagacggccacaaactcctaaagaaaaggccaaggctctagaagatctggctggcttcaaagagctcttccagacaccaggtcacactgaggaatcaatgaccgatgacaaaatcacagaagtatcctgcaaatctccacaaccagacccagtcaaaaccccaacaagctccaagcaacgactcaagatatccttggggaaagtaggtgtgaaagaagaggtcctaccagtcggcaagctcacacagacgtcagggaagaccacacagacacacagagagacagcaggagatggaaagagcatcaaagcgtttaaggaatctgcaaagcagatgctggacccagcaaactatggaactgggatggagaggtggccaagaacacctaaggaagaggcccaatcactagaagacctggccggcttcaaagagctcttccagacaccagaccacactgaggaatcaacaactgatgacaaaactaccaaaatagcctgcaaatctccaccaccagaatcaatggacactccaacaagcacaaggaggcggcccaaaacacctttggggaaaagggatatagtggaagagctctcagccctgaagcagctcacacagaccacacacacagacaaagtaccaggagatgaggataaaggcatcaacgtgttcagggaaactgcaaaacagaaactggacccagcagcaagtgtaactggtagcaagaggcagccaagaactcctaagggaaaagcccaacccctagaagacttggctggcttgaaagagctcttccagacaccaatatgcactgacaagcccacgactcatgagaaaactaccaaaatagcctgcagatctccacaaccagacccagtgggtaccccaacaatcttcaagccacagtccaagagaagtctcaggaaagcagacgtagaggaagaatccttagcactcaggaaacgaacaccatcagtagggaaagctatggacacacccaaaccagcaggaggtgatgagaaagacatgaaagcatttatgggaactccagtgcagaaattggacctgccaggaaatttacctggcagcaaaagatggccacaaactcctaaggaaaaggcccaggctctagaagacctggctggcttcaaagagctcttccagacaccaggcactgacaagcccacgactgatgagaaaactaccaaaatagcctgcaaatctccacaaccagacccagtggacaccccagcaagcacaaagcaacggcccaagagaaacctcaggaaagcagacgtagaggaagaatttttagcactcaggaaacgaacaccatcagcaggcaaagccatggacacaccaaaaccagcagtaagtgatgagaaaaatatcaacacatttgtggaaactccagtgcagaaactggacctgctaggaaatttacctggcagcaagagacagccacagactcctaaggaaaaggctgaggctctagaggacctggttggcttcaaagaactcttccagacaccaggtcacactgaggaatcaatgactgatgacaaaatcacagaagtatcctgtaaatctccacagccagagtcattcaaaacctcaagaagctccaagcaaaggctcaagatacccctggtgaaagtggacatgaaagaagagcccctagcagtcagcaagctcacacggacatcaggggagactacgcaaacacacacagagccaacaggagatagtaagagcatcaaagcgtttaaggagtctccaaagcagatcctggacccagcagcaagtgtaactggtagcaggaggcagctgagaactcgtaaggaaaaggcccgtgctctagaagacctggttgacttcaaagagctcttctcagcaccaggtcacactgaagagtcaatgactattgacaaaaacacaaaaattccctgcaaatctcccccaccagaactaacagacactgccacgagcacaaagagatgccccaagacacgtcccaggaaagaagtaaaagaggagctctcagcagttgagaggctcacgcaaacatcagggcaaagcacacacacacacaaagaaccagcaagcggtgatgagggcatcaaagtattgaagcaacgtgcaaagaagaaaccaaacccagtagaagaggaacccagcaggagaaggccaagagcacctaaggaaaaggcccaacccctggaagacctggccggcttcacagagctctctgaaacatcaggtcacactcaggaatcactgactgctggcaaagccactaaaataccctgcgaatctcccccactagaagtggtagacaccacagcaagcacaaagaggcatctcaggacacgtgtgcagaaggtacaagtaaaagaagagccttcagcagtcaagttcacacaaacatcaggggaaaccacggatgcagacaaagaaccagcaggtgaagataaaggcatcaaagcattgaaggaatctgcaaaacagacaccggctccagcagcaagtgtaactggcagcaggagacggccaagagcacccagggaaagtgcccaagccatagaagacctagctggcttcaaagacccagcagcaggtcacactgaagaatcaatgactgatgacaaaaccactaaaataccctgcaaatcatcaccagaactagaagacaccgcaacaagctcaaagagacggcccaggacacgtgcccagaaagtagaagtgaaggaggagctgttagcagttggcaagctcacacaaacctcaggggagaccacgcacaccgacaaagagccggtaggtgagggcaaaggcacgaaagcatttaagcaacctgcaaagcggaagctggacgcagaagatgtaattggcagcaggagacagccaagagcacctaaggaaaaggcccaacccctggaagatctggccagcttccaagagctctctcaaacaccaggccacactgaggaactggcaaatggtgctgctgatagctttacaagcgctccaaagcaaacacctgacagtggaaaacctctaaaaatatccagaagagttcttcgggcccctaaagtagaacccgtgggagacgtggtaagcaccagagaccctgtaaaatcacaaagcaaaagcaacacttccctgcccccactgcccttcaagaggggaggtggcaaagatggaagcgtcacgggaaccaagaggctgcgctgcatgccagcaccagaggaaattgtggaggagctgccagccagcaagaagcagagggttgctcccagggcaagaggcaaatcatccgaacccgtggtcatcatgaagagaagtttgaggacttctgcaaaaagaattgaacctgcggaagagctgaacagcaacgacatgaaaaccaacaaagaggaacacaaattacaagactcggtccctgaaaataagggaatatccctgcgctccagacgccaaaataagactgaggcagaacagcaaataactgaggtctttgtattagcagaaagaatagaaataaacagaaatgaaaagaagcccatgaagacctccccagagatggacattcagaatccagatgatggagcccggaaacccatacctagagacaaagtcactgagaacaaaaggtgcttgaggtctgctagacagaatgagagctcccagcctaaggtggcagaggagagcggagggcagaagagtgcgaaggttctcatgcagaatcagaaagggaaaggagaagcaggaaattcagactccatgtgcctgagatcaagaaagacaaaaagccagcctgcagcaagcactttggagagcaaatctgtgcagagagtaacgcggagtgtcaagaggtgtgcagaaaatccaaagaaggctgaggacaatgtgtgtgtcaagaaaataagaaccagaagtcatagggacagtgaagatatttgacagaaaaatcgaactgggaaaaatataataaagttagttttgtgataagttctagtgcagtttttgtcataaattacaagtgaattctgtaagtaaggctgtcagtctgcttaagggaagaaaactttggatttgctgggtctgaatcggcttcataaactccactgggagcactgctgggctcctggactgagaatagttgaacaccgggggctttgtgaaggagtctgggccaaggtttgccctcagctttgcagaatgaagccttgaggtctgtcaccacccacagccaccctacagcagccttaactgtgacacttgccacactgtgtcgtcgtttgtttgcctatgtcctccagggcacggtggcaggaacaactatcctcgtctgtcccaacactgagcaggcactcggtaaacacgaatgaatggatgagcgcacggatgaatggagcttacaagatctgtctttccaatggccgggggcatttggtccccaaattaaggctattggacatctgcacaggacagtcctatttttgatgtcctttcctttctgaaaataaagttttgtgctttggagaatgactcgtgagcacatctttagggaccaagagtgactttctgtaaggagtgactcgtggcttgccttggtctcttgggaatacttttctaactagggttgctctcacctgagacattctccacccgcggaatctcagggtcccaggctgtgggccatcacgacctcaaactggctcctaatctccagctttcctgtcattgaaagcttcggaagtttactggctctgctcccgcctgttttctttctgactctatctggcagcccgatgccacccagtacaggaagtgacaccagtactctgtaaagcatcatcatccttggagagactgagcactcagcaccttcagccacgatttcaggatcgcttccttgtgagccgctgcctccgaaatctcctttgaagcccagacatctttctccagcttcagacttgtagatataactcgttcatcttcatttactttccactttgccccctgtcctctctgtgttccccaaatcagagaatagcccgccatcccccaggtcacctgtctggattcctccccattcacccaccttgccaggtgcaggtgaggatggtgcaccagacagggtagctgtcccccaaaatgtgccctgtgcgggcagtgccctgtctccacgtttgtttccccagtgtctggcggggagccaggtgacatcataaatacttgctgaatgaatgcagaaatcagcggtactgacttgtactatattggctgccatgatagggttctcacagcgtcatccatgatcgtaagggagaatgacattctgcttgagggagggaatagaaaggggcagggaggggacatctgagggcttcacagggctgcaaagggtacagggattgcaccagggcagaacaggggagggtgttcaaggaagagtggctcttagcagaggcactttggaaggtgtgaggcataaatgcttccttctacgtaggccaacctcaaaactttcagtaggaatgttgctatgatcaagttgttctaacactttagacttagtagtaattatgaacctcacatagaaaaatttcatccagccatatgcctgtggagtggaatattctgtttagtagaaaaatcctttagagttcagctctaaccagaaatcttgctgaagtatgtcagcaccttttctcaccctggtaagtacagtatttcaagagcacgctaagggtggttttcattttacagggctgttgatgatgggttaaaaatgttcatttaagggctacccccgtgtttaatagatgaacaccacttctacacaaccctccttggtactgggggagggagagatctgacaaatactgcccattcccctaggctgactggatttgagaacaaatacccacccatttccaccatggtatggtaacttctctgagcttcagtttccaagtgaatttccatgtaataggacattcccattaaatacaagctgtttttactttttcgcctcccagggcctgtgggatctggtcccccagcctctcttgggctttcttacactaactctgtacctaccatctcctgcctcccttaggcaggcacctccaaccaccacacactccctgctgttttccctgcctggaactttccctcctgccccaccaagatcatttcatccagtcctgagctcagcttaagggaggcttcttgcctgtgggttccctcacccccatgcctgtcctccaggctggggcaggttcttagtttgcctggaattgttctgtacctctttgtagcacgtagtgttgtggaaactaagccactaattgagtttctggctcccctcctggggttgtaagttttgttcattcatgagggccgactgcatttcctggttactctatcccagtgaccagccacaggagatgtccaataaagtatgtgatgaaatggtcttaaaa

SEQ ID NO: 308 - DNA, 12678 bp, Homo sapiens
  source 1..12678: mol_type = genomic DNA
gggcgggaggactcgactcggtgggagccgctagagccgggcgcccggggacgtagcctgtagggccaccgggtccccgtcagaggcggcggcgggagcagcggggactgcaggccggggtgcagcgaacgcgaccccgcgggctgcggcccggtgtgtgcggagcgtggcgggcgcagcttaccgggcggaggtgagcgcggcgccggctcctcctgcggcggactttgggtgcgacttgacgagcggtggttcgacaagtggccttgcgggccggatcgtcccagtggaagagttgtaaatttgcttctggccttcccctacggattatacctggccttcccctacggattatactcaacttactgtttagaaaatgtggcccacgagacgcctggttactatcaaaaggagcggggtcgacggtccccactttcccctgagcctcagcacctgcttgtttggaaggggtattgaatgtgacatccgtatccagcttcctgttgtgtcaaaacaacattgcaaaattgaaatccatgagcaggaggcaatattacataatttcagttccacaaatccaacacaagtaaatgggtctgttattgatgagcctgtacggctaaaacatggagatgtaataactattattgatcgttccttcaggtatgaaaatgaaagtcttcagaatggaaggaagtcaactgaatttccaagaaaaatacgtgaacaggagccagcacgtcgtgtctcaagatctagcttctcttctgaccctgatgagaaagctcaagattccaaggcctattcaaaaatcactgaaggaaaagtttcaggaaatcctcaggtacatatcaagaatgtcaaagaagacagtaccgcagatgactcaaaagacagtgttgctcagggaacaactaatgttcattcctcagaacatgctggacgtaatggcagaaatgcagctgatcccatttctggggattttaaagaaatttccagcgttaaattagtgagccgttatggagaattgaagtctgttcccactacacaatgtcttgacaatagcaaaaaaaatgaatctcccttttggaagctttatgagtcagtgaagaaagagttggatgtaaaatcacaaaaagaaaatgtcctacagtattgtagaaaatctggattacaaactgattacgcaacagagaaagaaagtgctgatggtttacagggggagacccaactgttggtctcgcgtaagtcaagaccaaaatctggtgggagcggccacgctgtggcagagcctgcttcacctgaacaagagcttgaccagaacaaggggaagggaagagacgtggagtctgttcagactcccagcaaggctgtgggcgccagctttcctctctatgagccggctaaaatgaagacccctgtacaatattcacagcaacaaaattctccacaaaaacataagaacaaagacctgtatactactggtagaagagaatctgtgaatctgggtaaaagtgaaggcttcaaggctggtgataaaactcttactcccaggaagctttcaactagaaatcgaacaccagctaaagttgaagatgcagctgactctgccactaagccagaaaatctctcttccaaaaccagaggaagtattcctacagatgtggaagttctgcctacggaaactgaaattcacaatgagccatttttaactctgtggctcactcaagttgagaggaagatccaaaaggattccctcagcaagcctgagaaattgggcactacagctggacagatgtgctctgggttacctggtcttagttcagttgatatcaacaactttggtgattccattaatgagagtgagggaatacctttgaaaagaaggcgtgtgtcctttggtgggcacctaagacctgaactatttgatgaaaacttgcctcctaatacgcctctcaaaaggggagaagccccaaccaaaagaaagtctctggtaatgcacactccacctgtcctgaagaaaatcatcaaggaacagcctcaaccatcaggaaaacaagagtcaggttcagaaatccatgtggaagtgaaggcacaaagcttggttataagccctccagctcctagtcctaggaaaactccagttgccagtgatcaacgccgtaggtcctgcaaaacagcccctgcttccagcagcaaatctcagacagaggttcctaagagaggagggagaaagagtggcaacctgccttcaaagagagtgtctatcagccgaagtcaacatgatattttacagatgatatgttccaaaagaagaagtggtgcttcggaagcaaatctgattgttgcaaaatcatgggcagatgtagtaaaacttggtgcaaaacaaacacaaactaaagtcataaaacatggtcctcaaaggtcaatgaacaaaaggcaaagaagacctgctactccaaagaagcctgtgggcgaagttcacagtcaatttagtacaggccacgcaaactctccttgtaccataataatagggaaagctcatactgaaaaagtacatgtgcctgctcgaccctacagagtgctcaacaacttcatttccaaccaaaaaatggactttaaggaagatctttcaggaatagctgaaatgttcaagaccccagtgaaggagcaaccgcagttgacaagcacatgtcacatcgctatttcaaattcagagaatttgcttggaaaacagtttcaaggaactgattcaggagaagaacctctgctccccacctcagagagttttggaggaaatgtgttcttcagtgcacagaatgcagcaaaacagccatctgataaatgctctgcaagccctcccttaagacggcagtgtattagagaaaatggaaacgtagcaaaaacgcccaggaacacctacaaaatgacttctctggagacaaaaacttcagatactgagacagagccttcaaaaacagtatccactgcaaacaggtcaggaaggtctacagagttcaggaatatacagaagctacctgtggaaagtaagagtgaagaaacaaatacagaaattgttgagtgcatcctaaaaagaggtcagaaggcaacactactacaacaaaggagagaaggagagatgaaggaaatagaaagaccttttgagacatataaggaaaatattgaattaaaagaaaacgatgaaaagatgaaagcaatgaagagatcaagaacttgggggcagaaatgtgcaccaatgtctgacctgacagacctcaagagcttgcctgatacagaactcatgaaagacacggcacgtggccagaatctcctccaaacccaagatcatgccaaggcaccaaagagtgagaaaggcaaaatcactaaaatgccctgccagtcattacaaccagaaccaataaacaccccaacacacacaaaacaacagttgaaggcatccctggggaaagtaggtgtgaaagaagagctcctagcagtcggcaagttcacacggacgtcaggggagaccacgcacacgcacagagagccagcaggagatggcaagagcatcagaacgtttaaggagtctccaaagcagatcctggacccagcagcccgtgtaactggaatgaagaagtggccaagaacgcctaaggaagaggcccagtcactagaagacctggctggcttcaaagagctcttccagacaccaggtccctctgaggaatcaatgactgatgagaaaactaccaaaatagcctgcaaatctccaccaccagaatcagtggacactccaacaagcacaaagcaatggcctaagagaagtctcaggaaagcagatgtagaggaagaattcttagcactcaggaaactaacaccatcagcagggaaagccatgcttacgcccaaaccagcaggaggtgatgagaaagacattaaagcatttatgggaactccagtgcagaaactggacctggcaggaactttacctggcagcaaaagacagctacagactcctaaggaaaaggcccaggctctagaagacctggctggctttaaagagctcttccagactcctggtcacaccgaggaattagtggctgctggtaaaaccactaaaataccctgcgactctccacagtcagacccagtggacaccccaacaagcacaaagcaacgacccaagagaagtatcaggaaagcagatgtagagggagaactcttagcgtgcaggaatctaatgccatcagcaggcaaagccatgcacacgcctaaaccatcagtaggtgaagagaaagacatcatcatatttgtgggaactccagtgcagaaactggacctgacagagaacttaaccggcagcaagagacggccacaaactcctaaggaagaggcccaggctctggaagacctgactggctttaaagagctcttccagacccctggtcatactgaagaagcagtggctgctggcaaaactactaaaatgccctgcgaatcttctccaccagaatcagcagacaccccaacaagcacaagaaggcagcccaagacacctttggagaaaagggacgtacagaaggagctctcagccctgaagaagctcacacagacatcaggggaaaccacacacacagataaagtaccaggaggtgaggataaaagcatcaacgcgtttagggaaactgcaaaacagaaactggacccagcagcaagtgtaactggtagcaagaggcacccaaaaactaaggaaaaggcccaacccctagaagacctggctggcttgaaagagctcttccagacaccagtatgcactgacaagcccacgactcacgagaaaactaccaaaatagcctgcagatcacaaccagacccagtggacacaccaacaagctccaagccacagtccaagagaagtctcaggaaagtggacgtagaagaagaattcttcgcactcaggaaacgaacaccatcagcaggcaaagccatgcacacacccaaaccagcagtaagtggtgagaaaaacatctacgcatttatgggaactccagtgcagaaactggacctgacagagaacttaactggcagcaagagacggctacaaactcctaaggaaaaggcccaggctctagaagacctggctggctttaaagagctcttccagacacgaggtcacactgaggaatcaatgactaacgataaaactgccaaagtagcctgcaaatcttcacaaccagacccagacaaaaacccagcaagctccaagcgacggctcaagacatccctggggaaagtgggcgtgaaagaagagctcctagcagttggcaagctcacacagacatcaggagagactacacacacacacacagagccaacaggagatggtaagagcatgaaagcatttatggagtctccaaagcagatcttagactcagcagcaagtctaactggcagcaagaggcagctgagaactcctaagggaaagtctgaagtccctgaagacctggccggcttcatcgagctcttccagacaccaagtcacactaaggaatcaatgactaacgaaaaaactaccaaagtatcctacagagcttcacagccagacctagtggacaccccaacaagctccaagccacagcccaagagaagtctcaggaaagcagacactgaagaagaatttttagcatttaggaaacaaacgccatcagcaggcaaagccatgcacacacccaaaccagcagtaggtgaagagaaagacatcaacacgtttttgggaactccagtgcagaaactggaccagccaggaaatttacctggcagcaatagacggctacaaactcgtaaggaaaaggcccaggctctagaagaactgactggcttcagagagcttttccagacaccatgcactgataaccccacgactgatgagaaaactaccaaaaaaatactctgcaaatctccgcaatcagacccagcggacaccccaacaaacacaaagcaacggcccaagagaagcctcaagaaagcagacgtagaggaagaatttttagcattcaggaaactaacaccatcagcaggcaaagccatgcacacgcctaaagcagcagtaggtgaagagaaagacatcaacacatttgtggggactccagtggagaaactggacctgctaggaaatttacctggcagcaagagacggccacaaactcctaaagaaaaggccaaggctctagaagatctggctggcttcaaagagctcttccagacaccaggtcacactgaggaatcaatgaccgatgacaaaatcacagaagtatcctgcaaatctccacaaccagacccagtcaaaaccccaacaagctccaagcaacgactcaagatatccttggggaaagtaggtgtgaaagaagaggtcctaccagtcggcaagctcacacagacgtcagggaagaccacacagacacacagagagacagcaggagatggaaagagcatcaaagcgtttaaggaatctgcaaagcagatgctggacccagcaaactatggaactgggatggagaggtggccaagaacacctaaggaagaggcccaatcactagaagacctggccggcttcaaagagctcttccagacaccagaccacactgaggaatcaacaactgatgacaaaactaccaaaatagcctgcaaatctccaccaccagaatcaatggacactccaacaagcacaaggaggcggcccaaaacacctttggggaaaagggatatagtggaagagctctcagccctgaagcagctcacacagaccacacacacagacaaagtaccaggagatgaggataaaggcatcaacgtgttcagggaaactgcaaaacagaaactggacccagcagcaagtgtaactggtagcaagaggcagccaagaactcctaagggaaaagcccaacccctagaagacttggctggcttgaaagagctcttccagacaccaatatgcactgacaagcccacgactcatgagaaaactaccaaaatagcctgcagatctccacaaccagacccagtgggtaccccaacaatcttcaagccacagtccaagagaagtctcaggaaagcagacgtagaggaagaatccttagcactcaggaaacgaacaccatcagtagggaaagctatggacacacccaaaccagcaggaggtgatgagaaagacatgaaagcatttatgggaactccagtgcagaaattggacctgccaggaaatttacctggcagcaaaagatggccacaaactcctaaggaaaaggcccaggctctagaagacctggctggcttcaaagagctcttccagacaccaggcactgacaagcccacgactgatgagaaaactaccaaaatagcctgcaaatctccacaaccagacccagtggacaccccagcaagcacaaagcaacggcccaagagaaacctcaggaaagcagacgtagaggaagaatttttagcactcaggaaacgaacaccatcagcaggcaaagccatggacacaccaaaaccagcagtaagtgatgagaaaaatatcaacacatttgtggaaactccagtgcagaaactggacctgctaggaaatttacctggcagcaagagacagccacagactcctaaggaaaaggctgaggctctagaggacctggttggcttcaaagaactcttccagacaccaggtcacactgaggaatcaatgactgatgacaaaatcacagaagtatcctgtaaatctccacagccagagtcattcaaaacctcaagaagctccaagcaaaggctcaagatacccctggtgaaagtggacatgaaagaagagcccctagcagtcagcaagctcacacggacatcaggggagactacgcaaacacacacagagccaacaggagatagtaagagcatcaaagcgtttaaggagtctccaaagcagatcctggacccagcagcaagtgtaactggtagcaggaggcagctgagaactcgtaaggaaaaggcccgtgctctagaagacctggttgacttcaaagagctcttctcagcaccaggtcacactgaagagtcaatgactattgacaaaaacacaaaaattccctgcaaatctcccccaccagaactaacagacactgccacgagcacaaagagatgccccaagacacgtcccaggaaagaagtaaaagaggagctctcagcagttgagaggctcacgcaaacatcagggcaaagcacacacacacacaaagaaccagcaagcggtgatgagggcatcaaagtattgaagcaacgtgcaaagaagaaaccaaacccagtagaagaggaacccagcaggagaaggccaagagcacctaaggaaaaggcccaacccctggaagacctggccggcttcacagagctctctgaaacatcaggtcacactcaggaatcactgactgctggcaaagccactaaaataccctgcgaatctcccccactagaagtggtagacaccacagcaagcacaaagaggcatctcaggacacgtgtgcagaaggtacaagtaaaagaagagccttcagcagtcaagttcacacaaacatcaggggaaaccacggatgcagacaaagaaccagcaggtgaagataaaggcatcaaagcattgaaggaatctgcaaaacagacaccggctccagcagcaagtgtaactggcagcaggagacggccaagagcacccagggaaagtgcccaagccatagaagacctagctggcttcaaagacccagcagcaggtcacactgaagaatcaatgactgatgacaaaaccactaaaataccctgcaaatcatcaccagaactagaagacaccgcaacaagctcaaagagacggcccaggacacgtgcccagaaagtagaagtgaaggaggagctgttagcagttggcaagctcacacaaacctcaggggagaccacgcacaccgacaaagagccggtaggtgagggcaaaggcacgaaagcatttaagcaacctgcaaagcggaagctggacgcagaagatgtaattggcagcaggagacagccaagagcacctaaggaaaaggcccaacccctggaagatctggccagcttccaagagctctctcaaacaccaggccacactgaggaactggcaaatggtgctgctgatagctttacaagcgctccaaagcaaacacctgacagtggaaaacctctaaaaatatccagaagagttcttcgggcccctaaagtagaacccgtgggagacgtggtaagcaccagagaccctgtaaaatcacaaagcaaaagcaacacttccctgcccccactgcccttcaagaggggaggtggcaaagatggaagcgtcacgggaaccaagaggctgcgctgcatgccagcaccagaggaaattgtggaggagctgccagccagcaagaagcagagggttgctcccagggcaagaggcaaatcatccgaacccgtggtcatcatgaagagaagtttgaggacttctgcaaaaagaattgaacctgcggaagagctgaacagcaacgacatgaaaaccaacaaagaggaacacaaattacaagactcggtccctgaaaataagggaatatccctgcgctccagacgccaaaataagactgaggcagaacagcaaataactgaggtctttgtattagcagaaagaatagaaataaacagaaatgaaaagaagcccatgaagacctccccagagatggacattcagaatccagatgatggagcccggaaacccatacctagagacaaagtcactgagaacaaaaggtgcttgaggtctgctagacagaatgagagctcccagcctaaggtggcagaggagagcggagggcagaagagtgcgaaggttctcatgcagaatcagaaagggaaaggagaagcaggaaattcagactccatgtgcctgagatcaagaaagacaaaaagccagcctgcagcaagcactttggagagcaaatctgtgcagagagtaacgcggagtgtcaagaggtgtgcagaaaatccaaagaaggctgaggacaatgtgtgtgtcaagaaaataagaaccagaagtcatagggacagtgaagatatttgacagaaaaatcgaactgggaaaaatataataaagttagttttgtgataagttctagtgcagtttttgtcataaattacaagtgaattctgtaagtaaggctgtcagtctgcttaagggaagaaaactttggatttgctgggtctgaatcggcttcataaactccactgggagcactgctgggctcctggactgagaatagttgaacaccgggggctttgtgaaggagtctgggccaaggtttgccctcagctttgcagaatgaagccttgaggtctgtcaccacccacagccaccctacagcagccttaactgtgacacttgccacactgtgtcgtcgtttgtttgcctatgtcctccagggcacggtggcaggaacaactatcctcgtctgtcccaacactgagcaggcactcggtaaacacgaatgaatggatgagcgcacggatgaatggagcttacaagatctgtctttccaatggccgggggcatttggtccccaaattaaggctattggacatctgcacaggacagtcctatttttgatgtcctttcctttctgaaaataaagttttgtgctttggagaatgactcgtgagcacatctttagggaccaagagtgactttctgtaaggagtgactcgtggcttgccttggtctcttgggaatacttttctaactagggttgctctcacctgagacattctccacccgcggaatctcagggtcccaggctgtgggccatcacgacctcaaactggctcctaatctccagctttcctgtcattgaaagcttcggaagtttactggctctgctcccgcctgttttctttctgactctatctggcagcccgatgccacccagtacaggaagtgacaccagtactctgtaaagcatcatcatccttggagagactgagcactcagcaccttcagccacgatttcaggatcgcttccttgtgagccgctgcctccgaaatctcctttgaagcccagacatctttctccagcttcagacttgtagatataactcgttcatcttcatttactttccactttgccccctgtcctctctgtgttccccaaatcagagaatagcccgccatcccccaggtcacctgtctggattcctccccattcacccaccttgccaggtgcaggtgaggatggtgcaccagacagggtagctgtcccccaaaatgtgccctgtgcgggcagtgccctgtctccacgtttgtttccccagtgtctggcggggagccaggtgacatcataaatacttgctgaatgaatgcagaaatcagcggtactgacttgtactatattggctgccatgatagggttctcacagcgtcatccatgatcgtaagggagaatgacattctgcttgagggagggaatagaaaggggcagggaggggacatctgagggcttcacagggctgcaaagggtacagggattgcaccagggcagaacaggggagggtgttcaaggaagagtggctcttagcagaggcactttggaaggtgtgaggcataaatgcttccttctacgtaggccaacctcaaaactttcagtaggaatgttgctatgatcaagttgttctaacactttagacttagtagtaattatgaacctcacatagaaaaatttcatccagccatatgcctgtggagtggaatattctgtttagtagaaaaatcctttagagttcagctctaaccagaaatcttgctgaagtatgtcagcaccttttctcaccctggtaagtacagtatttcaagagcacgctaagggtggttttcattttacagggctgttgatgatgggttaaaaatgttcatttaagggctacccccgtgtttaatagatgaacaccacttctacacaaccctccttggtactgggggagggagagatctgacaaatactgcccattcccctaggctgactggatttgagaacaaatacccacccatttccaccatggtatggtaacttctctgagcttcagtttccaagtgaatttccatgtaataggacattcccattaaatacaagctgtttttactttttcgcctcccagggcctgtgggatctggtcccccagcctctcttgggctttcttacactaactctgtacctaccatctcctgcctcccttaggcaggcacctccaaccaccacacactccctgctgttttccctgcctggaactttccctcctgccccaccaagatcatttcatccagtcctgagctcagcttaagggaggcttcttgcctgtgggttccctcacccccatgcctgtcctccaggctggggcaggttcttagtttgcctggaattgttctgtacctctttgtagcacgtagtgttgtggaaactaagccactaattgagtttctggctcccctcctggggttgtaagttttgttcattcatgagggccgactgcatttcctggttactctatcccagtgaccagccacaggagatgtccaataaagtatgtgatgaaatggtcttaaaa

SEQ ID NO: 309 - DNA, 12490 bp, Homo sapiens
  source 1..12490: mol_type = genomic DNA
taccgggcggaggtgagcgcggcgccggctcctcctgcggcggactttgggtgcgacttgacgagcggtggttcgacaagtggccttgcgggccggatcgtcccagtggaagagttgtaaatttgcttctggccttcccctacggattatacctggccttcccctacggattatactcaacttactgtttagaaaatgtggcccacgagacgcctggttactatcaaaaggagcggggtcgacggtccccactttcccctgagcctcagcacctgcttgtttggaaggggtattgaatgtgacatccgtatccagcttcctgttgtgtcaaaacaacattgcaaaattgaaatccatgagcaggaggcaatattacataatttcagttccacaaatccaacacaagtaaatgggtctgttattgatgagcctgtacggctaaaacatggagatgtaataactattattgatcgttccttcaggtatgaaaatgaaagtcttcagaatggaaggaagtcaactgaatttccaagaaaaatacgtgaacaggagccagcacgtcgtgtctcaagatctagcttctcttctgaccctgatgagaaagctcaagattccaaggcctattcaaaaatcactgaaggaaaagtttcaggaaatcctcaggtacatatcaagaatgtcaaagaagacagtaccgcagatgactcaaaagacagtgttgctcagggaacaactaatgttcattcctcagaacatgctggacgtaatggcagaaatgcagctgatcccatttctggggattttaaagaaatttccagcgttaaattagtgagccgttatggagaattgaagtctgttcccactacacaatgtcttgacaatagcaaaaaaaatgaatctcccttttggaagctttatgagtcagtgaagaaagagttggatgtaaaatcacaaaaagaaaatgtcctacagtattgtagaaaatctggattacaaactgattacgcaacagagaaagaaagtgctgatggtttacagggggagacccaactgttggtctcgcgtaagtcaagaccaaaatctggtgggagcggccacgctgtggcagagcctgcttcacctgaacaagagcttgaccagaacaaggggaagggaagagacgtggagtctgttcagactcccagcaaggctgtgggcgccagctttcctctctatgagccggctaaaatgaagacccctgtacaatattcacagcaacaaaattctccacaaaaacataagaacaaagacctgtatactactggtagaagagaatctgtgaatctgggtaaaagtgaaggcttcaaggctggtgataaaactcttactcccaggaagctttcaactagaaatcgaacaccagctaaagttgaagatgcagctgactctgccactaagccagaaaatctctcttccaaaaccagaggaagtattcctacagatgtggaagttctgcctacggaaactgaaattcacaatgagccatttttaactctgtggctcactcaagttgagaggaagatccaaaaggattccctcagcaagcctgagaaattgggcactacagctggacagatgtgctctgggttacctggtcttagttcagttgatatcaacaactttggtgattccattaatgagagtgagggaatacctttgaaaagaaggcgtgtgtcctttggtgggcacctaagacctgaactatttgatgaaaacttgcctcctaatacgcctctcaaaaggggagaagccccaaccaaaagaaagtctctggtaatgcacactccacctgtcctgaagaaaatcatcaaggaacagcctcaaccatcaggaaaacaagagtcaggttcagaaatccatgtggaagtgaaggcacaaagcttggttataagccctccagctcctagtcctaggaaaactccagttgccagtgatcaacgccgtaggtcctgcaaaacagcccctgcttccagcagcaaatctcagacagaggttcctaagagaggaggagaaagagtggcaacctgccttcaaagagtgtctatcagccgaagtcaacatgatattttacagatgatatgttccaaaagaagaagtggtgcttcggaagcaaatctgattgttgcaaaatcatgggcagatgtagtaaaacttggtgcaaaacaaacacaaactaaagtcataaaacatggtcctcaaaggtcaatgaacaaaaggcaaagaagacctgctactccaaagaagcctgtgggcgaagttcacagtcaatttagtacaggccacgcaaactctccttgtaccataataatagggaaagctcatactgaaaaagtacatgtgcctgctcgaccctacagagtgctcaacaacttcatttccaaccaaaaaatggactttaaggaagatctttcaggaatagctgaaatgttcaagaccccagtgaaggagcaaccgcagttgacaagcacatgtcacatcgctatttcaaattcagagaatttgcttggaaaacagtttcaaggaactgattcaggagaagaacctctgctccccacctcagagagttttggaggaaatgtgttcttcagtgcacagaatgcagcaaaacagccatctgataaatgctctgcaagccctcccttaagacggcagtgtattagagaaaatggaaacgtagcaaaaacgcccaggaacacctacaaaatgacttctctggagacaaaaacttcagatactgagacagagccttcaaaaacagtatccactgcaaacaggtcaggaaggtctacagagttcaggaatatacagaagctacctgtggaaagtaagagtgaagaaacaaatacagaaattgttgagtgcatcctaaaaagaggtcagaaggcaacactactacaacaaaggagagaaggagagatgaaggaaatagaaagaccttttgagacatataaggaaaatattgaattaaaagaaaacgatgaaaagatgaaagcaatgaagagatcaagaacttgggggcagaaatgtgcaccaatgtctgacctgacagacctcaagagcttgcctgatacagaactcatgaaagacacggcacgtggccagaatctcctccaaacccaagatcatgccaaggcaccaaagagtgagaaaggcaaaatcactaaaatgccctgccagtcattacaaccagaaccaataaacaccccaacacacacaaaacaacagttgaaggcatccctggggaaagtaggtgtgaaagaagagctcctagcagtcggcaagttcacacggacgtcaggggagaccacgcacacgcacagagagccagcaggagatggcaagagcatcagaacgtttaaggagtctccaaagcagatcctggacccagcagcccgtgtaactggaatgaagaagtggccaagaacgcctaaggaagaggcccagtcactagaagacctggctggcttcaaagagctcttccagacaccaggtccctctgaggaatcaatgactgatgagaaaactaccaaaatagcctgcaaatctccaccaccagaatcagtggacactccaacaagcacaaagcaatggcctaagagaagtctcaggaaagcagatgtagaggaagaattcttagcactcaggaaactaacaccatcagcagggaaagccatgcttacgcccaaaccagcaggaggtgatgagaaagacattaaagcatttatgggaactccagtgcagaaactggacctggcaggaactttacctggcagcaaaagacagctacagactcctaaggaaaaggcccaggctctagaagacctggctggctttaaagagctcttccagactcctggtcacaccgaggaattagtggctgctggtaaaaccactaaaataccctgcgactctccacagtcagacccagtggacaccccaacaagcacaaagcaacgacccaagagaagtatcaggaaagcagatgtagagggagaactcttagcgtgcaggaatctaatgccatcagcaggcaaagccatgcacacgcctaaaccatcagtaggtgaagagaaagacatcatcatatttgtgggaactccagtgcagaaactggacctgacagagaacttaaccggcagcaagagacggccacaaactcctaaggaagaggcccaggctctggaagacctgactggctttaaagagctcttccagacccctggtcatactgaagaagcagtggctgctggcaaaactactaaaatgccctgcgaatcttctccaccagaatcagcagacaccccaacaagcacaagaaggcagcccaagacacctttggagaaaagggacgtacagaaggagctctcagccctgaagaagctcacacagacatcaggggaaaccacacacacagataaagtaccaggaggtgaggataaaagcatcaacgcgtttagggaaactgcaaaacagaaactggacccagcagcaagtgtaactggtagcaagaggcacccaaaaactaaggaaaaggcccaacccctagaagacctggctggcttgaaagagctcttccagacaccagtatgcactgacaagcccacgactcacgagaaaactaccaaaatagcctgcagatcacaaccagacccagtggacacaccaacaagctccaagccacagtccaagagaagtctcaggaaagtggacgtagaagaagaattcttcgcactcaggaaacgaacaccatcagcaggcaaagccatgcacacacccaaaccagcagtaagtggtgagaaaaacatctacgcatttatgggaactccagtgcagaaactggacctgacagagaacttaactggcagcaagagacggctacaaactcctaaggaaaaggcccaggctctagaagacctggctggctttaaagagctcttccagacacgaggtcacactgaggaatcaatgactaacgataaaactgccaaagtagcctgcaaatcttcacaaccagacccagacaaaaacccagcaagctccaagcgacggctcaagacatccctggggaaagtgggcgtgaaagaagagctcctagcagttggcaagctcacacagacatcaggagagactacacacacacacacagagccaacaggagatggtaagagcatgaaagcatttatggagtctccaaagcagatcttagactcagcagcaagtctaactggcagcaagaggcagctgagaactcctaagggaaagtctgaagtccctgaagacctggccggcttcatcgagctcttccagacaccaagtcacactaaggaatcaatgactaacgaaaaaactaccaaagtatcctacagagcttcacagccagacctagtggacaccccaacaagctccaagccacagcccaagagaagtctcaggaaagcagacactgaagaagaatttttagcatttaggaaacaaacgccatcagcaggcaaagccatgcacacacccaaaccagcagtaggtgaagagaaagacatcaacacgtttttgggaactccagtgcagaaactggaccagccaggaaatttacctggcagcaatagacggctacaaactcgtaaggaaaaggcccaggctctagaagaactgactggcttcagagagcttttccagacaccatgcactgataaccccacgactgatgagaaaactaccaaaaaaatactctgcaaatctccgcaatcagacccagcggacaccccaacaaacacaaagcaacggcccaagagaagcctcaagaaagcagacgtagaggaagaatttttagcattcaggaaactaacaccatcagcaggcaaagccatgcacacgcctaaagcagcagtaggtgaagagaaagacatcaacacatttgtggggactccagtggagaaactggacctgctaggaaatttacctggcagcaagagacggccacaaactcctaaagaaaaggccaaggctctagaagatctggctggcttcaaagagctcttccagacaccaggtcacactgaggaatcaatgaccgatgacaaaatcacagaagtatcctgcaaatctccacaaccagacccagtcaaaaccccaacaagctccaagcaacgactcaagatatccttggggaaagtaggtgtgaaagaagaggtcctaccagtcggcaagctcacacagacgtcagggaagaccacacagacacacagagagacagcaggagatggaaagagcatcaaagcgtttaaggaatctgcaaagcagatgctggacccagcaaactatggaactgggatggagaggtggccaagaacacctaaggaagaggcccaatcactagaagacctggccggcttcaaagagctcttccagacaccagaccacactgaggaatcaacaactgatgacaaaactaccaaaatagcctgcaaatctccaccaccagaatcaatggacactccaacaagcacaaggaggcggcccaaaacacctttggggaaaagggatatagtggaagagctctcagccctgaagcagctcacacagaccacacacacagacaaagtaccaggagatgaggataaaggcatcaacgtgttcagggaaactgcaaaacagaaactggacccagcagcaagtgtaactggtagcaagaggcagccaagaactcctaagggaaaagcccaacccctagaagacttggctggcttgaaagagctcttccagacaccaatatgcactgacaagcccacgactcatgagaaaactaccaaaatagcctgcagatctccacaaccagacccagtgggtaccccaacaatcttcaagccacagtccaagagaagtctcaggaaagcagacgtagaggaagaatccttagcactcaggaaacgaacaccatcagtagggaaagctatggacacacccaaaccagcaggaggtgatgagaaagacatgaaagcatttatgggaactccagtgcagaaattggacctgccaggaaatttacctggcagcaaaagatggccacaaactcctaaggaaaaggcccaggctctagaagacctggctggcttcaaagagctcttccagacaccaggcactgacaagcccacgactgatgagaaaactaccaaaatagcctgcaaatctccacaaccagacccagtggacaccccagcaagcacaaagcaacggcccaagagaaacctcaggaaagcagacgtagaggaagaatttttagcactcaggaaacgaacaccatcagcaggcaaagccatggacacaccaaaaccagcagtaagtgatgagaaaaatatcaacacatttgtggaaactccagtgcagaaactggacctgctaggaaatttacctggcagcaagagacagccacagactcctaaggaaaaggctgaggctctagaggacctggttggcttcaaagaactcttccagacaccaggtcacactgaggaatcaatgactgatgacaaaatcacagaagtatcctgtaaatctccacagccagagtcattcaaaacctcaagaagctccaagcaaaggctcaagatacccctggtgaaagtggacatgaaagaagagcccctagcagtcagcaagctcacacggacatcaggggagactacgcaaacacacacagagccaacaggagatagtaagagcatcaaagcgtttaaggagtctccaaagcagatcctggacccagcagcaagtgtaactggtagcaggaggcagctgagaactcgtaaggaaaaggcccgtgctctagaagacctggttgacttcaaagagctcttctcagcaccaggtcacactgaagagtcaatgactattgacaaaaacacaaaaattccctgcaaatctcccccaccagaactaacagacactgccacgagcacaaagagatgccccaagacacgtcccaggaaagaagtaaaagaggagctctcagcagttgagaggctcacgcaaacatcagggcaaagcacacacacacacaaagaaccagcaagcggtgatgagggcatcaaagtattgaagcaacgtgcaaagaagaaaccaaacccagtagaagaggaacccagcaggagaaggccaagagcacctaaggaaaaggcccaacccctggaagacctggccggcttcacagagctctctgaaacatcaggtcacactcaggaatcactgactgctggcaaagccactaaaataccctgcgaatctcccccactagaagtggtagacaccacagcaagcacaaagaggcatctcaggacacgtgtgcagaaggtacaagtaaaagaagagccttcagcagtcaagttcacacaaacatcaggggaaaccacggatgcagacaaagaaccagcaggtgaagataaaggcatcaaagcattgaaggaatctgcaaaacagacaccggctccagcagcaagtgtaactggcagcaggagacggccaagagcacccagggaaagtgcccaagccatagaagacctagctggcttcaaagacccagcagcaggtcacactgaagaatcaatgactgatgacaaaaccactaaaataccctgcaaatcatcaccagaactagaagacaccgcaacaagctcaaagagacggcccaggacacgtgcccagaaagtagaagtgaaggaggagctgttagcagttggcaagctcacacaaacctcaggggagaccacgcacaccgacaaagagccggtaggtgagggcaaaggcacgaaagcatttaagcaacctgcaaagcggaagctggacgcagaagatgtaattggcagcaggagacagccaagagcacctaaggaaaaggcccaacccctggaagatctggccagcttccaagagctctctcaaacaccaggccacactgaggaactggcaaatggtgctgctgatagctttacaagcgctccaaagcaaacacctgacagtggaaaacctctaaaaatatccagaagagttcttcgggcccctaaagtagaacccgtgggagacgtggtaagcaccagagaccctgtaaaatcacaaagcaaaagcaacacttccctgcccccactgcccttcaagaggggaggtggcaaagatggaagcgtcacgggaaccaagaggctgcgctgcatgccagcaccagaggaaattgtggaggagctgccagccagcaagaagcagagggttgctcccagggcaagaggcaaatcatccgaacccgtggtcatcatgaagagaagtttgaggacttctgcaaaaagaattgaacctgcggaagagctgaacagcaacgacatgaaaaccaacaaagaggaacacaaattacaagactcggtccctgaaaataagggaatatccctgcgctccagacgccaaaataagactgaggcagaacagcaaataactgaggtctttgtattagcagaaagaatagaaataaacagaaatgaaaagaagcccatgaagacctccccagagatggacattcagaatccagatgatggagcccggaaacccatacctagagacaaagtcactgagaacaaaaggtgcttgaggtctgctagacagaatgagagctcccagcctaaggtggcagaggagagcggagggcagaagagtgcgaaggttctcatgcagaatcagaaagggaaaggagaagcaggaaattcagactccatgtgcctgagatcaagaaagacaaaaagccagcctgcagcaagcactttggagagcaaatctgtgcagagagtaacgcggagtgtcaagaggtgtgcagaaaatccaaagaaggctgaggacaatgtgtgtgtcaagaaaataagaaccagaagtcatagggacagtgaagatatttgacagaaaaatcgaactgggaaaaatataataaagttagttttgtgataagttctagtgcagtttttgtcataaattacaagtgaattctgtaagtaaggctgtcagtctgcttaagggaagaaaactttggatttgctgggtctgaatcggcttcataaactccactgggagcactgctgggctcctggactgagaatagttgaacaccgggggctttgtgaaggagtctgggccaaggtttgccctcagctttgcagaatgaagccttgaggtctgtcaccacccacagccaccctacagcagccttaactgtgacacttgccacactgtgtcgtcgtttgtttgcctatgtcctccagggcacggtggcaggaacaactatcctcgtctgtcccaacactgagcaggcactcggtaaacacgaatgaatggatgagcgcacggatgaatggagcttacaagatctgtctttccaatggccgggggcatttggtccccaaattaaggctattggacatctgcacaggacagtcctatttttgatgtcctttcctttctgaaaataaagttttgtgctttggagaatgactcgtgagcacatctttagggaccaagagtgactttctgtaaggagtgactcgtggcttgccttggtctcttgggaatacttttctaactagggttgctctcacctgagacattctccacccgcggaatctcagggtcccaggctgtgggccatcacgacctcaaactggctcctaatctccagctttcctgtcattgaaagcttcggaagtttactggctctgctcccgcctgttttctttctgactctatctggcagcccgatgccacccagtacaggaagtgacaccagtactctgtaaagcatcatcatccttggagagactgagcactcagcaccttcagccacgatttcaggatcgcttccttgtgagccgctgcctccgaaatctcctttgaagcccagacatctttctccagcttcagacttgtagatataactcgttcatcttcatttactttccactttgccccctgtcctctctgtgttccccaaatcagagaatagcccgccatcccccaggtcacctgtctggattcctccccattcacccaccttgccaggtgcaggtgaggatggtgcaccagacagggtagctgtcccccaaaatgtgccctgtgcgggcagtgccctgtctccacgtttgtttccccagtgtctggcggggagccaggtgacatcataaatacttgctgaatgaatgcagaaatcagcggtactgacttgtactatattggctgccatgatagggttctcacagcgtcatccatgatcgtaagggagaatgacattctgcttgagggagggaatagaaaggggcagggaggggacatctgagggcttcacagggctgcaaagggtacagggattgcaccagggcagaacaggggagggtgttcaaggaagagtggctcttagcagaggcactttggaaggtgtgaggcataaatgcttccttctacgtaggccaacctcaaaactttcagtaggaatgttgctatgatcaagttgttctaacactttagacttagtagtaattatgaacctcacatagaaaaatttcatccagccatatgcctgtggagtggaatattctgtttagtagaaaaatcctttagagttcagctctaaccagaaatcttgctgaagtatgtcagcaccttttctcaccctggtaagtacagtatttcaagagcacgctaagggtggttttcattttacagggctgttgatgatgggttaaaaatgttcatttaagggctacccccgtgtttaatagatgaacaccacttctacacaaccctccttggtactgggggagggagagatctgacaaatactgcccattcccctaggctgactggatttgagaacaaatacccacccatttccaccatggtatggtaacttctctgagcttcagtttccaagtgaatttccatgtaataggacattcccattaaatacaagctgtttttactttttcgcctcccagggcctgtgggatctggtcccccagcctctcttgggctttcttacactaactctgtacctaccatctcctgcctcccttaggcaggcacctccaaccaccacacactccctgctgttttccctgcctggaactttccctcctgccccaccaagatcatttcatccagtcctgagctcagcttaagggaggcttcttgcctgtgggttccctcacccccatgcctgtcctccaggctggggcaggttcttagtttgcctggaattgttctgtacctctttgtagcacgtagtgttgtggaaactaagccactaattgagtttctggctcccctcctggggttgtaagttttgttcattcatgagggccgactgcatttcctggttactctatcccagtgaccagccacaggagatgtccaataaagtatgtgatgaaatggtctt

SEQ ID NO: 310 - DNA, 200 bp, Homo sapiens
  source 1..200: mol_type = genomic DNA
atgtggcccacgagacgcctggttactatcaaaaggagcggggtcgacggtccccactttcccctgagcctcagcacctgcttgtttggaaggaggaaatgtgttcttcagtgcacagaatgcagcaaaacagccatctgataaatgctctgcaagccctcccttaagacggcagtgtattagagaaaatggaaacgtag

SEQ ID NO: 311 - DNA, 3245 bp, Homo sapiens
  source 1..3245: mol_type = genomic DNA
ctgaacaggaagcagttcgctcgcgcctaggttggcgcgggctgggaggtgttccagccctttaagatgttgcgcgtggtgagctggaacatcaatgggattcggagacccctgcaaggggtggcaaatcaggaacccagcaactgtgccgccgtggccgtggggcgcattttggacgagctggatgcggatatcgtctgtctccaggaaaccaaagtgaccagggatgcactgacagagcccctggctatcgttgagggttataactcctatttcagcttcagccgcaaccgtagcggctattctggtgtagccaccttctgtaaggacaatgctaccccagtggctgctgaagaaggcctgagtggcctgtttgccacccagaatggggatgttggttgctatggaaacatggatgagtttacccaagaggaactccgggctctggatagtgagggcagggccctcctcacacagcataagatccgcacatgggaaggtaaggagaagaccttgaccctaatcaacgtgtactgcccccatgcggaccctgggaggcctgagcggctagtctttaagatgcgcttctatcgtttgctgcaaatccgagcagaagccctcctggcggcaggcagccatgtgatcattctgggtgacctgaatacagcccaccgccccattgaccactgggatgcagtcaacctggaatgctttgaagaggacccagggcgcaagtggatggacagcttgctcagtaacttggggtgccagtctgcctctcatgtagggcccttcatcgatagctaccgctgcttccaaccaaagcaggagggggccttcacctgctggtcagcagtcactggcgcccgccatctcaactatggctcccggcttgactatgtgctgggggacaggaccctggtcatagacacctttcaggcctctttcctgctgcctgaggtgatgggctctgaccactgccctgtgggtgcagtcttgagtgtgtcctctgtgcctgcaaaacagtgcccacctctgtgcacccgcttcctccctgagtttgcaggcacccagctcaagatccttcgcttcctagttcctctcgaacaaagtcctgtgttggagcagtcgacgctgcagcacaacaatcaaacccgggtacagacatgccaaaacaaagcccaagtgcgctcaaccaggcctcagcccagtcaggttggctctagcagaggccagaaaaacctgaagagctactttcagccctcccctagctgtccccaagcctctcctgacatagagctgcctagcctaccactgatgagcgccctcatgaccccgaagactccagaagagaaggcagtggccaaagtggtgaaggggcaggccaagacttcagaagccaaagatgagaaggagttacggacctcattctggaagtctgtgctggcggggcccttgcgcacacccctctgtgggggccacagggagccatgtgtgatgcgtactgtgaagaagccaggacccaacttgggccgccgcttctacatgtgtgccaggccccggggtcctcccactgacccctcctcccggtgcaacttcttcctctggagcaggcccagctgaaccaatggaggcctggggacatctggcatggtcacccctgcacatgatctgaggccagctccccttccctgagctgcctcctgcttctccctcaaagtctcctacccttctcttcctcttttaagccctctcttcctcgctttccttcctacctagctccttgttggtgagcttcttgtgccttaatcctgtgacccagccccttacaccactttccaccttcctgtccgaagtacacggacactagctgccccaggaagttgtgtgattttaaatcacttctgtctttgctggaaagtgtatttgtgcataaataaagtctgtgtatttgtttcagggttgcactttggacattgtggaggtactccataaagttgagtcagagaagctatctcaatacttggtttgccggctggctgtagcccaatgatgtaattcccagagaaaggggaggagggaggggggaggagggaatagtgaggcgtgagcagcagtgctcaccataaagggttctctgctcagttgtaggaatttcctgtacggctaaggtgaaatcagcaaggaaggtgggctgtgtagccttaaaccagagctttccagctagtgcgtcccacagctgccacagtgggttacagggttgaaagaaacggtcctcagccctcagagttgccaggcagggcctgggaccacacaagtttcagggacgattgcctccttagcaagtagtatcattagtacccctaagtgtgccatggaaatgtttcctgtatactgtgacctggaaagtgggagcattgctttgaacacagtgcttgctctagccaagcctcttctcacctttgaaaatgggactggtagaccaggcacagtggtgcacgcctgtaatcccagcactttgggaggctgagatgggtggatcacctgaggtcaggagttcgcaaccagcctaacatggtgagaccccgtctctactaaatacaaaaaaattaactgggcgtggtggcgcgtgcctgtaatccaagctacttaggaggctgagacaggagaatagcttgtacctgggaggcggaggttgcagtgggctgagatcatgcattgcactccagcctgggcaacaagagtgaaattcagtctccaaaaaaaaaaaaagaaaagaaaaagaatgggactggtaaatcctgttctgtgggatgccgtgggagggagagaggataatggattgaggaagacatccatatccccttatggaaaatacctctttggttttggggaaccactcctttctagggaatttggttagggctgactcatttcctggcttcaggggctaccctgggcccagatttccagggcccggattaccagtgaagcgtcaatccctggatttttattgaaaccattggagaagagccatctcaaataaatctgccaagtatcctagctctttgcaactcactgtgtagtttttgggcatttccttcctctttctcattctgtttccctgttggtaaaatggaatggtgaccaacaagtgacctatggttacctcatagatctgccacttgtctgagggagtcagaatgcacttgtctgttccctgtccaataaaaggcttcacatgc

SEQ ID NO: 312 - DNA, 1484 bp, Homo sapiens
  source 1..1484: mol_type = genomic DNA
ccgctacccacgtgggggctcagcgtgcacccttctttgtgctcgggttaggaggagctaggctgccatcgggccggtgcagatacggggttgctcttttgctcataagaggggcttcgctggcagtctgaacggcaagcttgagtcaggacccttaattaagatcctcaattggctggagggcagatctcgcgagtagggcaacgcggtaaaaatattgcttcggtgggtgacgcggtacagctgcccaagggcgttcgtaacgggaatgccgaagcgtgggaaaaagggagcggtggcggaagacggggatgagctcaggacagagccagaggccaagaagagtaagacggccgcaaagaaaaatgacaaagaggcagcaggagagggcccagccctgtatgaggaccccccagatcagaaaacctcacccagtggcaaacctgccacactcaagatctgctcttggaatgtggatgggcttcgagcctggattaagaagaaaggattagattgggtaaaggaagaagccccagatatactgtgccttcaagagaccaaatgttcagagaacaaactaccagctgaacttcaggagctgcctggactctctcatcaatactggtcagctccttcggacaaggaagggtacagtggcgtgggcctgctttcccgccagtgcccactcaaagtttcttacggcataggcgatgaggagcatgatcaggaaggccgggtgattgtggctgaatttgactcgtttgtgctggtaacagcatatgtacctaatgcaggccgaggtctggtacgactggagtaccggcagcgctgggatgaagcctttcgcaagttcctgaagggcctggcttcccgaaagccccttgtgctgtgtggagacctcaatgtggcacatgaagaaattgaccttcgcaaccccaaggggaacaaaaagaatgctggcttcacgccacaagagcgccaaggcttcggggaattactgcaggctgtgccactggctgacagctttaggcacctctaccccaacacaccctatgcctacaccttttggacttatatgatgaatgctcgatccaagaatgttggttggcgccttgattactttttgttgtcccactctctgttacctgcattgtgtgacagcaagatccgttccaaggccctcggcagtgatcactgtcctatcaccctatacctagcactgtgacaccacccctaaatcactttgagcctgggaaataagccccctcaactaccattccttctttaaacactcttcagagaaatctgcattctatttctcatgtataaaactaggaatcctccaaccaggctcctgtgatagagttcttttaagcccaagattttttatttgagggttttttgttttttaaaaaaaaattgaacaaagactactaatgactttgtttgaattatccacatgaaaataaagagccatagtttca

SEQ ID NO: 313 - DNA, 1387 bp, Homo sapiens
  source 1..1387: mol_type = genomic DNA
cttctttgtgctcgggttaggaggagctaggctgccatcgggccggtgcagatacggggttgctcttttgctcataagaggggcttcgctggcagtctgaacggcaacgcggtaaaaatattgcttcggtgggtgacgcggtacagctgcccaagggcgttcgtaacgggaatgccgaagcgtgggaaaaagggagcggtggcggaagacggggatgagctcaggacagagccagaggccaagaagagtaagacggccgcaaagaaaaatgacaaagaggcagcaggagagggcccagccctgtatgaggaccccccagatcagaaaacctcacccagtggcaaacctgccacactcaagatctgctcttggaatgtggatgggcttcgagcctggattaagaagaaaggattagattgggtaaaggaagaagccccagatatactgtgccttcaagagaccaaatgttcagagaacaaactaccagctgaacttcaggagctgcctggactctctcatcaatactggtcagctccttcggacaaggaagggtacagtggcgtgggcctgctttcccgccagtgcccactcaaagtttcttacggcataggcgatgaggagcatgatcaggaaggccgggtgattgtggctgaatttgactcgtttgtgctggtaacagcatatgtacctaatgcaggccgaggtctggtacgactggagtaccggcagcgctgggatgaagcctttcgcaagttcctgaagggcctggcttcccgaaagccccttgtgctgtgtggagacctcaatgtggcacatgaagaaattgaccttcgcaaccccaaggggaacaaaaagaatgctggcttcacgccacaagagcgccaaggcttcggggaattactgcaggctgtgccactggctgacagctttaggcacctctaccccaacacaccctatgcctacaccttttggacttatatgatgaatgctcgatccaagaatgttggttggcgccttgattactttttgttgtcccactctctgttacctgcattgtgtgacagcaagatccgttccaaggccctcggcagtgatcactgtcctatcaccctatacctagcactgtgacaccacccctaaatcactttgagcctgggaaataagccccctcaactaccattccttctttaaacactcttcagagaaatctgcattctatttctcatgtataaaactaggaatcctccaaccaggctcctgtgatagagttcttttaagcccaagattttttatttgagggttttttgttttttaaaaaaaaattgaacaaagactactaatgactttgtttgaattatccacatgaaaataaagagccatagtttca

SEQ ID NO: 314 - DNA, 899 bp, Homo sapiens
  source 1..899: mol_type = genomic DNA
cccacgtgggggctcagcgtgcacccttctttgtgctcgggcaacgcggtaaaaatattgcttcggtgggtgacgcggtacagctgcccaagggcgttcgtaacgggaatgccgaagcgtgggaaaaagggagcggtggcggaagacggggatgagctcaggacagagccagaggccaagaagagtaagacggccgcaaagaaaaatgacaaagaggcagcaggagagggcccagccctgtatgaggaccccccagatcagaaaacctcacccagtggcaaacctgccacactcaagatctgctcttggaatgtggatgggcttcgagcctggattaagaagaaaggattagattgggtaaaggaagaagccccagatatactgtgccttcaagagaccaaatgttcagagaacaaactaccagctgaacttcaggagctgcctggactctctcatcaatactggtcagctccttcggacaaggaagggtacagtggcgtgggcctgctttcccgccagtgcccactcaaagtttcttacggcataggcgatgaggagcatgatcaggaaggccgggtgattgtggctgaatttgactcgtttgtgctggtaacagcatatgtacctaatgcaggccgaggtctggtacgactggagtaccggcagcgctgggatgaagcctttcgcaagttcctgaagggcctggcttcccgaaagccccttgtgctgtgtggagacctcaatgtggcacatgaagaaattgaccttcgcaaccccaaggggaacaaaaagaatgctggcttcacgccacaagagcgccaaggcttcggggaattactgcaggctgtgccactggctgacagctttaggcacctctaccccaacacaccctatgccta

SEQ ID NO: 315 - DNA, 1433 bp, Homo sapiens
  source 1..1433: mol_type = genomic DNA
aggtccgctacccacgtgggggctcagcgtgcacccttctttgtgctcgggttaggaggagctaggctgccatcgggccggtgcagatacggggttgctcttttgctcataagaggggcttcgctggcagtctgaacggcaagcttgagcaacgcggtaaaaatattgcttcggtgggtgacgcggtacagctgcccaagggcgttcgtaacgggaatgccgaagcgtgggaaaaagggagcggtggcggaagacggggatgagctcaggacagagccagaggccaagaagagtaagacggccgcaaagaaaaatgacaaagaggcagcaggagagggcccagccctgtatgaggaccccccagatcagaaaacctcacccagtggcaaacctgccacactcaagatctgctcttggaatgtggatgggcttcgagcctggattaagaagaaaggattagattgggtaaaggaagaagccccagatatactgtgccttcaagagaccaaatgttcagagaacaaactaccagctgaacttcaggagctgcctggactctctcatcaatactggtcagctccttcggacaaggaagggtacagtggcgtgggcctgctttcccgccagtgcccactcaaagtttcttacggcataggcgatgaggagcatgatcaggaaggccgggtgattgtggctgaatttgactcgtttgtgctggtaacagcatatgtacctaatgcaggccgaggtctggtacgactggagtaccggcagcgctgggatgaagcctttcgcaagttcctgaagggcctggcttcccgaaagccccttgtgctgtgtggagacctcaatgtggcacatgaagaaattgaccttcgcaaccccaaggggaacaaaaagaatgctggcttcacgccacaagagcgccaaggcttcggggaattactgcaggctgtgccactggctgacagctttaggcacctctaccccaacacaccctatgcctacaccttttggacttatatgatgaatgctcgatccaagaatgttggttggcgccttgattactttttgttgtcccactctctgttacctgcattgtgtgacagcaagatccgttccaaggccctcggcagtgatcactgtcctatcaccctatacctagcactgtgacaccacccctaaatcactttgagcctgggaaataagccccctcaactaccattccttctttaaacactcttcagagaaatctgcattctatttctcatgtataaaactaggaatcctccaaccaggctcctgtgatagagttcttttaagcccaagattttttatttgagggttttttgttttttaaaaaaaaattgaacaaagactactaatgactttgtttgaattatccacatgaaaataaagagccatagtttcag

SEQ ID NO: 316 - DNA, 773 bp, Homo sapiens
  source 1..773: mol_type = genomic DNA
aggagctaggctgccatcgggccggtgcagatacggggttgctcttttgctcataagaggggcttcgctggcagtctgaacggcaagcttgagtcaggacccttaattaagatcctcaattggctggagggcagatctcgcgagtagggtacaaggcactatgaaatgatctagtttcgtgggcaacgcggtaaaaatattgcttcggtgggtgacgcggtacagctgcccaagggcgttcgtaacgggaatgccgaagcgtgggaaaaagggagcggtggcggaagacggggatgagctcaggacagagccagaggccaagaagagtaagacggccgcaaagaaaaatgacaaagaggcagcaggagagggcccagccctgtatgaggaccccccagatcagaaaacctcacccagtggcaaacctgccacactcaagatctgctcttggaatgtggatgggcttcgagcctggattaagaagaaaggattagattgggtaaaggaagaagccccagatatactgtgccttcaagagaccaaatgttcagagaacaaactaccagctgaacttcaggagctgcctggactctctcatcaatactggtcagctccttcggacaaggaagggtacagtggcgtgggcctgctttcccgccagtgcccactcaaagtttcttacggcataggcgatgaggagcatgatcaggaaggccgggtgattgtggctgaatttgactcgtttgtgctggtaacagcatatgtacctaatg

SEQ ID NO: 317 - DNA, 566 bp, Homo sapiens
  source 1..566: mol_type = genomic DNA
ttctttgtgctcgggttaggaggagctaggctgccatcgggccggtgcagatacggggttgctcttttgctcataagaggggcttcgctggcagtctgaacggcaagcttgagtcaggacccttaattaagatcctcaattggctggagggcagatctcgcgagtagggtacaaggcaacgcggtaaaaatattgcttcggtgggtgacgcggtacagctgcccaagggcgttcgtaacgggaatgccgaagcgtgggaaaaagggagcggtggcggaagacggggatgagctcaggacagagccagaggccaagaagagtaagacggccgcaaagaaaaatgacaaagaggcagcaggagagggcccagccctgtatgaggaccccccagatcagaaaacctcacccagtggcaaacctgccacactcaagatctgctcttggaatgtggatgggcttcgagcctggattaagaagaaaggattagattgggtaaaggaagaagccccagatatactgtgccttcaagagaccaaatgttcagagaacaaactaccagctgaact

SEQ ID NO: 318 - DNA, 671 bp, Homo sapiens
  source 1..671: mol_type = genomic DNA
cttctttgtgctcgggttaggaggagctaggctgccatcgggccggtgcagatacggggttgctcttttgctcataagaggggcttcgctggcagtctgaacggcaagcttgagtcaggacccttaattaagatcctcaattggctggagggcagatctcgcgagcaacgcggtaaaaatattgcttcggtgggtgacgcggtacagctgcccaagggcgttcgtaacgggaatgccgaagcgtgggaaaaagggagcggtggcggaagacggggatgagctcaggacagagccagaggccaagaagagtaagacggccgcaaagaaaaatgacaaagaggcagcaggagagggcccagccctgtatgaggaccccccagatcagaaaacctcacccagtggcaaacctgccacactcaagatctgctcttggaatgtggatgggcttcgagcctggattaagaagaaaggattagattgggtaaaggaagaagccccagatatactgtgccttcaagagaccaaatgttcagagaacaaactaccagctgaacttcaggagctgcctggactctctcatcaatactggtcagctccttcggacaaggaagggtacagtggcgtgggcctgctttcccgccagtgcccactcaaagtttcttacggcatag

SEQ ID NO: 319 - DNA, 2248 bp, Homo sapiens
  source 1..2248: mol_type = genomic DNA
tcgccgaaatgttccggtgtggaggcctggcggcgggtgctttgaagcagaagctggtgcccttggtgcggaccgtgtgcgtccgaagcccgaggcagaggaaccggctcccaggcaacttgttccagcgatggcatgttcctctagaactccagatgacaagacaaatggctagctctggtgcatcagggggcaaaatcgataattctgtgttagtccttattgtgggcttatcaacagtaggagctggtgcctatgcctacaagactatgaaagaggatgaaaaaagatacaatgaaagaatttcagggttagggctgacaccagaacagaaacagaaaaaggccgcgttatctgcttcagaaggagaggaagttcctcaagacaaggcgccaagtcatgttcctttcctgctaattggtggaggcacagctgcttttgctgcagccagatccatccgggctcgggatcctggggccagggtactgattgtatctgaagatcctgagctgccgtacatgcgacctcctctttcaaaagaactgtggttttcagatgacccaaatgtcacaaagacactgcgattcaaacagtggaatggaaaagagagaagcatatatttccagccaccttctttctatgtctctgctcaggacctgcctcatattgagaatggtggtgtggctgtcctcactgggaagaaggtagtacagctggatgtgagagacaacatggtgaaacttaatgatggctctcaaataacctatgaaaagtgcttgattgcaacaggaggtactccaagaagtctgtctgccattgatagggctggagcagaggtgaagagtagaacaacgcttttcagaaagattggagactttagaagcttggagaagatttcacgggaagtcaaatcaattacgattatcggtgggggcttccttggtagcgaactggcctgtgctcttggcagaaaggatatatgaaatcagggcatcttttcaggaggatgcttcctattcagaggttgcaaagcacttatgtaagccttaggtgactgcatgggtggaagtgcacagagttcaccatctgaagcttaatctggggccagcagttctgatacctgttgtatttgcgttacaaatgaacttgagcaccgaggccctcatgcccactgtcctctcgagccttgggcacagaagtgattcaactcttccccgagaaaggaaatatgggaaagatcctccccgaatacctcagcaactggaccatggaaaaagtcagacgagagggggttaaggtgatgcccaatgctattgtgcaatccgttggagtcagcagtggcaagttacttatcaagctgaaagacggcaggaaggtagaaactgaccacatagtggcagctgtgggcctggagcccaatgttgagttggccaagactggtggcctggaaatagactcagattttggtggcttccgggtaaatgcagagctacaagcacgctctaacatctgggtggcaggagatgctgcatgcttctacgatataaagttgggaaggaggcgggtagagcaccatgatcacgctgttgtgagtggaagattggctggagaaaatatgactggagctgctaagccgtactggcatcagtcaatgttctggagtgatttgggccccgatgttggctatgaagctattggtcttgtggacagtagtttgcccacagttggtgtttttgcaaaagcaactgcacaagacaaccccaaatctgccacagagcagtcaggaactggtatccgatcagagagtgagacagagtccgaggcctcagaaattactattcctcccagcaccccggcagttccacaggctcccgtccagggggaggactacggcaaaggtgtcatcttctacctcagggacaaagtggtcgtggggattgtgctatggaacatctttaaccgaatgccaatagcaaggaagatcattaaggacggtgagcagcatgaagatctcaatgaagtagccaaactattcaacattcatgaagactgaagccccacagtggaattggcaaacccactgcagcccctgagaggaggtcgaatgggtaaaggagcatttttttattcagcagactttctctgtgtatgagtgtgaatgatcaagtcctttgtgaatattttcaactatgtaggtaaattcttaatgttcacatagtgaaataaattctgattcttctaaattaaa

SEQ ID NO: 320 - DNA, 2260 bp, Homo sapiens
  source 1..2260: mol_type = genomic DNA
aatgcggcagcgagtgctacgcctgcgcagtaggcctccggtcgccgttccccttccccggctctagcaggccggcttctctgtccaatgcccacccggagctgggaggaggagtctgcgtaatgtgcgtgtgaagagactgggggagctggccggggctcacggtgtttgacccgtcggtcgtgcgtgagaggaaagggaaggaggaggtcccgaatagcggtcgccgaaatgttccggtgtggaggcctggcggcgggtgctttgaagcagaagctggtgcccttggtgcggaccgtgtgcgtccgaagcccgaggcagaggaaccggctcccaggcaacttgttccagcgatggcatgttcctctagaactccagatgacaagacaaatggctagctctggtgcatcagggggcaaaatcgataattctgtgttagtccttattgtgggcttatcaacagtaggagctggtgcctatgcctacaagactatgaaagaggatgaaaaaagatacaatgaaagaatttcagggttagggctgacaccagaacagaaacagaaaaaggccgcgttatctgcttcagaaggagaggaagttcctcaagacaaggcgccaagtcatgttcctttcctgctaattggtggaggcacagctgcttttgctgcagccagatccatccgggctcgggatcctggggccagggtactgattgtatctgaagatcctgagctgccgtacatgcgacctcctctttcaaaagaactgtggttttcagatgacccaaatgtcacaaagacactgcgattcaaacagtggaatggaaaagagagaagcatatatttccagccaccttctttctatgtctctgctcaggacctgcctcatattgagaatggtggtgtggctgtcctcactgggaagaaggtagtacagctggatgtgagagacaacatggtgaaacttaatgatggctctcaaataacctatgaaaagtgcttgattgcaacaggaggtactccaagaagtctgtctgccattgatagggctggagcagaggtgaagagtagaacaacgcttttcagaaagattggagactttagaagcttggagaagatttcacgggaagtcaaatcaattacgattatcggtgggggcttccttggtagcgaactggcctgtgctcttggcagaaaggctcgagccttgggcacagaagtgattcaactcttccccgagaaaggaaatatgggaaagatcctccccgaatacctcagcaactggaccatggaaaaagtcagacgagagggggttaaggtgatgcccaatgctattgtgcaatccgttggagtcagcagtggcaagttacttatcaagctgaaagacggcaggaaggtagaaactgaccacatagtggcagctgtgggcctggagcccaatgttgagttggccaagactggtggcctggaaatagactcagattttggtggcttccgggtaaatgcagagctacaagcacgctctaacatctgggtggcaggagatgctgcatgcttctacgatataaagttgggaaggaggcgggtagagcaccatgatcacgctgttgtgagtggaagattggctggagaaaatatgactggagctgctaagccgtactggcatcagtcaatgttctggagtgatttgggccccgatgttggctatgaagctattggtcttgtggacagtagtttgcccacagttggtgtttttgcaaaagcaactgcacaagacaaccccaaatctgccacagagcagtcaggaactggtatccgatcagagagtgagacagagtccgaggcctcagaaattactattcctcccagcaccccggcagttccacaggctcccgtccagggggaggactacggcaaaggtgtcatcttctacctcagggacaaagtggtcgtggggattgtgctatggaacatctttaaccgaatgccaatagcaaggaagatcattaaggacggtgagcagcatgaagatctcaatgaagtagccaaactattcaacattcatgaagactgaagccccacagtggaattggcaaacccactgcagcccctgagaggaggtcgaatgggtaaaggagcatttttttattcagcagactttctctgtgtatgagtgtgaatgatcaagtcctttgtgaatattttcaactatgtaggtaaattcttaatgttcacatagtgaaataaattctgattcttct

SEQ ID NO: 321 - DNA, 2248 bp, Homo sapiens
  source 1..2248: mol_type = genomic DNA
agcgagtgctacgcctgcgcagtaggcctccggtcgccgttccccttccccggctctagcaggccggcttctctgtccaatgcccacccggagctgggaggaggagtctgcgtaatgtgcgtgtgaagagactgggggagctggccggggctcacggtgtttgacccgtcggtcgtgcgtgagaggaaagggaaggaggaggtcccgaatagcggtcgccgaaatgttccggtgtggaggcctggcggcgggtgctttgaagcagaagctggtgcccttggtgcggaccgtgtgcgtccgaagcccgaggcagaggaaccggctcccagttgtgcagtctcatcacctaggatccccttctagatcactagcatctacaggtgcttctgggaaagatggcagcaacctagtgtacttcttaattgtaggagcaacagtcactggggcaggagtttattatgcctacaagactatgaaagaggatgaaaaaagatacaatgaaagaatttcagggttagggctgacaccagaacagaaacagaaaaaggccgcgttatctgcttcagaaggagaggaagttcctcaagacaaggcgccaagtcatgttcctttcctgctaattggtggaggcacagctgcttttgctgcagccagatccatccgggctcgggatcctggggccagggtactgattgtatctgaagatcctgagctgccgtacatgcgacctcctctttcaaaagaactgtggttttcagatgacccaaatgtcacaaagacactgcgattcaaacagtggaatggaaaagagagaagcatatatttccagccaccttctttctatgtctctgctcaggacctgcctcatattgagaatggtggtgtggctgtcctcactgggaagaaggtagtacagctggatgtgagagacaacatggtgaaacttaatgatggctctcaaataacctatgaaaagtgcttgattgcaacaggaggtactccaagaagtctgtctgccattgatagggctggagcagaggtgaagagtagaacaacgcttttcagaaagattggagactttagaagcttggagaagatttcacgggaagtcaaatcaattacgattatcggtgggggcttccttggtagcgaactggcctgtgctcttggcagaaaggctcgagccttgggcacagaagtgattcaactcttccccgagaaaggaaatatgggaaagatcctccccgaatacctcagcaactggaccatggaaaaagtcagacgagagggggttaaggtgatgcccaatgctattgtgcaatccgttggagtcagcagtggcaagttacttatcaagctgaaagacggcaggaaggtagaaactgaccacatagtggcagctgtgggcctggagcccaatgttgagttggccaagactggtggcctggaaatagactcagattttggtggcttccgggtaaatgcagagctacaagcacgctctaacatctgggtggcaggagatgctgcatgcttctacgatataaagttgggaaggaggcgggtagagcaccatgatcacgctgttgtgagtggaagattggctggagaaaatatgactggagctgctaagccgtactggcatcagtcaatgttctggagtgatttgggccccgatgttggctatgaagctattggtcttgtggacagtagtttgcccacagttggtgtttttgcaaaagcaactgcacaagacaaccccaaatctgccacagagcagtcaggaactggtatccgatcagagagtgagacagagtccgaggcctcagaaattactattcctcccagcaccccggcagttccacaggctcccgtccagggggaggactacggcaaaggtgtcatcttctacctcagggacaaagtggtcgtggggattgtgctatggaacatctttaaccgaatgccaatagcaaggaagatcattaaggacggtgagcagcatgaagatctcaatgaagtagccaaactattcaacattcatgaagactgaagccccacagtggaattggcaaacccactgcagcccctgagaggaggtcgaatgggtaaaggagcatttttttattcagcagactttctctgtgtatgagtgtgaatgatcaagtcctttgtgaatattttcaactatgtaggtaaattcttaatgttcacatagtgaaataaattctgattcttctaaattaaa

SEQ ID NO: 322 - DNA, 1200 bp, Homo sapiens
  source 1..1200: mol_type = genomic DNA
aggtcccgaatagcggtcgccgaaatgttccggtgtggaggcctggcggcgggtgctttgaagcagaagctggtgcccttggtgcggaccgtgtgcgtccgaagcccgaggcagaggaaccggctcccagctcgagccttgggcacagaagtgattcaactcttccccgagaaaggaaatatgggaaagatcctccccgaatacctcagcaactggaccatggaaaaagtcagacgagagggggttaaggtgatgcccaatgctattgtgcaatccgttggagtcagcagtggcaagttacttatcaagctgaaagacggcaggaaggtagaaactgaccacatagtggcagctgtgggcctggagcccaatgttgagttggccaagactggtggcctggaaatagactcagattttggtggcttccgggtaaatgcagagctacaagcacgctctaacatctgggtggcaggagatgctgcatgcttctacgatataaagttgggaaggaggcgggtagagcaccatgatcacgctgttgtgagtggaagattggctggagaaaatatgactggagctgctaagccgtactggcatcagtcaatgttctggagtgatttgggccccgatgttggctatgaagctattggtcttgtggacagtagtttgcccacagttggtgtttttgcaaaagcaactgcacaagacaaccccaaatctgccacagagcagtcaggaactggtatccgatcagagagtgagacagagtccgaggcctcagaaattactattcctcccagcaccccggcagttccacaggctcccgtccagggggaggactacggcaaaggtgtcatcttctacctcagggacaaagtggtcgtggggattgtgctatggaacatctttaaccgaatgccaatagcaaggaagatcattaaggacggtgagcagcatgaagatctcaatgaagtagccaaactattcaacattcatgaagactgaagccccacagtggaattggcaaacccactgcagcccctgagaggaggtcgaatgggtaaaggagcatttttttattcagcagactttctctgtgtatgagtgtgaatgatcaagtcctttgtgaatattttcaactatgtaggtaaattcttaatgttcacatagtgaaataaattctgattcttctaaattaaa

SEQ ID NO: 323 - DNA, 1925 bp, Homo sapiens
  source 1..1925: mol_type = genomic DNA
gcccaggctggagtgcaatggtgtgatctctgctcaccacaacctccgcctcccaggttcaagcgattctcctgtctcagcctctggagtagctgggattacaggcatgcaccaccacacctggctaattttgtatttttggtagagacagggtttctccatgttggtcaggctggtcttgaactcccaacctcaggtgatccacccacctcggccacccaaagtgctgggattataggtgtgagtcactgcacctggccaacagcaatactttctttcctttcttttcctctaccctctatgccaggactccttagaaataaaatattaaggaaagtgagttatgaagatgataagggcaatgcagactacagaattatgggtgtctttgaactgctgcttcctgtaaaatgccaaaaacttctttgggcacatgatggttcccagcttgagagatctgtgagctccagttggaatgtttcatggcaactagttttcttaatgttctttttcagatatatgaaatcagggcatcttttcaggaggatgcttcctattcagaggttgcaaagcacttatgtaagccttaggtgactgcatgggtggaagtgcacagagttcaccatctgaagcttaatctggggccagcagttctgatacctgttgtatttgcgttacaaatgaacttgagcaccgaggccctcatgcccactgtcctgtaagtgggcgctcggcctggattgcagctctgccctgtctgtagtgagggctgcctgctgctcctttacttctcttcctgtattcctaggattgacttttgcttcctgctgtaactactctgtttcttcttcccagctcgagccttgggcacagaagtgattcaactcttccccgagaaaggaaatatgggaaagatcctccccgaatacctcagcaactggaccatggaaaaagtcagacgagagggggttaaggtgatgcccaatgctattgtgcaatccgttggagtcagcagtggcaagttacttatcaagctgaaagacggcaggaaggtagaaactgaccacatagtggcagctgtgggcctggagcccaatgttgagttggccaagactggtggcctggaaatagactcagattttggtggcttccgggtaaatgcagagctacaagcacgctctaacatctgggtggcaggagatgctgcatgcttctacgatataaagttgggaaggaggcgggtagagcaccatgatcacgctgttgtgagtggaagattggctggagaaaatatgactggagctgctaagccgtactggcatcagtcaatgttctggagtgatttgggccccgatgttggctatgaagctattggtcttgtggacagtagtttgcccacagttggtgtttttgcaaaagcaactgcacaagacaaccccaaatctgccacagagcagtcaggaactggtatccgatcagagagtgagacagagtccgaggcctcagaaattactattcctcccagcaccccggcagttccacaggctcccgtccagggggaggactacggcaaaggtgtcatcttctacctcagggacaaagtggtcgtggggattgtgctatggaacatctttaaccgaatgccaatagcaaggaagatcattaaggacggtgagcagcatgaagatctcaatgaagtagccaaactattcaacattcatgaagactgaagccccacagtggaattggcaaacccactgcagcccctgagaggaggtcgaatgggtaaaggagcatttttttattcagcagactttctctgtgtatgagtgtgaatgatcaagtcctttgtgaatattttcaactatgtaggtaaattcttaatgttcacatagtgaaataaattctgattcttctaaattaaa

SEQ ID NO: 324 - DNA, 1925 bp, Homo sapiens; identical to SEQ ID NO: 323
  source 1..1925: mol_type = genomic DNA

SEQ ID NO: 325 - DNA, 2105 bp, Homo sapiens
  source 1..2105: mol_type = genomic DNA
tcgccgaaatgttccggtgtggaggcctggcggcgggtgctttgaagcagaagctggtgcccttggtgcggaccgtgtgcgtccgaagcccgaggcagaggaaccggctcccaggcctacaagactatgaaagaggatgaaaaaagatacaatgaaagaatttcagggttagggctgacaccagaacagaaacagaaaaaggccgcgttatctgcttcagaaggagaggaagttcctcaagacaaggcgccaagtcatgttcctttcctgctaattggtggaggcacagctgcttttgctgcagccagatccatccgggctcgggatcctggggccagggtactgattgtatctgaagatcctgagctgccgtacatgcgacctcctctttcaaaagaactgtggttttcagatgacccaaatgtcacaaagacactgcgattcaaacagtggaatggaaaagagagaagcatatatttccagccaccttctttctatgtctctgctcaggacctgcctcatattgagaatggtggtgtggctgtcctcactgggaagaaggtagtacagctggatgtgagagacaacatggtgaaacttaatgatggctctcaaataacctatgaaaagtgcttgattgcaacaggaggtactccaagaagtctgtctgccattgatagggctggagcagaggtgaagagtagaacaacgcttttcagaaagattggagactttagaagcttggagaagatttcacgggaagtcaaatcaattacgattatcggtgggggcttccttggtagcgaactggcctgtgctcttggcagaaaggatatatgaaatcagggcatcttttcaggaggatgcttcctattcagaggttgcaaagcacttatgtaagccttaggtgactgcatgggtggaagtgcacagagttcaccatctgaagcttaatctggggccagcagttctgatacctgttgtatttgcgttacaaatgaacttgagcaccgaggccctcatgcccactgtcctctcgagccttgggcacagaagtgattcaactcttccccgagaaaggaaatatgggaaagatcctccccgaatacctcagcaactggaccatggaaaaagtcagacgagagggggttaaggtgatgcccaatgctattgtgcaatccgttggagtcagcagtggcaagttacttatcaagctgaaagacggcaggaaggtagaaactgaccacatagtggcagctgtgggcctggagcccaatgttgagttggccaagactggtggcctggaaatagactcagattttggtggcttccgggtaaatgcagagctacaagcacgctctaacatctgggtggcaggagatgctgcatgcttctacgatataaagttgggaaggaggcgggtagagcaccatgatcacgctgttgtgagtggaagattggctggagaaaatatgactggagctgctaagccgtactggcatcagtcaatgttctggagtgatttgggccccgatgttggctatgaagctattggtcttgtggacagtagtttgcccacagttggtgtttttgcaaaagcaactgcacaagacaaccccaaatctgccacagagcagtcaggaactggtatccgatcagagagtgagacagagtccgaggcctcagaaattactattcctcccagcaccccggcagttccacaggctcccgtccagggggaggactacggcaaaggtgtcatcttctacctcagggacaaagtggtcgtggggattgtgctatggaacatctttaaccgaatgccaatagcaaggaagatcattaaggacggtgagcagcatgaagatctcaatgaagtagccaaactattcaacattcatgaagactgaagccccacagtggaattggcaaacccactgcagcccctgagaggaggtcgaatgggtaaaggagcatttttttattcagcagactttctctgtgtatgagtgtgaatgatcaagtcctttgtgaatattttcaactatgtaggtaaattcttaatgttcacatagtgaaataaattctgattcttctaaattaaa

SEQ ID NO: 326 - DNA, 4539 bp, Homo sapiens
  source 1..4539: mol_type = genomic DNA
aagaagaggtagcgagtggacgtgactgctctatcccgggcaaaagggatagaaccagaggtggggagtctgggcagtcggcgacccgcgaagacttgaggtgccgcagcggcatccggagtagcgccgggctccctccggggtgcagccgccgtcgggggaagggcgccacaggccgggaagacctcctccctttgtgtccagtagtggggtccaccggagggcggcccgtgggccgggcctcaccgcggcgctccgggactgtggggtcaggctgcgttgggtggacgcccacctcgccaaccttcggaggtccctgggggtcttcgtgcgccccggggctgcagagatccaggggaggcgcctgtgaggcccggacctgccccggggcgaagggtatgtggcgagacagagccctgcacccctaattcccggtggaaaactcctgttgccgtttccctccaccggcctggagtctcccagtcttgtcccggcagtgccgccctccccactaagacctaggcgcaaaggcttggctcatggttgacagctcagagagagaaagatctgagggaagatggatgcaaaagctcgaaattgtttgcttcaacatagagaagctctggaaaaggacatcaagacatcctacatcatggatcacatgattagtgatggatttttaacaatatcagaagaggaaaaagtaagaaatgagcccactcaacagcaaagagcagctatgctgattaaaatgatacttaaaaaagataatgattcctacgtatcattctacaatgctctactacatgaaggatataaagatcttgctgcccttctccatgatggcattcctgttgtctcttcttccagtggtaaagattcagttagtggaataacttcgtatgtaaggacagtcctgtgtgaaggtggagtaccacagaggccagttgtttttgtcacaaggaagaagctggtgaatgcaattcagcagaagctctccaaattgaaaggtgaaccaggatgggtcaccatacatggaatggcaggctgtgggaagtctgtattagctgcagaagctgttagagatcattcccttttagaaggttgtttcccagggggagtgcattgggtttcagttgggaaacaagacaaatctgggcttctgatgaaactgcagaatctttgcacacggttggatcaggatgagagtttttcccagaggcttccacttaatattgaagaggctaaagaccgtctccgcattctgatgcttcgcaaacacccaaggtctctcttgatcttggatgatgtttgggactcttgggtgttgaaagcttttgacagtcagtgtcagattcttcttacaaccagagacaagagtgttacagattcagtaatgggtcctaaatatgtagtccctgtggagagttccttaggaaaggaaaaaggacttgaaattttatccctttttgttaatatgaagaaggcagatttgccagaacaagctcatagtattataaaagaatgtaaagtggtggaacgttgtcactggggaatcctcacagaccttctacacaaatggaaccaatcttaagaaaatacacgtgtcccctgacttcaaaacatatgtgactgtggataatcttggtattttatatattttacagactttagaataaaatagttaagcattaatgtagttgaactttttaaatttttgaattggaaaaaaattctaatgaaaccctgatatcaactttttataaagctcttaattgttgtgcagtattgcattcattacaaaagtgtttgtggttggatgaataatattaatgtagctttttcccaaatgaacatacctttaatcttgtttttcatgatcatcattaacagtttgtccttaggatgcaaatgaaaatgtgaatacataccttgttgtactgttggtaaaattctgtcttgatgcattcaaaatggttgacataattaatgagaagaatttggaagaaattggtattttaatactgtctgtatttattactgttatgcaggctgtgcctcagggtagcagtggcctgctttttgaaccacacttaccccaagggggttttgttctcctaaatacaatcttagaggttttttgcactctttaaatttgctttaaaaatattgtgtctgtgtgcatagtctgcagcatttcctttaattgactcaataagtgagtcttggatttagcaggcccccccaccttttttttttgtttttggagacagagtcttgctttgttgccaggctggagtgcagtggcgcgatctcggctcaccacaatcgctgcctcctgggttcaagcaattctcctgcctcagcctcccgagtagctgggactacaggtgtgcgcacatgccaggctaatttttgtatttttagtagagacggggtttcaccatgttggccgggatggtctcgatctcttgacctcatgatctacccgccttggcctcccaaagtgctgagattacaggcgtgagccaccgtgcctggccaggccccttctcttttaatggagacagggtcttgcactatcacccaggctggagtgcagtggcataatcatacctcattgcagcctcagactcctgggttcaagcaatcctcctgcctcagcctcccaagtagctgagactacaggcacgagccaccacacccagctaatttttaagttttcttgtagagacagggtctcactatgttgtctaggctggtcttgaactcttggcctcaagtaatcctcctgcctcagcctcccaaagtgttgggattgcagatatgagccactggcctggccttcagcagttctttttgtgaagtaaaacttgtatgttggaaagagtagattttattggtctacccttttctcactgtagctgctggcagccctgtgccatatctggactctagttgtcagtatctgagttggacactattcctgctccctcttgtttcttacatatcagacttcttacttgaatgaaacctgatctttcctaatcctcacttttttcttttttaaaaagcagtttctccactgctaaatgttagtcattgaggtggggccaattttaatcataagccttaataagatttttctaagaaatgtgaaatagaacaattttcatctaattccatttacttttagatgaatggcattgtgaatgccattcttttaatgaatttcaagagaattctctggttttctgtgtaattccagatgagtcactgtaactctagaagattaaccttccagccaacctattttcctttcccttgtctctctcatcctcttttccttccttctttcctttctcttcttttatctccaaggttaatcaggaaaaatagcttttgacaggggaaaaaactcaataactagctatttttgacctcctgatcaggaactttagttgaagcgtaaatctaaagaaacattttctctgaaatatattattaagggcaatggagataaattaatagtagatgtggttcccagaaaatataatcaaaattcaaagattttttttgtttctgtaactggaactaaatcaaatgattactagtgttaatagtagataacttgtttttattgttggtgcatattagtataactgtggggtaggtcggggagagggtaagggaatagatcactcagatgtattttagataagctatttagcctttgatggaatcataaatacagtgaatacaatcctttgcattgttaaggaggttttttgtttttaaatggtgggtcaaggagctagtttacaggcttactgtgatttaagcaaatgtgaaaagtgaaaccttaattttatcaaaagaaatttctgtaaatggtatgtctccttagaatacccaaatcataattttatttgtacacactgttaggggctcatctcatgtaggcagagtataaagtattaccttttggaattaaaagccactgactgttataaagtataacaacacacatcaggttttaaaaagccttgaatggcccttgtcttaaaaagaaattaggagccaggtgcggtggcacgtgcctgtaatcccagctccttgggaggctaagacaggaggattccttgagccctggagtttgagtccagcctgggtgacatagcaagaccctgtcttaaaagaaaaatgggaagaaagacaaggtaacatgaagaaagaagagatacctagtatgatggagctgcaaatttcatggcagttcatgcagtcggtcaagaggaggattttgttttgtagtttgcagatgagcatttctaaagcattttcccttgctgtatttttttgtattataaattacattggacttcatatatataatttttttttacattatatgtctcttgtatgttttgaaactcttgtatttatgatatagcttatatgatttttttgccttggtatacattttaaaatatgaatttaaaaaatttttgtaaaaataaaattcacaaaattgttttg

SEQ ID NO: 327 - DNA, 6929 bp, Homo sapiens
  source 1..6929: mol_type = genomic DNA
aagaagaggtagcgagtggacgtgactgctctatcccgggcaaaagggatagaaccagaggtggggagtctgggcagtcggcgacccgcgaagacttgaggtgccgcagcggcatccggagtagcgccgggctccctccggggtgcagccgccgtcgggggaagggcgccacaggccgggaagacctcctccctttgtgtccagtagtggggtccaccggagggcggcccgtgggccgggcctcaccgcggcgctccgggactgtggggtcaggctgcgttgggtggacgcccacctcgccaaccttcggaggtccctgggggtcttcgtgcgccccggggctgcagagatccaggggaggcgcctgtgaggcccggacctgccccggggcgaagggtatgtggcgagacagagccctgcacccctaattcccggtggaaaactcctgttgccgtttccctccaccggcctggagtctcccagtcttgtcccggcagtgccgccctccccactaagacctaggcgcaaaggcttggctcatggttgacagctcagagagagaaagatctgagggaagatggatgcaaaagctcgaaattgtttgcttcaacatagagaagctctggaaaaggacatcaagacatcctacatcatggatcacatgattagtgatggatttttaacaatatcagaagaggaaaaagtaagaaatgagcccactcaacagcaaagagcagctatgctgattaaaatgatacttaaaaaagataatgattcctacgtatcattctacaatgctctactacatgaaggatataaagatcttgctgcccttctccatgatggcattcctgttgtctcttcttccagtggtaaagattcagttagtggaataacttcgtatgtaaggacagtcctgtgtgaaggtggagtaccacagaggccagttgtttttgtcacaaggaagaagctggtgaatgcaattcagcagaagctctccaaattgaaaggtgaaccaggatgggtcaccatacatggaatggcaggctgtgggaagtctgtattagctgcagaagctgttagagatcattcccttttagaaggttgtttcccagggggagtgcattgggtttcagttgggaaacaagacaaatctgggcttctgatgaaactgcagaatctttgcacacggttggatcaggatgagagtttttcccagaggcttccacttaatattgaagaggctaaagaccgtctccgcattctgatgcttcgcaaacacccaaggtctctcttgatcttggatgatgtttgggactcttgggtgttgaaagcttttgacagtcagtgtcagattcttcttacaaccagagacaagagtgttacagattcagtaatgggtcctaaatatgtagtccctgtggagagttccttaggaaaggaaaaaggacttgaaattttatccctttttgttaatatgaagaaggcagatttgccagaacaagctcatagtattataaaagaatgtaaaggctctccccttgtagtatctttaattggtgcacttttacgtgattttcccaatcgctgggagtactacctcaaacagcttcagaataagcagtttaagagaataaggaaatcttcgtcttatgattatgaggctctagatgaagccatgtctataagtgttgaaatgctcagagaagacatcaaagattattacacagatctttccatccttcagaaggacgttaaggtgcctacaaaggtgttatgtattctctgggacatggaaactgaagaagttgaagacatactgcaggagtttgtaaataagtctcttttattctgtgatcggaatggaaagtcgtttcgttattatttacatgatcttcaagtagattttcttacagagaagaattgcagccagcttcaggatctacataagaagataatcactcagtttcagagatatcaccagccgcatactctttcaccagatcaggaagactgtatgtattggtacaactttctggcctatcacatggccagtgccaagatgcacaaggaactttgtgctttaatgttttccctggattggattaaagcaaaaacagaacttgtaggccctgctcatctgattcatgaatttgtggaatacagacatatactagatgaaaaggattgtgcagtcagtgagaattttcaggagtttttatctttaaatggacaccttcttggacgacagccatttcctaatattgtacaactgggtctctgtgagccggaaacttcagaagtttatcagcaagctaagctgcaggccaagcaggaggtcgataatggaatgctttacctggaatggataaacaaaaaaaacatcacgaatctttcccgcttagttgtccgcccccacacagatgctgtttaccatgcctgcttttctgaggatggtcagagaatagcttcttgtggagctgataaaaccttacaggtgttcaaagctgaaacaggagagaaacttctagaaatcaaggctcatgaggatgaagtgctttgttgtgcattctctacagatgacagatttatagcaacctgctcagtggataaaaaagtgaagatttggaattctatgactggggaactagtacacacctatgatgagcactcagagcaagtcaattgctgccatttcaccaacagtagtcatcatcttctcttagccactgggtcaagtgactgcttcctcaaactttgggatttgaatcaaaaagaatgtcgaaataccatgtttggtcatacaaattcagtcaatcactgcagattttcaccagatgataagcttttggctagttgttcagctgatggaaccttaaagctttgggatgcgacatcagcaaatgagaggaaaagcattaatgtgaaacagttcttcctaaatttggaggaccctcaagaggatatggaagtgatagtgaagtgttgttcgtggtctgctgatggtgcaaggataatggtggcagcaaaaaataaaatctttttgtggaatacagactcacgttcaaaggtggctgattgcagaggacatttaagttgggttcatggtgtgatgttttctcctgatggatcatcatttttgacatcttctgatgaccagacaatcaggctctgggagacaaagaaagtatgtaagaactctgctgtaatgttaaagcaagaagtagatgttgtgtttcaagaaaatgaagtgatggtccttgcagttgaccatataagacgtctgcaactcattaatggaagaacaggtcagattgattatctgactgaagctcaagttagctgctgttgcttaagtccacatcttcagtacattgcatttggagatgaaaatggagccattgagattttagaacttgtaaacaatagaatcttccagtccaggtttcagcacaagaaaactgtatggcacatccagttcacagccgatgagaagactcttatttcaagttctgatgatgctgaaattcaggtatggaattggcaattggacaaatgtatctttctacgaggccatcaggaaacagtgaaagactttagactcttgaaaaattcaagactgctttcttggtcatttgatggaacagtgaaggtatggaatattattactggaaataaagaaaaagactttgtctgtcaccagggtacagtactttcttgtgacatttctcacgatgctaccaagttttcatctacctctgctgacaagactgcaaagatatggaatgtctcaaacggtgagcttcttcatttgtgtgctccgctttcagaagaaggagctgctacccatggaggctgggtgactgacctttgcttttctccagatggcaaaatgcttatctctgctggaggatatattaagtggtggaacgttgtcactggggaatcctcacagaccttctacacaaatggaaccaatcttaagaaaatacacgtgtcccctgacttcaaaacatatgtgactgtggataatcttggtattttatatattttacagactttagaataaaatagttaagcattaatgtagttgaactttttaaatttttgaattggaaaaaaattctaatgaaaccctgatatcaactttttataaagctcttaattgttgtgcagtattgcattcattacaaaagtgtttgtggttggatgaataatattaatgtagctttttcccaaatgaacatacctttaatcttgtttttcatgatcatcattaacagtttgtccttaggatgcaaatgaaaatgtgaatacataccttgttgtactgttggtaaaattctgtcttgatgcattcaaaatggttgacataattaatgagaagaatttggaagaaattggtattttaatactgtctgtatttattactgttatgcaggctgtgcctcagggtagcagtggcctgctttttgaaccacacttaccccaagggggttttgttctcctaaatacaatcttagaggttttttgcactctttaaatttgctttaaaaatattgtgtctgtgtgcatagtctgcagcatttcctttaattgactcaataagtgagtcttggatttagcaggcccccccaccttttttttttgtttttggagacagagtcttgctttgttgccaggctggagtgcagtggcgcgatctcggctcaccacaatcgctgcctcctgggttcaagcaattctcctgcctcagcctcccgagtagctgggactacaggtgtgcgcacatgccaggctaatttttgtatttttagtagagacggggtttcaccatgttggccgggatggtctcgatctcttgacctcatgatctacccgccttggcctcccaaagtgctgagattacaggcgtgagccaccgtgcctggccaggccccttctcttttaatggagacagggtcttgcactatcacccaggctggagtgcagtggcataatcatacctcattgcagcctcagactcctgggttcaagcaatcctcctgcctcagcctcccaagtagctgagactacaggcacgagccaccacacccagctaatttttaagttttcttgtagagacagggtctcactatgttgtctaggctggtcttgaactcttggcctcaagtaatcctcctgcctcagcctcccaaagtgttgggattgcagatatgagccactggcctggccttcagcagttctttttgtgaagtaaaacttgtatgttggaaagagtagattttattggtctacccttttctcactgtagctgctggcagccctgtgccatatctggactctagttgtcagtatctgagttggacactattcctgctccctcttgtttcttacatatcagacttcttacttgaatgaaacctgatctttcctaatcctcacttttttcttttttaaaaagcagtttctccactgctaaatgttagtcattgaggtggggccaattttaatcataagccttaataagatttttctaagaaatgtgaaatagaacaattttcatctaattccatttacttttagatgaatggcattgtgaatgccattcttttaatgaatttcaagagaattctctggttttctgtgtaattccagatgagtcactgtaactctagaagattaaccttccagccaacctattttcctttcccttgtctctctcatcctcttttccttccttctttcctttctcttcttttatctccaaggttaatcaggaaaaatagcttttgacaggggaaaaaactcaataactagctatttttgacctcctgatcaggaactttagttgaagcgtaaatctaaagaaacattttctctgaaatatattattaagggcaatggagataaattaatagtagatgtggttcccagaaaatataatcaaaattcaaagattttttttgtttctgtaactggaactaaatcaaatgattactagtgttaatagtagataacttgtttttattgttggtgcatattagtataactgtggggtaggtcggggagagggtaagggaatagatcactcagatgtattttagataagctatttagcctttgatggaatcataaatacagtgaatacaatcctttgcattgttaaggaggttttttgtttttaaatggtgggtcaaggagctagtttacaggcttactgtgatttaagcaaatgtgaaaagtgaaaccttaattttatcaaaagaaatttctgtaaatggtatgtctccttagaatacccaaatcataattttatttgtacacactgttaggggctcatctcatgtaggcagagtataaagtattaccttttggaattaaaagccactgactgttataaagtataacaacacacatcaggttttaaaaagccttgaatggcccttgtcttaaaaagaaattaggagccaggtgcggtggcacgtgcctgtaatcccagctccttgggaggctaagacaggaggattccttgagccctggagtttgagtccagcctgggtgacatagcaagaccctgtcttaaaagaaaaatgggaagaaagacaaggtaacatgaagaaagaagagatacctagtatgatggagctgcaaatttcatggcagttcatgcagtcggtcaagaggaggattttgttttgtagtttgcagatgagcatttctaaagcattttcccttgctgtatttttttgtattataaattacattggacttcatatatataatttttttttacattatatgtctcttgtatgttttgaaactcttgtatttatgatatagcttatatgatttttttgccttggtatacattttaaaatatgaatttaaaaaatttttgtaaaaataaaattcacaaaattgttttg

SEQ ID NO: 328 - DNA, 7055 bp, Homo sapiens
  source 1..7055: mol_type = genomic DNA
aagaagaggtagcgagtggacgtgactgctctatcccgggcaaaagggatagaaccagaggtggggagtctgggcagtcggcgacccgcgaagacttgaggtgccgcagcggcatccggagtagcgccgggctccctccggggtgcagccgccgtcgggggaagggcgccacaggccgggaagacctcctccctttgtgtccagtagtggggtccaccggagggcggcccgtgggccgggcctcaccgcggcgctccgggactgtggggtcaggctgcgttgggtggacgcccacctcgccaaccttcggaggtccctgggggtcttcgtgcgccccggggctgcagagatccaggggaggcgcctgtgaggcccggacctgccccggggcgaagggtatgtggcgagacagagccctgcacccctaattcccggtggaaaactcctgttgccgtttccctccaccggcctggagtctcccagtcttgtcccggcagtgccgccctccccactaagacctaggcgcaaaggcttggctcatggttgacagctcagagagagaaagatctgagggaagatggatgcaaaagctcgaaattgtttgcttcaacatagagaagctctggaaaaggacatcaagacatcctacatcatggatcacatgattagtgatggatttttaacaatatcagaagaggaaaaagtaagaaatgagcccactcaacagcaaagagcagctatgctgattaaaatgatacttaaaaaagataatgattcctacgtatcattctacaatgctctactacatgaaggatataaagatcttgctgcccttctccatgatggcattcctgttgtctcttcttccagtggtaaagattcagttagtggaataacttcgtatgtaaggacagtcctgtgtgaaggtggagtaccacagaggccagttgtttttgtcacaaggaagaagctggtgaatgcaattcagcagaagctctccaaattgaaaggtgaaccaggatgggtcaccatacatggaatggcaggctgtgggaagtctgtattagctgcagaagctgttagagatcattcccttttagaaggttgtttcccagggggagtgcattgggtttcagttgggaaacaagacaaatctgggcttctgatgaaactgcagaatctttgcacacggttggatcaggatgagagtttttcccagaggcttccacttaatattgaagaggctaaagaccgtctccgcattctgatgcttcgcaaacacccaaggtctctcttgatcttggatgatgtttgggactcttgggtgttgaaagcttttgacagtcagtgtcagattcttcttacaaccagagacaagagtgttacagattcagtaatgggtcctaaatatgtagtccctgtggagagttccttaggaaaggaaaaaggacttgaaattttatccctttttgttaatatgaagaaggcagatttgccagaacaagctcatagtattataaaagaatgtaaaggctctccccttgtagtatctttaattggtgcacttttacgtgattttcccaatcgctgggagtactacctcaaacagcttcagaataagcagtttaagagaataaggaaatcttcgtcttatgattatgaggctctagatgaagccatgtctataagtgttgaaatgctcagagaagacatcaaagattattacacagatctttccatccttcagaaggacgttaaggtgcctacaaaggtgttatgtattctctgggacatggaaactgaagaagttgaagacatactgcaggagtttgtaaataagtctcttttattctgtgatcggaatggaaagtcgtttcgttattatttacatgatcttcaagtagattttcttacagagaagaattgcagccagcttcaggatctacataagaagataatcactcagtttcagagatatcaccagccgcatactctttcaccagatcaggaagactgtatgtattggtacaactttctggcctatcacatggccagtgccaagatgcacaaggaactttgtgctttaatgttttccctggattggattaaagcaaaaacagaacttgtaggccctgctcatctgattcatgaatttgtggaatacagacatatactagatgaaaaggattgtgcagtcagtgagaattttcaggagtttttatctttaaatggacaccttcttggacgacagccatttcctaatattgtacaactgggtctctgtgagccggaaacttcagaagtttatcagcaagctaagctgcaggccaagcaggaggtcgataatggaatgctttacctggaatggataaacaaaaaaaacatcacgaatctttcccgcttagttgtccgcccccacacagatgctgtttaccatgcctgcttttctgaggatggtcagagaatagcttcttgtggagctgataaaaccttacaggtgttcaaagctgaaacaggagagaaacttctagaaatcaaggctcatgaggatgaagtgctttgttgtgcattctctacagatgacagatttatagcaacctgctcagtggataaaaaagtgaagatttggaattctatgactggggaactagtacacacctatgatgagcactcagagcaagtcaattgctgccatttcaccaacagtagtcatcatcttctcttagccactgggtcaagtgactgcttcctcaaactttgggatttgaatcaaaaagaatgtcgaaataccatgtttggtcatacaaattcagtcaatcactgcagattttcaccagatgataagcttttggctagttgttcagctgatggaaccttaaagctttgggatgcgacatcagcaaatgagaggaaaagcattaatgtgaaacagttcttcctaaatttggaggaccctcaagaggatatggaagtgatagtgaagtgttgttcgtggtctgctgatggtgcaaggataatggtggcagcaaaaaataaaatctttttgtggaatacagactcacgttcaaaggtggctgattgcagaggacatttaagttgggttcatggtgtgatgttttctcctgatggatcatcatttttgacatcttctgatgaccagacaatcaggctctgggagacaaagaaagtatgtaagaactctgctgtaatgttaaagcaagaagtagatgttgtgtttcaagaaaatgaagtgatggtccttgcagttgaccatataagacgtctgcaactcattaatggaagaacaggtcagattgattatctgactgaagctcaagttagctgctgttgcttaagtccacatcttcagtacattgcatttggagatgaaaatggagccattgagattttagaacttgtaaacaatagaatcttccagtccaggtttcagcacaagaaaactgtatggcacatccagttcacagccgatgagaagactcttatttcaagttctgatgatgctgaaattcaggtatggaattggcaattggacaaatgtatctttctacgaggccatcaggaaacagtgaaagactttagactcttgaaaaattcaagactgctttcttggtcatttgatggaacagtgaaggtatggaatattattactggaaataaagaaaaagactttgtctgtcaccagggtacagtactttcttgtgacatttctcacgatgctaccaagttttcatctacctctgctgacaagactgcaaagatctggagttttgatctccttttgccacttcatgaattgaggggccacaacggctgtgtgcgctgctctgccttctctgtggacagtaccctgctggcaacgggagatgacaatggagaaatcaggatatggaatgtctcaaacggtgagcttcttcatttgtgtgctccgctttcagaagaaggagctgctacccatggaggctgggtgactgacctttgcttttctccagatggcaaaatgcttatctctgctggaggatatattaagtggtggaacgttgtcactggggaatcctcacagaccttctacacaaatggaaccaatcttaagaaaatacacgtgtcccctgacttcaaaacatatgtgactgtggataatcttggtattttatatattttacagactttagaataaaatagttaagcattaatgtagttgaactttttaaatttttgaattggaaaaaaattctaatgaaaccctgatatcaactttttataaagctcttaattgttgtgcagtattgcattcattacaaaagtgtttgtggttggatgaataatattaatgtagctttttcccaaatgaacatacctttaatcttgtttttcatgatcatcattaacagtttgtccttaggatgcaaatgaaaatgtgaatacataccttgttgtactgttggtaaaattctgtcttgatgcattcaaaatggttgacataattaatgagaagaatttggaagaaattggtattttaatactgtctgtatttattactgttatgcaggctgtgcctcagggtagcagtggcctgctttttgaaccacacttaccccaagggggttttgttctcctaaatacaatcttagaggttttttgcactctttaaatttgctttaaaaatattgtgtctgtgtgcatagtctgcagcatttcctttaattgactcaataagtgagtcttggatttagcaggcccccccaccttttttttttgtttttggagacagagtcttgctttgttgccaggctggagtgcagtggcgcgatctcggctcaccacaatcgctgcctcctgggttcaagcaattctcctgcctcagcctcccgagtagctgggactacaggtgtgcgcacatgccaggctaatttttgtatttttagtagagacggggtttcaccatgttggccgggatggtctcgatctcttgacctcatgatctacccgccttggcctcccaaagtgctgagattacaggcgtgagccaccgtgcctggccaggccccttctcttttaatggagacagggtcttgcactatcacccaggctggagtgcagtggcataatcatacctcattgcagcctcagactcctgggttcaagcaatcctcctgcctcagcctcccaagtagctgagactacaggcacgagccaccacacccagctaatttttaagttttcttgtagagacagggtctcactatgttgtctaggctggtcttgaactcttggcctcaagtaatcctcctgcctcagcctcccaaagtgttgggattgcagatatgagccactggcctggccttcagcagttctttttgtgaagtaaaacttgtatgttggaaagagtagattttattggtctacccttttctcactgtagctgctggcagccctgtgccatatctggactctagttgtcagtatctgagttggacactattcctgctccctcttgtttcttacatatcagacttcttacttgaatgaaacctgatctttcctaatcctcacttttttcttttttaaaaagcagtttctccactgctaaatgttagtcattgaggtggggccaattttaatcataagccttaataagatttttctaagaaatgtgaaatagaacaattttcatctaattccatttacttttagatgaatggcattgtgaatgccattcttttaatgaatttcaagagaattctctggttttctgtgtaattccagatgagtcactgtaactctagaagattaaccttccagccaacctattttcctttcccttgtctctctcatcctcttttccttccttctttcctttctcttcttttatctccaaggttaatcaggaaaaatagcttttgacaggggaaaaaactcaataactagctatttttgacctcctgatcaggaactttagttgaagcgtaaatctaaagaaacattttctctgaaatatattattaagggcaatggagataaattaatagtagatgtggttcccagaaaatataatcaaaattcaaagattttttttgtttctgtaactggaactaaatcaaatgattactagtgttaatagtagataacttgtttttattgttggtgcatattagtataactgtggggtaggtcggggagagggtaagggaatagatcactcagatgtattttagataagctatttagcctttgatggaatcataaatacagtgaatacaatcctttgcattgttaaggaggttttttgtttttaaatggtgggtcaaggagctagtttacaggcttactgtgatttaagcaaatgtgaaaagtgaaaccttaattttatcaaaagaaatttctgtaaatggtatgtctccttagaatacccaaatcataattttatttgtacacactgttaggggctcatctcatgtaggcagagtataaagtattaccttttggaattaaaagccactgactgttataaagtataacaacacacatcaggttttaaaaagccttgaatggcccttgtcttaaaaagaaattaggagccaggtgcggtggcacgtgcctgtaatcccagctccttgggaggctaagacaggaggattccttgagccctggagtttgagtccagcctgggtgacatagcaagaccctgtcttaaaagaaaaatgggaagaaagacaaggtaacatgaagaaagaagagatacctagtatgatggagctgcaaatttcatggcagttcatgcagtcggtcaagaggaggattttgttttgtagtttgcagatgagcatttctaaagcattttcccttgctgtatttttttgtattataaattacattggacttcatatatataatttttttttacattatatgtctcttgtatgttttgaaactcttgtatttatgatatagcttatatgatttttttgccttggtatacattttaaaatatgaatttaaaaaatttttgtaaaaataaaattcacaaaattgttttg

SEQ ID NO: 329 - DNA, 7022 bp, Homo sapiens
  source 1..7022: mol_type = genomic DNA
aagaagaggtagcgagtggacgtgactgctctatcccgggcaaaagggatagaaccagaggtggggagtctgggcagtcggcgacccgcgaagacttgaggtgccgcagcggcatccggagtagcgccgggctccctccggggtgcagccgccgtcgggggaagggcgccacaggccgggaagacctcctccctttgtgtccagtagtggggtccaccggagggcggcccgtgggccgggcctcaccgcggcgctccgggactgtggggtcaggctgcgttgggtggacgcccacctcgccaaccttcggaggtccctgggggtcttcgtgcgccccggggctgcagagatccaggggaggcgcctgtgaggcccggacctgccccggggcgaagggtatgtggcgagacagagccctgcacccctaattcccggtggaaaactcctgttgccgtttccctccaccggcctggagtctcccagtcttgtcccggcagtgccgccctccccactaagacctaggcgcaaaggcttggctcatggttgacagctcagagagagaaagatctgagggaagatggatgcaaaagctcgaaattgtttgcttcaacatagagaagctctggaaaaggacatcaagacatcctacatcatggatcacatgattagtgatggatttttaacaatatcagaagaggaaaaagtaagaaatgagcccactcaacagcaaagagcagctatgctgattaaaatgatacttaaaaaagataatgattcctacgtatcattctacaatgctctactacatgaaggatataaagatcttgctgcccttctccatgatggcattcctgttgtctcttcttccagtgtaaggacagtcctgtgtgaaggtggagtaccacagaggccagttgtttttgtcacaaggaagaagctggtgaatgcaattcagcagaagctctccaaattgaaaggtgaaccaggatgggtcaccatacatggaatggcaggctgtgggaagtctgtattagctgcagaagctgttagagatcattcccttttagaaggttgtttcccagggggagtgcattgggtttcagttgggaaacaagacaaatctgggcttctgatgaaactgcagaatctttgcacacggttggatcaggatgagagtttttcccagaggcttccacttaatattgaagaggctaaagaccgtctccgcattctgatgcttcgcaaacacccaaggtctctcttgatcttggatgatgtttgggactcttgggtgttgaaagcttttgacagtcagtgtcagattcttcttacaaccagagacaagagtgttacagattcagtaatgggtcctaaatatgtagtccctgtggagagttccttaggaaaggaaaaaggacttgaaattttatccctttttgttaatatgaagaaggcagatttgccagaacaagctcatagtattataaaagaatgtaaaggctctccccttgtagtatctttaattggtgcacttttacgtgattttcccaatcgctgggagtactacctcaaacagcttcagaataagcagtttaagagaataaggaaatcttcgtcttatgattatgaggctctagatgaagccatgtctataagtgttgaaatgctcagagaagacatcaaagattattacacagatctttccatccttcagaaggacgttaaggtgcctacaaaggtgttatgtattctctgggacatggaaactgaagaagttgaagacatactgcaggagtttgtaaataagtctcttttattctgtgatcggaatggaaagtcgtttcgttattatttacatgatcttcaagtagattttcttacagagaagaattgcagccagcttcaggatctacataagaagataatcactcagtttcagagatatcaccagccgcatactctttcaccagatcaggaagactgtatgtattggtacaactttctggcctatcacatggccagtgccaagatgcacaaggaactttgtgctttaatgttttccctggattggattaaagcaaaaacagaacttgtaggccctgctcatctgattcatgaatttgtggaatacagacatatactagatgaaaaggattgtgcagtcagtgagaattttcaggagtttttatctttaaatggacaccttcttggacgacagccatttcctaatattgtacaactgggtctctgtgagccggaaacttcagaagtttatcagcaagctaagctgcaggccaagcaggaggtcgataatggaatgctttacctggaatggataaacaaaaaaaacatcacgaatctttcccgcttagttgtccgcccccacacagatgctgtttaccatgcctgcttttctgaggatggtcagagaatagcttcttgtggagctgataaaaccttacaggtgttcaaagctgaaacaggagagaaacttctagaaatcaaggctcatgaggatgaagtgctttgttgtgcattctctacagatgacagatttatagcaacctgctcagtggataaaaaagtgaagatttggaattctatgactggggaactagtacacacctatgatgagcactcagagcaagtcaattgctgccatttcaccaacagtagtcatcatcttctcttagccactgggtcaagtgactgcttcctcaaactttgggatttgaatcaaaaagaatgtcgaaataccatgtttggtcatacaaattcagtcaatcactgcagattttcaccagatgataagcttttggctagttgttcagctgatggaaccttaaagctttgggatgcgacatcagcaaatgagaggaaaagcattaatgtgaaacagttcttcctaaatttggaggaccctcaagaggatatggaagtgatagtgaagtgttgttcgtggtctgctgatggtgcaaggataatggtggcagcaaaaaataaaatctttttgtggaatacagactcacgttcaaaggtggctgattgcagaggacatttaagttgggttcatggtgtgatgttttctcctgatggatcatcatttttgacatcttctgatgaccagacaatcaggctctgggagacaaagaaagtatgtaagaactctgctgtaatgttaaagcaagaagtagatgttgtgtttcaagaaaatgaagtgatggtccttgcagttgaccatataagacgtctgcaactcattaatggaagaacaggtcagattgattatctgactgaagctcaagttagctgctgttgcttaagtccacatcttcagtacattgcatttggagatgaaaatggagccattgagattttagaacttgtaaacaatagaatcttccagtccaggtttcagcacaagaaaactgtatggcacatccagttcacagccgatgagaagactcttatttcaagttctgatgatgctgaaattcaggtatggaattggcaattggacaaatgtatctttctacgaggccatcaggaaacagtgaaagactttagactcttgaaaaattcaagactgctttcttggtcatttgatggaacagtgaaggtatggaatattattactggaaataaagaaaaagactttgtctgtcaccagggtacagtactttcttgtgacatttctcacgatgctaccaagttttcatctacctctgctgacaagactgcaaagatctggagttttgatctccttttgccacttcatgaattgaggggccacaacggctgtgtgcgctgctctgccttctctgtggacagtaccctgctggcaacgggagatgacaatggagaaatcaggatatggaatgtctcaaacggtgagcttcttcatttgtgtgctccgctttcagaagaaggagctgctacccatggaggctgggtgactgacctttgcttttctccagatggcaaaatgcttatctctgctggaggatatattaagtggtggaacgttgtcactggggaatcctcacagaccttctacacaaatggaaccaatcttaagaaaatacacgtgtcccctgacttcaaaacatatgtgactgtggataatcttggtattttatatattttacagactttagaataaaatagttaagcattaatgtagttgaactttttaaatttttgaattggaaaaaaattctaatgaaaccctgatatcaactttttataaagctcttaattgttgtgcagtattgcattcattacaaaagtgtttgtggttggatgaataatattaatgtagctttttcccaaatgaacatacctttaatcttgtttttcatgatcatcattaacagtttgtccttaggatgcaaatgaaaatgtgaatacataccttgttgtactgttggtaaaattctgtcttgatgcattcaaaatggttgacataattaatgagaagaatttggaagaaattggtattttaatactgtctgtatttattactgttatgcaggctgtgcctcagggtagcagtggcctgctttttgaaccacacttaccccaagggggttttgttctcctaaatacaatcttagaggttttttgcactctttaaatttgctttaaaaatattgtgtctgtgtgcatagtctgcagcatttcctttaattgactcaataagtgagtcttggatttagcaggcccccccaccttttttttttgtttttggagacagagtcttgctttgttgccaggctggagtgcagtggcgcgatctcggctcaccacaatcgctgcctcctgggttcaagcaattctcctgcctcagcctcccgagtagctgggactacaggtgtgcgcacatgccaggctaatttttgtatttttagtagagacggggtttcaccatgttggccgggatggtctcgatctcttgacctcatgatctacccgccttggcctcccaaagtgctgagattacaggcgtgagccaccgtgcctggccaggccccttctcttttaatggagacagggtcttgcactatcacccaggctggagtgcagtggcataatcatacctcattgcagcctcagactcctgggttcaagcaatcctcctgcctcagcctcccaagtagctgagactacaggcacgagccaccacacccagctaatttttaagttttcttgtagagacagggtctcactatgttgtctaggctggtcttgaactcttggcctcaagtaatcctcctgcctcagcctcccaaagtgttgggattgcagatatgagccactggcctggccttcagcagttctttttgtgaagtaaaacttgtatgttggaaagagtagattttattggtctacccttttctcactgtagctgctggcagccctgtgccatatctggactctagttgtcagtatctgagttggacactattcctgctccctcttgtttcttacatatcagacttcttacttgaatgaaacctgatctttcctaatcctcacttttttcttttttaaaaagcagtttctccactgctaaatgttagtcattgaggtggggccaattttaatcataagccttaataagatttttctaagaaatgtgaaatagaacaattttcatctaattccatttacttttagatgaatggcattgtgaatgccattcttttaatgaatttcaagagaattctctggttttctgtgtaattccagatgagtcactgtaactctagaagattaaccttccagccaacctattttcctttcccttgtctctctcatcctcttttccttccttctttcctttctcttcttttatctccaaggttaatcaggaaaaatagcttttgacaggggaaaaaactcaataactagctatttttgacctcctgatcaggaactttagttgaagcgtaaatctaaagaaacattttctctgaaatatattattaagggcaatggagataaattaatagtagatgtggttcccagaaaatataatcaaaattcaaagattttttttgtttctgtaactggaactaaatcaaatgattactagtgttaatagtagataacttgtttttattgttggtgcatattagtataactgtggggtaggtcggggagagggtaagggaatagatcactcagatgtattttagataagctatttagcctttgatggaatcataaatacagtgaatacaatcctttgcattgttaaggaggttttttgtttttaaatggtgggtcaaggagctagtttacaggcttactgtgatttaagcaaatgtgaaaagtgaaaccttaattttatcaaaagaaatttctgtaaatggtatgtctccttagaatacccaaatcataattttatttgtacacactgttaggggctcatctcatgtaggcagagtataaagtattaccttttggaattaaaagccactgactgttataaagtataacaacacacatcaggttttaaaaagccttgaatggcccttgtcttaaaaagaaattaggagccaggtgcggtggcacgtgcctgtaatcccagctccttgggaggctaagacaggaggattccttgagccctggagtttgagtccagcctgggtgacatagcaagaccctgtcttaaaagaaaaatgggaagaaagacaaggtaacatgaagaaagaagagatacctagtatgatggagctgcaaatttcatggcagttcatgcagtcggtcaagaggaggattttgttttgtagtttgcagatgagcatttctaaagcattttcccttgctgtatttttttgtattataaattacattggacttcatatatataatttttttttacattatatgtctcttgtatgttttgaaactcttgtatttatgatatagcttatatgatttttttgccttggtatacattttaaaatatgaatttaaaaaatttttgtaaaaataaaattcacaaaattgttttg

SEQ ID NO: 330 - DNA, 3744 bp, Homo sapiens
  source 1..3744: mol_type = genomic DNA
ggaagatggatgcaaaagctcgaaattgtttgcttcaacatagagaagctctggaaaaggacatcaagacatcctacatcatggatcacatgattagtgatggatttttaacaatatcagaagaggaaaaagtaagaaatgagcccactcaacagcaaagagcagctatgctgattaaaatgatacttaaaaaagataatgattcctacgtatcattctacaatgctctactacatgaaggatataaagatcttgctgcccttctccatgatggcattcctgttgtctcttcttccagtggtaaagattcagttagtggaataacttcgtatgtaaggacagtcctgtgtgaaggtggagtaccacagaggccagttgtttttgtcacaaggaagaagctggtgaatgcaattcagcagaagctctccaaattgaaaggtgaaccaggatgggtcaccatacatggaatggcaggctgtgggaagtctgtattagctgcagaagctgttagagatcattcccttttagaaggttgtttcccagggggagtgcattgggtttcagttgggaaacaagacaaatctgggcttctgatgaaactgcagaatctttgcacacggttggatcaggatgagagtttttcccagaggcttccacttaatattgaagaggctaaagaccgtctccgcattctgatgcttcgcaaacacccaaggtctctcttgatcttggatgatgtttgggactcttgggtgttgaaagcttttgacagtcagtgtcagattcttcttacaaccagagacaagagtgttacagattcagtaatgggtcctaaatatgtagtccctgtggagagttccttaggaaaggaaaaaggacttgaaattttatccctttttgttaatatgaagaaggcagatttgccagaacaagctcatagtattataaaagaatgtaaaggctctccccttgtagtatctttaattggtgcacttttacgtgattttcccaatcgctgggagtactacctcaaacagcttcagaataagcagtttaagagaataaggaaatcttcgtcttatgattatgaggctctagatgaagccatgtctataagtgttgaaatgctcagagaagacatcaaagattattacacagatctttccatccttcagaaggacgttaaggtgcctacaaaggtgttatgtattctctgggacatggaaactgaagaagttgaagacatactgcaggagtttgtaaataagtctcttttattctgtgatcggaatggaaagtcgtttcgttattatttacatgatcttcaagtagattttcttacagagaagaattgcagccagcttcaggatctacataagaagataatcactcagtttcagagatatcaccagccgcatactctttcaccagatcaggaagactgtatgtattggtacaactttctggcctatcacatggccagtgccaagatgcacaaggaactttgtgctttaatgttttccctggattggattaaagcaaaaacagaacttgtaggccctgctcatctgattcatgaatttgtggaatacagacatatactagatgaaaaggattgtgcagtcagtgagaattttcaggagtttttatctttaaatggacaccttcttggacgacagccatttcctaatattgtacaactgggtctctgtgagccggaaacttcagaagtttatcagcaagctaagctgcaggccaagcaggaggtcgataatggaatgctttacctggaatggataaacaaaaaaaacatcacgaatctttcccgcttagttgtccgcccccacacagatgctgtttaccatgcctgcttttctgaggatggtcagagaatagcttcttgtggagctgataaaaccttacaggtgttcaaagctgaaacaggagagaaacttctagaaatcaaggctcatgaggatgaagtgctttgttgtgcattctctacagatgacagatttatagcaacctgctcagtggataaaaaagtgaagatttggaattctatgactggggaactagtacacacctatgatgagcactcagagcaagtcaattgctgccatttcaccaacagtagtcatcatcttctcttagccactgggtcaagtgactgcttcctcaaactttgggatttgaatcaaaaagaatgtcgaaataccatgtttggtcatacaaattcagtcaatcactgcagattttcaccagatgataagcttttggctagttgttcagctgatggaaccttaaagctttgggatgcgacatcagcaaatgagaggaaaagcattaatgtgaaacagttcttcctaaatttggaggaccctcaagaggatatggaagtgatagtgaagtgttgttcgtggtctgctgatggtgcaaggataatggtggcagcaaaaaataaaatctttttgtggaatacagactcacgttcaaaggtggctgattgcagaggacatttaagttgggttcatggtgtgatgttttctcctgatggatcatcatttttgacatcttctgatgaccagacaatcaggctctgggagacaaagaaagtatgtaagaactctgctgtaatgttaaagcaagaagtagatgttgtgtttcaagaaaatgaagtgatggtccttgcagttgaccatataagacgtctgcaactcattaatggaagaacaggtcagattgattatctgactgaagctcaagttagctgctgttgcttaagtccacatcttcagtacattgcatttggagatgaaaatggagccattgagattttagaacttgtaaacaatagaatcttccagtccaggtttcagcacaagaaaactgtatggcacatccagttcacagccgatgagaagactcttatttcaagttctgatgatgctgaaattcaggtatggaattggcaattggacaaatgtatctttctacgaggccatcaggaaacagtgaaagactttagactcttgaaaaattcaagactgctttcttggtcatttgatggaacagtgaaggtatggaatattattactggaaataaagaaaaagactttgtctgtcaccagggtacagtactttcttgtgacatttctcacgatgctaccaagttttcatctacctctgctgacaagactgcaaagatctggagttttgatctccttttgccacttcatgaattgaggggccacaacggctgtgtgcgctgctctgccttctctgtggacagtaccctgctggcaacgggagatgacaatggagaaatcaggatatggaatgtctcaaacggtgagcttcttcatttgtgtgctccgctttcagaagaaggagctgctacccatggaggctgggtgactgacctttgcttttctccagatggcaaaatgcttatctctgctggaggatatattaagtggtggaacgttgtcactggggaatcctcacagaccttctacacaaatggaaccaatcttaagaaaatacacgtgtcccctgacttcaaaacatatgtgactgtggataatcttggtattttatatattttacagactttagaataaaatagttaagcattaatgtagttgaactttttaaatttttgaattggaaaaaaattctaatgaaaccctgatatcaactttttataaagctcttaattgttgtgcagtattgcattcatta

SEQ ID NO: 331 - DNA, 3492 bp, Homo sapiens
  source 1..3492: mol_type = genomic DNA
atggatgcaaaagctcgaaattgtttgcttcaacatagagaagctctggaaaaggacatcaagacatcctacatcatggatcacatgattagtgatggatttttaacaatatcagaagaggaaaaagtaagaaatgagcccactcaacagcaaagagcagctatgctgattaaaatgatacttaaaaaagataatgattcctacgtatcattctacaatgctctactacatgaaggatataaagatcttgctgcccttctccatgatggcattcctgttgtctcttcttccagtggtaaagattcagttagtggaataacttcgtatgtaaggacagtcctgtgtgaaggtggagtaccacagaggccagttgtttttgtcacaaggaagaagctggtgaatgcaattcagcagaagctctccaaattgaaaggtgaaccaggatgggtcaccatacatggaatggcaggctgtgggaagtctgtattagctgcagaagctgttagagatcattcccttttagaaggttgtttcccagggggagtgcattgggtttcagttgggaaacaagacaaatctgggcttctgatgaaactgcagaatctttgcacacggttggatcaggatgagagtttttcccagaggcttccacttaatattgaagaggctaaagaccgtctccgcattctgatgcttcgcaaacacccaaggtctctcttgatcttggatgatgtttgggactcttgggtgttgaaagcttttgacagtcagtgtcagattcttcttacaaccagagacaagagtgttacagattcagtaatgggtcctaaatatgtagtccctgtggagagttccttaggaaaggaaaaaggacttgaaattttatccctttttgttaatatgaagaaggcagatttgccagaacaagctcatagtattataaaagaatgtaaaggctctccccttgtagtatctttaattggtgcacttttacgtgattttcccaatcgctgggagtactacctcaaacagcttcagaataagcagtttaagagaataaggaaatcttcgtcttatgattatgaggctctagatgaagccatgtctataagtgttgaaatgctcagagaagacatcaaagattattacacagatctttccatccttcagaaggacgttaaggtgcctacaaaggtgttatgtattctctgggacatggaaactgaagaagttgaagacatactgcaggagtttgtaaataagtctcttttattctgtgatcggaatggaaagtcgtttcgttattatttacatgatcttcaagtagattttcttacagagaagaattgcagccagcttcaggatctacataagaagataatcactcagtttcagagatatcaccagccgcatactctttcaccagatcaggaagactgtatgtattggtacaactttctggcctatcacatggccagtgccaagatgcacaaggaactttgtgctttaatgttttccctggattggattaaagcaaaaacagaacttgtaggccctgctcatctgattcatgaatttgtggaatacagacatatactagatgaaaaggattgtgcagtcagtgagaattttcaggagtttttatctttaaatggacaccttcttggacgacagccatttcctaatattgtacaactgggtctctgtgagccggaaacttcagaagtttatcagcaagctaagctgcaggccaagcaggaggtcgataatggaatgctttacctggaatggataaacaaaaaaaacatcacgaatctttcccgcttagttgtccgcccccacacagatgctgtttaccatgcctgcttttctgaggatggtcagagaatagcttcttgtggagctgataaaaccttacaggtgttcaaagctgaaacaggagagaaacttctagaaatcaaggctcatgaggatgaagtgctttgttgtgcattctctacagatgacagatttatagcaacctgctcagtggataaaaaagtgaagatttggaattctatgactggggaactagtacacacctatgatgagcactcagagcaagtcaattgctgccatttcaccaacagtagtcatcatcttctcttagccactgggtcaagtgactgcttcctcaaactttgggatttgaatcaaaaagaatgtcgaaataccatgtttggtcatacaaattcagtcaatcactgcagattttcaccagatgataagcttttggctagttgttcagctgatggaaccttaaagctttgggatgcgacatcagcaaatgagaggaaaagcattaatgtgaaacagttcttcctaaatttggaggaccctcaagaggatatggaagtgatagtgaagtgttgttcgtggtctgctgatggtgcaaggataatggtggcagcaaaaaataaaatctttttgtggaatacagactcacgttcaaaggtggctgattgcagaggacatttaagttgggttcatggtgtgatgttttctcctgatggatcatcatttttgacatcttctgatgaccagacaatcaggctctgggagacaaagaaagtatgtaagaactctgctgtaatgttaaagcaagaagtagatgttgtgtttcaagaaaatgaagtgatggtccttgcagttgaccatataagacgtctgcaactcattaatggaagaacaggtcagattgattatctgactgaagctcaagttagctgctgttgcttaagtccacatcttcagtacattgcatttggagatgaaaatggagccattgagattttagaacttgtaaacaatagaatcttccagtccaggtttcagcacaagaaaactgtatggcacatccagttcacagccgatgagaagactcttatttcaagttctgatgatgctgaaattcaggtatggaattggcaattggacaaatgtatctttctacgaggccatcaggaaacagtgaaagactttagactcttgaaaaattcaagactgctttcttggtcatttgatggaacagtgaaggtatggaatattattactggaaataaagaaaaagactttgtctgtcaccagggtacagtactttcttgtgacatttctcacgatgctaccaagttttcatctacctctgctgacaagactgcaaagatatggaatgtctcaaacggtgagcttcttcatttgtgtgctccgctttcagaagaaggagctgctacccatggaggctgggtgactgacctttgcttttctccagatggcaaaatgcttatctctgctggaggatatattaagtggtggaacgttgtcactggggaatcctcacagaccttctacacaaatggaaccaatcttaagaaaatacacgtgtcccctgacttcaaaacatatgtgactgtggataatcttggtattttatatattttacagactttagaataa

SEQ ID NO: 332 - DNA, 6581 bp, Homo sapiens
  source 1..6581: mol_type = genomic DNA
agggaagatggatgcaaaagctcgaaattgtttgcttcaacatagagaagctctggaaaaggacatcaagacatcctacatcatggatcacatgattagtgatggatttttaacaatatcagaagaggaaaaagtaagaaatgagcccactcaacagcaaagagcagctatgctgattaaaatgatacttaaaaaagataatgattcctacgtatcattctacaatgctctactacatgaaggatataaagatcttgctgcccttctccatgatggcattcctgttgtctcttcttccagtgtaaggacagtcctgtgtgaaggtggagtaccacagaggccagttgtttttgtcacaaggaagaagctggtgaatgcaattcagcagaagctctccaaattgaaaggtgaaccaggatgggtcaccatacatggaatggcaggctgtgggaagtctgtattagctgcagaagctgttagagatcattcccttttagaaggttgtttcccagggggagtgcattgggtttcagttgggaaacaagacaaatctgggcttctgatgaaactgcagaatctttgcacacggttggatcaggatgagagtttttcccagaggcttccacttaatattgaagaggctaaagaccgtctccgcattctgatgcttcgcaaacacccaaggtctctcttgatcttggatgatgtttgggactcttgggtgttgaaagcttttgacagtcagtgtcagattcttcttacaaccagagacaagagtgttacagattcagtaatgggtcctaaatatgtagtccctgtggagagttccttaggaaaggaaaaaggacttgaaattttatccctttttgttaatatgaagaaggcagatttgccagaacaagctcatagtattataaaagaatgtaaaggctctccccttgtagtatctttaattggtgcacttttacgtgattttcccaatcgctgggagtactacctcaaacagcttcagaataagcagtttaagagaataaggaaatcttcgtcttatgattatgaggctctagatgaagccatgtctataagtgttgaaatgctcagagaagacatcaaagattattacacagatctttccatccttcagaaggacgttaaggtgcctacaaaggtgttatgtattctctgggacatggaaactgaagaagttgaagacatactgcaggagtttgtaaataagtctcttttattctgtgatcggaatggaaagtcgtttcgttattatttacatgatcttcaagtagattttcttacagagaagaattgcagccagcttcaggatctacataagaagataatcactcagtttcagagatatcaccagccgcatactctttcaccagatcaggaagactgtatgtattggtacaactttctggcctatcacatggccagtgccaagatgcacaaggaactttgtgctttaatgttttccctggattggattaaagcaaaaacagaacttgtaggccctgctcatctgattcatgaatttgtggaatacagacatatactagatgaaaaggattgtgcagtcagtgagaattttcaggagtttttatctttaaatggacaccttcttggacgacagccatttcctaatattgtacaactgggtctctgtgagccggaaacttcagaagtttatcagcaagctaagctgcaggccaagcaggaggtcgataatggaatgctttacctggaatggataaacaaaaaaaacatcacgaatctttcccgcttagttgtccgcccccacacagatgctgtttaccatgcctgcttttctgaggatggtcagagaatagcttcttgtggagctgataaaaccttacaggtgttcaaagctgaaacaggagagaaacttctagaaatcaaggctcatgaggatgaagtgctttgttgtgcattctctacagatgacagatttatagcaacctgctcagtggataaaaaagtgaagatttggaattctatgactggggaactagtacacacctatgatgagcactcagagcaagtcaattgctgccatttcaccaacagtagtcatcatcttctcttagccactgggtcaagtgactgcttcctcaaactttgggatttgaatcaaaaagaatgtcgaaataccatgtttggtcatacaaattcagtcaatcactgcagattttcaccagatgataagcttttggctagttgttcagctgatggaaccttaaagctttgggatgcgacatcagcaaatgagaggaaaagcattaatgtgaaacagttcttcctaaatttggaggaccctcaagaggatatggaagtgatagtgaagtgttgttcgtggtctgctgatggtgcaaggataatggtggcagcaaaaaataaaatctttctttttgacattcatactagtggcctattgggagaaatccacacgggccatcacagcaccatccagtactgtgacttctccccacaaaaccatttggcagtggttgctttgtcccagtactgtgtagagttgtggaatacagactcacgttcaaaggtggctgattgcagaggacatttaagttgggttcatggtgtgatgttttctcctgatggatcatcatttttgacatcttctgatgaccagacaatcaggctctgggagacaaagaaagtatgtaagaactctgctgtaatgttaaagcaagaagtagatgttgtgtttcaagaaaatgaagtgatggtccttgcagttgaccatataagacgtctgcaactcattaatggaagaacaggtcagattgattatctgactgaagctcaagttagctgctgttgcttaagtccacatcttcagtacattgcatttggagatgaaaatggagccattgagattttagaacttgtaaacaatagaatcttccagtccaggtttcagcacaagaaaactgtatggcacatccagttcacagccgatgagaagactcttatttcaagttctgatgatgctgaaattcaggtatggaattggcaattggacaaatgtatctttctacgaggccatcaggaaacagtgaaagactttagactcttgaaaaattcaagactgctttcttggtcatttgatggaacagtgaaggtatggaatattattactggaaataaagaaaaagactttgtctgtcaccagggtacagtactttcttgtgacatttctcacgatgctaccaagttttcatctacctctgctgacaagactgcaaagatctggagttttgatctccttttgccacttcatgaattgaggggccacaacggctgtgtgcgctgctctgccttctctgtggacagtaccctgctggcaacgggagatgacaatggagaaatcaggatatggaatgtctcaaacggtgagcttcttcatttgtgtgctccgctttcagaagaaggagctgctacccatggaggctgggtgactgacctttgcttttctccagatggcaaaatgcttatctctgctggaggatatattaagtggtggaacgttgtcactggggaatcctcacagaccttctacacaaatggaaccaatcttaagaaaatacacgtgtcccctgacttcaaaacatatgtgactgtggataatcttggtattttatatattttacagactttagaataaaatagttaagcattaatgtagttgaactttttaaatttttgaattggaaaaaaattctaatgaaaccctgatatcaactttttataaagctcttaattgttgtgcagtattgcattcattacaaaagtgtttgtggttggatgaataatattaatgtagctttttcccaaatgaacatacctttaatcttgtttttcatgatcatcattaacagtttgtccttaggatgcaaatgaaaatgtgaatacataccttgttgtactgttggtaaaattctgtcttgatgcattcaaaatggttgacataattaatgagaagaatttggaagaaattggtattttaatactgtctgtatttattactgttatgcaggctgtgcctcagggtagcagtggcctgctttttgaaccacacttaccccaagggggttttgttctcctaaatacaatcttagaggttttttgcactctttaaatttgctttaaaaatattgtgtctgtgtgcatagtctgcagcatttcctttaattgactcaataagtgagtcttggatttagcaggcccccccaccttttttttttgtttttggagacagagtcttgctttgttgccaggctggagtgcagtggcgcgatctcggctcaccacaatcgctgcctcctgggttcaagcaattctcctgcctcagcctcccgagtagctgggactacaggtgtgcgcacatgccaggctaatttttgtatttttagtagagacggggtttcaccatgttggccgggatggtctcgatctcttgacctcatgatctacccgccttggcctcccaaagtgctgagattacaggcgtgagccaccgtgcctggccaggccccttctcttttaatggagacagggtcttgcactatcacccaggctggagtgcagtggcataatcatacctcattgcagcctcagactcctgggttcaagcaatcctcctgcctcagcctcccaagtagctgagactacaggcacgagccaccacacccagctaatttttaagttttcttgtagagacagggtctcactatgttgtctaggctggtcttgaactcttggcctcaagtaatcctcctgcctcagcctcccaaagtgttgggattgcagatatgagccactggcctggccttcagcagttctttttgtgaagtaaaacttgtatgttggaaagagtagattttattggtctacccttttctcactgtagctgctggcagccctgtgccatatctggactctagttgtcagtatctgagttggacactattcctgctccctcttgtttcttacatatcagacttcttacttgaatgaaacctgatctttcctaatcctcacttttttcttttttaaaaagcagtttctccactgctaaatgttagtcattgaggtggggccaattttaatcataagccttaataagatttttctaagaaatgtgaaatagaacaattttcatctaattccatttacttttagatgaatggcattgtgaatgccattcttttaatgaatttcaagagaattctctggttttctgtgtaattccagatgagtcactgtaactctagaagattaaccttccagccaacctattttcctttcccttgtctctctcatcctcttttccttccttctttcctttctcttcttttatctccaaggttaatcaggaaaaatagcttttgacaggggaaaaaactcaataactagctatttttgacctcctgatcaggaactttagttgaagcgtaaatctaaagaaacattttctctgaaatatattattaagggcaatggagataaattaatagtagatgtggttcccagaaaatataatcaaaattcaaagattttttttgtttctgtaactggaactaaatcaaatgattactagtgttaatagtagataacttgtttttattgttggtgcatattagtataactgtggggtaggtcggggagagggtaagggaatagatcactcagatgtattttagataagctatttagcctttgatggaatcataaatacagtgaatacaatcctttgcattgttaaggaggttttttgtttttaaatggtgggtcaaggagctagtttacaggcttactgtgatttaagcaaatgtgaaaagtgaaaccttaattttatcaaaagaaatttctgtaaatggtatgtctccttagaatacccaaatcataattttatttgtacacactgttaggggctcatctcatgtaggcagagtataaagtattaccttttggaattaaaagccactgactgttataaagtataacaacacacatcaggttttaaaaagccttgaatggcccttgtcttaaaaagaaattaggagccaggtgcggtggcacgtgcctgtaatcccagctccttgggaggctaagacaggaggattccttgagccctggagtttgagtccagcctgggtgacatagcaagaccctgtcttaaaagaaaaatgggaagaaagacaaggtaacatgaagaaagaagagatacctagtatgatggagctgcaaatttcatggcagttcatgcagtcggtcaagaggaggattttgttttgtagtttgcagatgagcatttctaaagcattttcccttgctgtatttttttgtattataaattacattggacttcatatatataatttttttttacattatatgtctcttgtatgttttgaaactcttgtatttatgatatagcttatatgatttttttgccttggtatacattttaaaatatgaatttaaaaaatttttgtaaaaataaaattcacaaaattgttttg

SEQ ID NO: 333 - DNA, 5444 bp, Homo sapiens
  source 1..5444: mol_type = genomic DNA
acttctacgcgcgcgggcatgagccgtggcaggagtgcgcggcggcagcggtggccgccccttggggcttggggtgtgtttatttgcataagcgggcgcgcgccgtccgggctgggtggatccggcgggatttgactgctccgctgtccagaggcggagaagaagaggtagcgagtggacgtgactgctctatcccgggcaaaagggatagaaccagaggtggggagtctgggcagtcggcgacccgcgaagacttgaggtgccgcagcggcatccggagtagcgccgggctccctccggggtgcagccgccgtcgggggaagggcgccacaggccgggaagacctcctccctttgtgtccagtagtggggtccaccggagggcggcccgtgggccgggcctcaccgcggcgctccgggactgtggggtcaggctgcgttgggtggacgcccacctcgccaaccttcggaggtccctgggggtcttcgtgcgccccggggctgcagagatccaggggaggcgcctgtgaggcccggacctgccccggggcgaagggtatgtggcgagacagagccctgcacccctaattcccggtggaaaactcctgttgccgtttccctccaccggcctggagtctcccagtcttgtcccggcagtgccgccctccccactaagacctaggcgcaaaggcttggctcatggttgacagctcagagagagaaagatctgagggaagatggatgcaaaagctcgaaattgtttgcttcaacatagagaagctctggaaaaggacatcaagacatcctacatcatggatcacatgattagtgatggatttttaacaatatcagaagaggaaaaagtaagaaatgagcccactcaacagcaaagagcagctatgctgattaaaatgatacttaaaaaagataatgattcctacgtatcattctacaatgctctactacatgaaggatataaagatcttgctgcccttctccatgatggcattcctgttgtctcttcttccagtggtaaagattcagttagtggaataacttcgtatgtaaggacagtcctgtgtgaaggtggagtaccacagaggccagttgtttttgtcacaaggaagaagctggtgaatgcaattcagcagaagctctccaaattgaaaggtgaaccaggatgggtcaccatacatggaatggcaggctgtgggaagtctgtattagctgcagaagctgttagagatcattcccttttagaaggttgtttcccagggggagtgcattgggtttcagttgggaaacaagacaaatctgggcttctgatgaaactgcagaatctttgcacacggttggatcaggatgagagtttttcccagaggcttccacttaatattgaagaggctaaagaccgtctccgcattctgatgcttcgcaaacacccaaggtctctcttgatcttggatgatgtttgggactcttgggtgttgaaagcttttgacagtcagtgtcagattcttcttacaaccagagacaagagtgttacagattcagtaatgggtcctaaatatgtagtccctgtggagagttccttaggaaaggaaaaaggacttgaaattttatccctttttgttaatatgaagaaggcagatttgccagaacaagctcatagtattataaaagaatgtaaaggctctccccttgtagtatctttaattggtgcacttttacgtgattttcccaatcgctgggagtactacctcaaacagcttcagaataagcagtttaagagaataaggaaatcttcgtcttatgattatgaggctctagatgaagccatgtctataagtgttgaaatgctcagagaagacatcaaagattattacacagatctttccatccttcagaaggacgttaaggtgcctacaaaggtgttatgtattctctgggacatggaaactgaagaagttgaagacatactgcaggagtttgtaaataagtctcttttattctgtgatcggaatggaaagtcgtttcgttattatttacatgatcttcaagtagattttcttacagagaagaattgcagccagcttcaggatctacataagaagataatcactcagtttcagagatatcaccagccgcatactctttcaccagatcaggaagactgtatgtattggtacaactttctggcctatcacatggccagtgccaagatgcacaaggaactttgtgctttaatgttttccctggattggattaaagcaaaaacagaacttgtaggccctgctcatctgattcatgaatttgtggaatacagacatatactagatgaaaaggattgtgcagtcagtgagaattttcaggagtttttatctttaaatggacaccttcttggacgacagccatttcctaatattgtacaactgggtctctgtgagccggaaacttcagaagtttatcagcaagctaagctgcaggccaagcaggaggtcgataatggaatgctttacctggaatggataaacaaaaaaaacatcacgaatctttcccgcttagttgtccgcccccacacagatgctgtttaccatgcctgcttttctgaggatggtcagagaatagcttcttgtggagctgataaaaccttacaggtgttcaaagctgaaacaggagagaaacttctagaaatcaaggctcatgaggatgaagtgctttgttgtgcattctctacagatgacagatttatagcaacctgctcagtggataaaaaagtgaagatttggaattctatgactggggaactagtacacacctatgatgagcactcagagcaagtcaattgctgccatttcaccaacagtagtcatcatcttctcttagccactgggtcaagtgactgcttcctcaaactttgggatttgaatcaaaaagaatgtcgaaataccatgtttggtcatacaaattcagtcaatcactgcagattttcaccagatgataagcttttggctagttgttcagctgatggaaccttaaagctttgggatgcgacatcagcaaatgagaggaaaagcattaatgtgaaacagttcttcctaaatttggaggaccctcaagaggatatggaagtgatagtgaagtgttgttcgtggtctgctgatggtgcaaggataatggtggcagcaaaaaataaaatctttctttttgacattcatactagtggcctattgggagaaatccacacgggccatcacagcaccatccagtactgtgacttctccccacaaaaccatttggcagtggttgctttgtcccagtactgtgtagagttgtggaatacagactcacgttcaaaggtggctgattgcagaggacatttaagttgggttcatggtgtgatgttttctcctgatggatcatcatttttgacatcttctgatgaccagacaatcaggctctgggagacaaagaaagtatgtaagaactctgctgtaatgttaaagcaagaagtagatgttgtgtttcaagaaaatgaagtgatggtccttgcagttgaccatataagacgtctgcaactcattaatggaagaacaggtcagattgattatctgactgaagctcaagttagctgctgttgcttaagtccacatcttcagtacattgcatttggagatgaaaatggagccattgagattttagaacttgtaaacaatagaatcttccagtccaggtttcagcacaagaaaactgtatggcacatccagttcacagccgatgagaagactcttatttcaagttctgatgatgctgaaattcaggtatggaattggcaattggacaaatgtatctttctacgaggccatcaggaaacagtgaaagactttagactcttgaaaaattcaagactgctttcttggtcatttgatggaacagtgaaggtatggaatattattactggaaataaagaaaaagactttgtctgtcaccagggtacagtactttcttgtgacatttctcacgatgctaccaagttttcatctacctctgctgacaagactgcaaagatctggagttttgatctccttttgccacttcatgaattgaggggccacaacggctgtgtgcgctgctctgccttctctgtggacagtaccctgctggcaacgggagatgacaatggagaaatcaggatatggaatgtctcaaacggtgagcttcttcatttgtgtgctccgctttcagaagaaggagctgctacccatggaggctgggtgactgacctttgcttttctccagatggcaaaatgcttatctctgctggaggatatattaagtggtggaacgttgtcactggggaatcctcacagaccttctacacaaatggaaccaatcttaagaaaatacacgtgtcccctgacttcaaaacatatgtgactgtggataatcttggtattttatatattttacagactttagaataaaatagttaagcattaatgtagttgaactttttaaatttttgaattggaaaaaaattctaatgaaaccctgatatcaactttttataaagctcttaattgttgtgcagtattgcattcattacaaaagtgtttgtggttggatgaataatattaatgtagctttttcccaaatgaacatacctttaatcttgtttttcatgatcatcattaacagtttgtccttaggatgcaaatgaaaatgtgaatacataccttgttgtactgttggtaaaattctgtcttgatgcattcaaaatggttgacataattaatgagaagaatttggaagaaattggtattttaatactgtctgtatttattactgttatgcaggctgtgcctcagggtagcagtggcctgctttttgaaccacacttaccccaagggggttttgttctcctaaatacaatcttagaggttttttgcactctttaaatttgctttaaaaatattgtgtctgtgtgcatagtctgcagcatttcctttaattgactcaataagtgagtcttggatttagcaggcccccccaccttttttttttgtttttggagacagagtcttgctttgttgccaggctggagtgcagtggcgcgatctcggctcaccacaatcgctgcctcctgggttcaagcaattctcctgcctcagcctcccgagtagctgggactacaggtgtgcgcacatgccaggctaatttttgtatttttagtagagacggggtttcaccatgttggccgggatggtctcgatctcttgacctcatgatctacccgccttggcctcccaaagtgctgagattacaggcgtgagccaccgtgcctggccaggccccttctcttttaatggagacagggtcttgcactatcacccaggctggagtgcagtggcataatcatacctcattgcagcctcagactcctgg

SEQ ID NO: 334 - DNA, 1143 bp, Homo sapiens
  source 1..1143: mol_type = genomic DNA
tagctcatggttgacagctcagagagagaaagatctgagggaagatggatgcaaaagctcgaaattgtttgcttcaacatagagaagctctggaaaaggacatcaagacatcctacatcatggatcacatgattagtgatggatttttaacaatatcagaagaggaaaaagtaagaaatgagcccactcaacagcaaagagcagctatgctgattaaaatgatacttaaaaaagataatgattcctacgtatcattctacaatgctctactacatgaaggatataaagatcttgctgcccttctccatgatggcattcctgttgtctcttcttccagtggtaaagattcagttagtggaataacttcgtatgtaaggacagtcctgtgtgaaggtggagtaccacagaggccagttgtttttgtcacaaggaagaagctggtgaatgcaattcagcagaagctctccaaattgaaaggtgaaccaggatgggtcaccatacatggaatggcaggctgtgggaagtctgtattagctgcagaagctgttagagatcattcccttttagaaggttgtttcccagggggagtgcattgggtttcagttgggaaacaagacaaatctgggcttctgatgaaactgcagaatctttgcacacggttggatcaggatgagagtttttcccagaggcttccacttaatattgaagaggctaaagaccgtctccgcattctgatgcttcgcaaacacccaaggtctctcttgatcttggatgatgtttgggactcttgggtgttgaaagcttttgacagtcagtgtcagattcttcttacaaccagagacaagagtgttacagattcagtaatgggtcctaaatatgtagtccctgtggagagttccttaggaaaggaaaaaggacttgaaattttatccctttttgttaatatgaagaaggcagatttgccagaacaagctcatagtattataaaagaatgtaaagtggtggaacgttgtcactggggaatcctcacagaccttctacacaaatggaaccaatcttaagaaaatacacgtgtcccctgacttcaaaacatatgtgactgtggataatcttggtattttatatattttacagactttagaa

SEQ ID NO: 335 - DNA, 2504 bp, Homo sapiens
  source 1..2504: mol_type = genomic DNA
cctggaccgccgcgccgaggctcccggcgctcgctgctcccgcggcccgcgccatgccctcctacacggtcaccgtggccactggcagccagtggttcgccggcactgacgactacatctacctcagcctcgtgggctcggcgggctgcagcgagaagcacctgctggacaagcccttctacaacgacttcgagcgtggcgcggtggattcatacgacgtgactgtggacgaggaactgggcgagatccagctggtcagaatcgagaagcgcaagtactggctgaatgacgactggtacctgaagtacatcacgctgaagacgccccacggggactacatcgagttcccctgctaccgctggatcaccggcgatgtcgaggttgtcctgagggatggacgcgcaaagttggcccgagatgaccaaattcacattctcaagcaacaccgacgtaaagaactggaaacacggcaaaaacaatatcgatggatggagtggaaccctggcttccccttgagcatcgatgccaaatgccacaaggatttaccccgtgatatccagtttgatagtgaaaaaggagtggactttgttctgaattactccaaagcgatggagaacctgttcatcaaccgcttcatgcacatgttccagtcttcttggaatgacttcgccgactttgagaaaatctttgtcaagatcagcaacactatttctgagcgggtcatgaatcactggcaggaagacctgatgtttggctaccagttcctgaatggctgcaaccctgtgttgatccggcgctgcacagagctgcccgagaagctcccggtgaccacggagatggtagagtgcagcctggagcggcagctcagcttggagcaggaggtccagcaagggaacattttcatcgtggactttgagctgctggatggcatcgatgccaacaaaacagacccctgcacactccagttcctggccgctcccatctgcttgctgtataagaacctggccaacaagattgtccccattgccatccagctcaaccaaatcccgggagatgagaaccctattttcctcccttcggatgcaaaatacgactggcttttggccaaaatctgggtgcgttccagtgacttccacgtccaccagaccatcacccaccttctgcgaacacatctggtgtctgaggtttttggcattgcaatgtaccgccagctgcctgctgtgcaccccattttcaagctgctggtggcacacgtgagattcaccattgcaatcaacaccaaggcccgtgagcagctcatctgcgagtgtggcctctttgacaaggccaacgccacagggggcggtgggcacgtgcagatggtgcagagggccatgaaggacctgacctatgcctccctgtgctttcccgaggccatcaaggcccggggcatggagagcaaagaagacatcccctactacttctaccgggacgacgggctcctggtgtgggaagccatcaggacgttcacggccgaggtggtagacatctactacgagggcgaccaggtggtggaggaggacccggagctgcaggacttcgtgaacgatgtctacgtgtacggcatgcggggccgcaagtcctcaggcttccccaagtcggtcaagagccgggagcagctgtcggagtacctgaccgtggtgatcttcaccgcctccgcccagcacgccgcggtcaacttcggccagtacgactggtgctcctggatccccaatgcgcccccaaccatgcgagccccgccaccgactgccaagggcgtggtgaccattgagcagatcgtggacacgctgcccgaccgcggccgctcctgctggcatctgggtgcagtgtgggcgctgagccagttccaggaaaacgagctgttcctgggcatgtacccagaagagcattttatcgagaagcctgtgaaggaagccatggcccgattccgcaagaacctcgaggccattgtcagcgtgattgctgagcgcaacaagaagaagcagctgccatattactacttgtccccagaccggattccgaacagtgtggccatctgagcacactgccagtctcactgtgggaaggccagctgccccagccagatggactccagcctgcctggcaggctgtctggccaggcctcttggcagtcacatctcttcctccgaggccagtacctttccatttattctttgatcttcagggaactgcatagattgatcaaagtgtaaacaccatagggacccattctacacagagcaggactgcacagcgtcctgtccacacccagctcagcatttccacaccaagcagcaacagcaaatcacgaccactgatagatgtctattcttgttggagacatgggatgattattttctgttctatttgtgcttagtccaattccttgcacatagtaggtacccaattcaattactattgaatgaattaagaattggttgccataaaaataaatcagttcattt

SEQ ID NO: 336 - DNA, 2178 bp, Homo sapiens
  source 1..2178: mol_type = genomic DNA
gctagatgcggacacctggaccgccgcgccgaggctcccggcgctcgctgctcccgcggcccgcgccatgccctcctacacggtcaccgtggccactggcagccagtggttcgccggcactgacgactacatctacctcagcctcgtgggctcggcgggctgcagcgagaagcacctgctggacaagcccttctacaacgacttcgagcgtggcgcggtggattcatacgacgtgactgtggacgaggaactgggcgagatccagctggtcagaatcgagaagcgcaagtactggctgaatgacgactggtacctgaagtacatcacgctgaagacgccccacggggactacatcgagttcccctgctaccgctggatcaccggcgatgtcgaggttgtcctgagggatggacgcgcaaagttggcccgagatgaccaaattcacattctcaagcaacaccgacgtaaagaactggaaacacggcaaaaacaatatcgatggatggagtggaaccctggcttccccttgagcatcgatgccaaatgccacaaggatttaccccgtgatatccagtttgatagtgaaaaaggagtggactttgttctgaattactccaaagcgatggagaacctgttcatcaaccgcttcatgcacatgttccagtcttcttggaatgacttcgccgactttgagaaaatctttgtcaagatcagcaacactatttctgagcgggtcatgaatcactggcaggaagacctgatgtttggctaccagttcctgaatggctgcaaccctgtgttgatccggcgctgcacagagctgcccgagaagctcccggtgaccacggagatggtagagtgcagcctggagcggcagctcagcttggagcaggaggtccagcaagggaacattttcatcgtggactttgagctgctggatggcatcgatgccaacaaaacagacccctgcacactccagttcctggccgctcccatctgcttgctgtataagaacctggccaacaagattgtccccattgccatccagctcaaccaaatcccgggagatgagaaccctattttcctcccttcggatgcaaaatacgactggcttttggccaaaatctgggtgcgttccagtgacttccacgtccaccagaccatcacccaccttctgcgaacacatctggtgtctgaggtttttggcattgcaatgtaccgccagctgcctgctgtgcaccccattttcaagctgctggtggcacacgtgagattcaccattgcaatcaacaccaaggcccgtgagcagctcatctgcgagtgtggcctctttgacaaggccaacgccacagggggcggtgggcacgtgcagatggtgcagagggccatgaaggacctgacctatgcctccctgtgctttcccgaggccatcaaggcccggggcatggagagcaaagaagacatcccctactacttctaccgggacgacgggctcctggtgtgggaagccatcaggacgttcacggccgaggtggtagacatctactacgagggcgaccaggtggtggaggaggacccggagctgcaggacttcgtgaacgatgtctacgtgtacggcatgcggggccgcaagtcctcaggcttccccaagtcggtcaagagccgggagcagctgtcggagtacctgaccgtggtgatcttcaccgcctccgcccagcacgccgcggtcaacttcggccagctgttcctgggcatgtacccagaagagcattttatcgagaagcctgtgaaggaagccatggcccgattccgcaagaacctcgaggccattgtcagcgtgattgctgagcgcaacaagaagaagcagctgccatattactacttgtccccagaccggattccgaacagtgtggccatctgagcacactgccagtctcactgtgggaaggccagctgccccagccagatggactccagcctgcctggcaggctgtctggccaggcctcttggcagtcacatctcttcctccgaggccagtacctttccatttattctttgatcttcagggaactgcatagattgatcaaagtgtaaacaccatagggacccattctacacagagcaggactgcacagcgtcctgtccacacccagctcagcatttccacaccaagcagc

SEQ ID NO: 337 - DNA, 3938 bp, Homo sapiens
  source 1..3938: mol_type = genomic DNA
ggggccttctgaggtttgggggctgtagggccatgggcctcagggccagaggtggttgttagcctggcaagacaggtctgggcaacatgcatgcccagaggcagttcgttgtagctgcagtgagagcagaagtcagacgacatgaggtggccaagcaggctctaaaccgcctcaggaagctggcagagagggtggacgaccccgaactccaggacagcatccaggcctcattggacagcattcgagaggctgtgatcaatagccaggaatggactttgagccgctccattcctgaactgcgcctgggtgtgctgggcgatgccaggagtgggaagtcatcgctcatccaccgattcctgactggctcataccaggtgctggagaagacagagagtgagcagtacaagaaagaaatgttggtggatggacagacacatctggtgctaatccgagaggaagctggggcacctgatgccaagttctcaggctgggcagatgctgtgatcttcgtcttcagcctggaggatgagaacagtttccaggctgtgagccgtctccatgggcagctgagttcccttcgcggggagggacgaggaggcctggccttggcactggtggggacacaagacaggatcagtgcttcctcccctcgggtggtgggagatgctcgtgccagagctctgtgcgcggacatgaaacgctgcagctactatgagacttgtgcaacctatgggctcaatgtggatcgggtcttccaggaggtggcccagaaggtggtgaccttgcgcaagcagcaacagcttctggctgcctgcaagtccctgcccagctccccaagccactcagctgcatccactccggtagctggccaggctagtaacgggggccacactagcgactactcttcttccctcccgtcctcaccgaatgttggtcaccgggagctccgagccgaggcagctgcagtggctggattgagcaccccagggtccctgcaccgggcagccaagcgcaggaccagcctttttgcgaatcgtcggggtagtgactccgagaaacgaagcttggatagtcggggagagacaacagggagtgggcgagccatccccatcaaacagagcttcctactaaaacgaagtggcaattccttgaacaaagaatggaagaagaaatatgtaaccctgtccagtaatggctttctactctaccaccccagtattaacgattacatccacagtacccacggcaaggagatggacttgctgcgaacaacagtcaaagtcccgggcaagcggcccccgagggccatctctgcctttggcccctcagccagcattaacgggctcgtcaaggacatgagcactgtccagatgggtgaaggcctggaagccactactcccatgccaagccctagccccagccccagttccctgcagccaccaccagatcagacatccaaacacctgctgaagccagaccggaatttggcccgagccctcagcacggactgtaccccatctggagacctgagccccctgagtcgggaaccccctccttctcccatggtgaagaagcagaggaggaaaaaattgacaacaccatccaagactgaaggctcggctgggcaggctgaagaggaaaactttgagttcctgatcgtgtccagcacgggtcagacgtggcactttgaggcagccagttttgaggagcgggatgcctgggtccaggccatcgagagtcagatcctagccagtctgcaatgctgtgagagcagcaaggtcaagctgcgcacagacagccaaagcgaggccgtggccatccaggcgatccggaacgccaaggggaattcaatctgcgtggactgcggggcccccaaccccacgtgggccagcttgaacctgggcgccctcatctgcatcgagtgttctggcatccaccgcaacctgggcacacacctgtcccgcgttcgctcgctggacttggacgactggccacgggagctgaccctggtgctgacggctattggcaacgacacggccaaccgcgtgtgggaaagcgacacgcgaggccgtgccaagccctcgcgggactcttcgcgggaggagcgcgagtcgtggattcgcgccaagtacgagcagctactgttcctggcgccgctgagcacctcggaggagccgctgggccgccagctgtgggccgccgtgcaggcccaggacgtggctaccgttctcctgcttttggcccatgcgcgacacgggccgctcgacaccagcgtagaggacccacagctgcgctccccactccacctggcggccgagctcgcccacgtcgtcatcacgcaactgctgctgtggtacggcgcggacgtggcggcccgtgacgcccagggccgcacggcgctgttctacgcccgccaggctggaagccagctgtgcgccgacatccttctccagcacggctgcccgggtgagggcggcagcgcggccaccacgcccagcgcggccaccacgcccagcatcaccgccacgcccagcccccgccgccggagcagcgccgctagcgtgggccgcgccgacgccccggttgcgctggtatagttgcccagcgggagagacacccccatccccacgcgggccgggcacgaccacaccgggcggaccgctggacagacgcacccactcacctctccgatccgcaccccgccccacgggagcacttcctacccccacgagggcacagcccccacgccttccagaagacacaaactcacctccctctccccaacgaggcatggagaccccagctcaacacgccccctctccattgtttccacactcggattgctctgggtctacccgctcggggttcgcggaaggggaggtccccagcggtacgggctcctaggcgcttggacatgcccgcttgtgccccctaggggcggaaagaagacccggtcctgcccgagctcaacaatcccagggcgggagcccatacccaggctggctcctggggcgacgccacgccagagggagggtttagtacatgggagggctagccccgggacttggggccaatacggaaaccctaccccttccatgctcatctcactgcccagtgaagggggcaagggcagcgaggggcaggacccctgctgctcatgggggtgggggttcccaaccctttccgtgaaagggaccgtgagtagtggaaaccaggacgtcccctacacctacccatgggtggaagctaaagagtccggggggaaccaagagcctgggtccctcccactactatcttgggagggagaagggatggagcaggagcgggctaagagggctgcgggggccttgtaatttattgctttgttccccaacatggggatgggggcgggcaggggcgtggggagggcgttttggggtaggggaagcccagggtgggcagggggtgggttggggtgggggtgctctcgggttgtgtctgtgaccgtgactgcgtacctgtgactgtgcagcgcccgtggtgatctggggtagggggcacccctacagtgggacccctcccccattattctttctgtccagcccctccctcccactggagcagctccagagccattcctcacccccgtgacctctcccagccagggctgagaggattcgaggtggctgggagggtttccaggccccctgccccttccccacaaactgggtgatagggcggacttacctggcccagccctgcctccctcagccaacccagcccttgggctgtctgtgtcagtggtttccggtctttttttttttttttttttctggctaaaatagtttgcaaaggaccaggtaattggggaggggagagaggtgggggcaagggggaaatgcccccccatctccttggaggcagtggtgtgaatcttcttcaacagcaattaaagagga

SEQ ID NO: 338 - DNA, 3579 bp, Homo sapiens
  source 1..3579: mol_type = genomic DNA
atgagccggggcgcgggcgcgcttcagcgccggacaacgacctacctcatctcgctgaccctggttaagctcgagtcggtgcctccgccgccgccttctccgtctgcggccgcggccggcgccgccggtgccagaggctccgagactggggatcctggcagcccccgaggcgcggaggagccgggcaagaagcggcacgaacgtctcttccaccggcaggatgcgctgtggatcagcacgagcagcgcgggcaccgggggcgcggagcccccagccctgtccccggctccggccagtccggcccgcccagtctcccccgctcccggccgccgcctctccctctgggccgtccctccgggacccccgctctccgggggactgagccccgaccccaagcctgggggcgcccccacctcctcccggcgccccctgctcagcagcccgagctggggcggcccggagcccgaaggccgggcgggcggcggcatccctggctcatcctctccgcaccctggcaccggcagccggaggctcaaggtggcgcctcctccgccggctcccaagccttgcaagaccgtgaccacgagtggagccaaagccggcgggggcaagggcgcgggtagccgcctgtcatggcccgaaagcgagggcaagcccagggtcaaggggtcaaagagcagcgccgggactggagcttcggtctctgccgccgccaccgccgccgccgccgggggagggggctctacagcttcgacctctggtggggtcggggctggggctggagcccgagggaagttgtcccctcggaaaggcaagagtaagaccttggacaacagtgacttgcatccgggaccgcctgccggctctcctcctccgctaaccctcccaccaactccgagtccagccactgctgtcaccgctgcttccgcgcagccccccgggcctgcacctccaatcactctggagcctccagctccggggctgaaacggggccgggaggggggccgagcatccactcgtgaccgcaagatgctcaagtttatcagcggcatcttcaccaagagcacaggagggcctcctggctccgggccccttcccggaccccccagcctgtcttctggcagcgggtccagggagctgctgggcgccgagctccgcgcttcccctaaggctgtgatcaatagccaggaatggactttgagccgctccattcctgaactgcgcctgggtgtgctgggcgatgccaggagtgggaagtcatcgctcatccaccgattcctgactggctcataccaggtgctggagaagacagagagtgagcagtacaagaaagaaatgttggtggatggacagacacatctggtgctaatccgagaggaagctggggcacctgatgccaagttctcaggctgggcagatgctgtgatcttcgtcttcagcctggaggatgagaacagtttccaggctgtgagccgtctccatgggcagctgagttcccttcgcggggagggacgaggaggcctggccttggcactggtggggacacaagacaggatcagtgcttcctcccctcgggtggtgggagatgctcgtgccagagctctgtgcgcggacatgaaacgctgcagctactatgagacttgtgcaacctatgggctcaatgtggatcgggtcttccaggaggtggcccagaaggtggtgaccttgcgcaagcagcaacagcttctggctgcctgcaagtccctgcccagctccccaagccactcagctgcatccactccggtagctggccaggctagtaacgggggccacactagcgactactcttcttccctcccgtcctcaccgaatgttggtcaccgggagctccgagccgaggcagctgcagtggctggattgagcaccccagggtccctgcaccgggcagccaagcgcaggaccagcctttttgcgaatcgtcggggtagtgactccgagaaacgaagcttggatagtcggggagagacaacagggagtgggcgagccatccccatcaaacagagcttcctactaaaacgaagtggcaattccttgaacaaagaatggaagaagaaatatgtaaccctgtccagtaatggctttctactctaccaccccagtattaacgattacatccacagtacccacggcaaggagatggacttgctgcgaacaacagtcaaagtcccgggcaagcggcccccgagggccatctctgcctttggcccctcagccagcattaacgggctcgtcaaggacatgagcactgtccagatgggtgaaggcctggaagccactactcccatgccaagccctagccccagccccagttccctgcagccaccaccagatcagacatccaaacacctgctgaagccagaccggaatttggcccgagccctcagcacggactgtaccccatctggagacctgagccccctgagtcgggaaccccctccttctcccatggtgaagaagcagaggaggaaaaaattgacaacaccatccaagactgaaggctcggctgggcaggctgaagccaagcgcaaaatgtggaaactaaaatcctttggtagtttaagaaatatttataaagcagaggaaaactttgagttcctgatcgtgtccagcacgggtcagacgtggcactttgaggcagccagttttgaggagcgggatgcctgggtccaggccatcgagagtcagatcctagccagtctgcaatgctgtgagagcagcaaggtcaagctgcgcacagacagccaaagcgaggccgtggccatccaggcgatccggaacgccaaggggaattcaatctgcgtggactgcggggcccccaaccccacgtgggccagcttgaacctgggcgccctcatctgcatcgagtgttctggcatccaccgcaacctgggcacacacctgtcccgcgttcgctcgctggacttggacgactggccacgggagctgaccctggtgctgacggctattggcaacgacacggccaaccgcgtgtgggaaagcgacacgcgaggccgtgccaagccctcgcgggactcttcgcgggaggagcgcgagtcgtggattcgcgccaagtacgagcagctactgttcctggcgccgctgagcacctcggaggagccgctgggccgccagctgtgggccgccgtgcaggcccaggacgtggctaccgttctcctgcttttggcccatgcgcgacacgggccgctcgacaccagcgtagaggacccacagctgcgctccccactccacctggcggccgagctcgcccacgtcgtcatcacgcaactgctgctgtggtacggcgcggacgtggcggcccgtgacgcccagggccgcacggcgctgttctacgcccgccaggctggaagccagctgtgcgccgacatccttctccagcacggctgcccgggtgagggcggcagcgcggccaccacgcccagcgcggccaccacgcccagcatcaccgccacgcccagcccccgccgccggagcagcgccgctagcgtgggccgcgccgacgccccggttgcgctggtatag

SEQ ID NO: 339 - DNA, 3861 bp, Homo sapiens
  source 1..3861: mol_type = genomic DNA
agctaaatgacgggcggagcccggcggcggcttccggtcgggggaaaaaagttgggccgaaggaggggccgggaagacgcaagaggaagaagagaaaacggccgggcggcggtggctgtaggttgtgcggctgcagcggctcttccctgggcggacgatggacagccagggcaggaaggtggtggtgtgcgacaacggcaccgggtttgtgaagtgtggatatgcaggctctaactttccagaacacatcttcccagctttggttggaagacctattatcagatcaaccaccaaagtgggaaacattgaaatcaaggatcttatggttggtgatgaggcaagtgaattacgatcaatgttagaagttaactaccctatggaaaatggcatagtacgaaattgggatgacatgaaacacctgtgggactacacatttggaccagagaaacttaatatagataccagaaattgtaaaatcttactcacagaacctcctatgaacccaaccaaaaacagagagaagattgtagaggtaatgtttgaaacttaccagttttccggtgtatatgtagccatccaggcagttctgactttgtacgctcaaggtttattgactggtgtagtggtagactctggagatggtgtgactcacatttgcccagtatatgaaggcttttctctccctcatcttaccaggagactggatattgctgggagggatataactagatatcttatcaagctacttctgttgcgaggatacgccttcaaccactctgctgattttgaaacggttcgcatgattaaagaaaaactgtgttacgtgggatataatattgagcaagagcagaaactggccttagaaaccacagtattagttgaatcttatacactcccagatggacgtatcatcaaagttgggggagagagatttgaagcaccagaagctttatttcagcctcacttgatcaatgttgaaggagttggtgttgctgaattgctttttaacacaattcaggcagctgacattgataccagatctgaattctacaaacacattgtgctttctggagggtctactatgtatcctggcctgccatcacggttggaacgagaacttaaacagctttacttagaacgagttttgaagggtgatgtggaaaaactttctaaatttaagatccgcattgaagacccaccccgcagaaagcacatggtattcctgggtggtgcagttctagcggatatcatgaaagacaaagacaacttttggatgacccgacaagagtaccaagaaaagggtgtccgtgtgctagagaaacttggtgtgactgttcgataaactccaaagcttgttcccgtcatacccgtaatgctttcttttttcctttattgccaatctttgaactcattcaactccaggacatggaagaggcctctctctgccctttgactggaaaggtcaagttttattctggtgtcttggggaagctttgttaaatttttgttaatgtgggtaaatctgagtttaattcaactgcttccctacatagactagagggctaaggattctgtctgctgctttgtttcttctaagtaggcatttagatcattcctataggcttcctattttcactttactgctctaatgctgctagtcgtagtctttagcacactaggtggtatgcctttattagcataaaacaaaaaaaactttaacaggagcttttacatattactgggatggggggtggttcgggatgggtgggcagctgctgaaccctttagggcatttcctctgtaatgtggcgctttcaactgtactgctgcagctttaagtaccttaaagcttctcctgtgaacttcttagggaaatgttaggttcagaactaaagtgttttgggtgggttttgttgcgggggggagggtaacaatgggtggtcttctgatttttatttttgaggttttgtcaactggagtacgtagaggaactttatttacagtactttgatttggcaggttttcttctacttgtgctctgcctggagctgtttccatatgatataaaaagcaagtgtagtattccattactatgtggcttagggatttatttgttttttaaaatcaaccatgttagctgggattagactccctacagtccttcaatggaaaagtaacatttaaaaatcctttgggtaattcgaattacagatttaaaagagcttaagatctggtgttttgttaatgcttctgtttattccagaagcattaaggtaacccattgccaagtatcattcttgcaaattattcttttatataactgaccagtgcttaataaaacaagcaggtacttacaaataattactggcagtaggttataattggtggtttaaaaataacattggaatacaggacttgttgccaattgggtaattttcattagttgttttgtttgttttgatttgaaacctggaaatacagtaaaatttgactgtttaaaatgttggccaaaaaaatcaagatttaatttttttatttgtactgaaaaactaatcataactgttaattctcagccatctttgaagcttgaaagaagagtctttggtattttgtaaacgttagcagactttcctgccagtgtcagaaaatcctatttatgaatcctgtcggtattccttggtatctgaaaaaaataccaaatagtaccatacatgagttatttctaagtttgaaaaataaaaagaaattgcatcacactaattacaaaatacaagttctggaaaaaatatttttcttcattttaaaacttttttttaactaataatagctttgaaagaagaggcttaatttgggggtggtaactaaaatcaaaagaaatgattgacttgagggtctctgtttggtaagaatacatcattagcttaaataagcagcagaaggttagttttaattatgtagcttctgttaatattaagtgttttttgtctgttttacctcaatttgaacagataagtttgcctgcatgctggacatgcctcagaaccctgaatagcccgtactagatcttgggaacatggatcttagagtcactttggaataagttcttatataaatacccccagccttttgagaacggggcttgttaaaggacgcgtatgtagggcccgtacctactggcagttgggttcagggaaatgggattgacttggccttcaggctcctttggtcataattttaaaatatgggagtagaaaacaacaaagaatggaatggactcttaaaacaatgaaagagcatttatcgtttgtcccttgaatgtagaatttgtttttgatttcataattctgctggtaaatgtgacagttaaaatggtgcattatgtatatatattataatttagaaataccattttataattttactattccagggtgacataatgcatttaaatttgggatttgggtggagtattatgtttaactggagttgtcaagtatgagtccctcaggaaaaaaaaaaaattctgttttaaaaagcaatctgattcttagctcttgaaactattgctacttaaatttccaataattaaaaatttaaaatttttaaattagaattgccaatacttctacatttgagaagggtttttttagaaatacatttagtaaagtccccaagacattagtcttacatttaaacttttttctttaaaacatggttttggtggttaacttttacacagttctgagtactgttaatatctggaaagtatcttgagatatcagtggaaagctaaacagtctaaattaacatgaaatacttcattttgattgagaaaataaaatcagattttttcaaagtcaa

SEQ ID NO: 340 - DNA, 2685 bp, Homo sapiens
  source 1..2685: mol_type = genomic DNA
ggaagaagagaaaacggccgggcggcggtggctgtaggttgtgcggctgcagcggctcttccctgggcggacgatggacagccagggcaggaaggtggtggtgtgcgacaacggcaccgggtttgtgaagtgtggatatgcaggctctaactttccagaacacatcttcccagctttggttggaagacctattatcagatcaaccaccaaagtgggaaacattgaaatcaagaataacaaaaagatggatcttatggttggtgatgaggcaagtgaattacgatcaatgttagaagttaactaccctatggaaaatggcatagtacgaaattgggatgacatgaaacacctgtgggactacacatttggaccagagaaacttaatatagataccagaaattgtaaaatcttactcacagaacctcctatgaacccaaccaaaaacagagagaagattgtagaggtaatgtttgaaacttaccagttttccggtgtatatgtagccatccaggcagttctgactttgtacgctcaaggtttattgactggtgtagtggtagactctggagatggtgtgactcacatttgcccagtatatgaaggcttttctctccctcatcttaccaggagactggatattgctgggagggatataactagatatcttatcaagctacttctgttgcgaggatacgccttcaaccactctgctgattttgaaacggttcgcatgattaaagaaaaactgtgttacgtgggatataatattgagcaagagcagaaactggccttagaaaccacagtattagttgaatcttatacactcccagatggacgtatcatcaaagttgggggagagagatttgaagcaccagaagctttatttcagcctcacttgatcaatgttgaaggagttggtgttgctgaattgctttttaacacaattcaggcagctgacattgataccagatctgaattctacaaacacattgtgctttctggagggtctactatgtatcctggcctgccatcacggttggaacgagaacttaaacagctttacttagaacgagttttgaagggtgatgtggaaaaactttctaaatttaagatccgcattgaagacccaccccgcagaaagcacatggtattcctgggtggtgcagttctagcggatatcatgaaagacaaagacaacttttggatgacccgacaagagtaccaagaaaagggtgtccgtgtgctagagaaacttggtgtgactgttcgataaactccaaagcttgttcccgtcatacccgtaatgctttcttttttcctttattgccaatctttgaactcattcaactccaggacatggaagaggcctctctctgccctttgactggaaaggtcaagttttattctggtgtcttggggaagctttgttaaatttttgttaatgtgggtaaatctgagtttaattcaactgcttccctacatagactagagggctaaggattctgtctgctgctttgtttcttctaagtaggcatttagatcattcctataggcttcctattttcactttactgctctaatgctgctagtcgtagtctttagcacactaggtggtatgcctttattagcataaaacaaaaaaaactttaacaggagcttttacatattactgggatggggggtggttcgggatgggtgggcagctgctgaaccctttagggcatttcctctgtaatgtggcgctttcaactgtactgctgcagctttaagtaccttaaagcttctcctgtgaacttcttagggaaatgttaggttcagaactaaagtgttttgggtgggttttgttgcgggggggagggtaacaatgggtggtcttctgatttttatttttgaggttttgtcaactggagtacgtagaggaactttatttacagtactttgatttggcaggttttcttctacttgtgctctgcctggagctgtttccatatgatataaaaagcaagtgtagtattccattactatgtggcttagggatttatttgttttttaaaatcaaccatgttagctgggattagactccctacagtccttcaatggaaaagtaacatttaaaaatcctttgggtaattcgaattacagatttaaaagagcttaagatctggtgttttgttaatgcttctgtttattccagaagcattaaggtaacccattgccaagtatcattcttgcaaattattcttttatataactgaccagtgcttaataaaacaagcaggtacttacaaataattactggcagtaggttataattggtggtttaaaaataacattggaatacaggacttgttgccaattgggtaattttcattagttgttttgtttgttttgatttgaaacctggaaatacagtaaaatttgactgtttaaaatgttggccaaaaaaatcaagatttaatttttttatttgtactgaaaaactaatcataactgttaattctcagccatctttgaagcttgaaagaagagtctttggtattttgtaaacgttagcagactttcctgccagtgtcagaaaatcctatttatgaatcctgtcggtattccttggtatctgaaaaaaataccaaatagtaccatacatgagttatttctaagtttgaaaaataaaaagaaattgcatca

SEQ ID NO: 341 - DNA, 1429 bp, Homo sapiens
  source 1..1429: mol_type = genomic DNA
gggtgggggcggcgggcgagaccggcactggacatggagcctactgaccgcccggcagggacctgctccgcgctaatgcgggggcaattgggctaaagcggacggaagcgtaaaaggctcggtttgtgtgttccgagaagggctcttttccccagggccaccggtttgtaaaaaggagaaagacctagaggccttcctcttcctgtatagttgaagatacaccaaacgagaagcaggaagcgggtttacttaaaaaaaaaaaaaaaaaaagtttgtgaagtgtggatatgcaggctctaactttccagaacacatcttcccagctttggttggaagacctattatcagatcaaccaccaaagtgggaaacattgaaatcaaggatcttatggttggtgatgaggcaagtgaattacgatcaatgttagaagttaactaccctatggaaaatggcatagtacgaaattgggatgacatgaaacacctgtgggactacacatttggaccagagaaacttaatatagataccagaaattgtaaaatcttactcacagaacctcctatgaacccaaccaaaaacagagagaagattgtagaggtaatgtttgaaacttaccagttttccggtgtatatgtagccatccaggcagttctgactttgtacgctcaaggtttattgactggtgtagtggtagactctggagatggtgtgactcacatttgcccagtatatgaaggcttttctctccctcatcttaccaggagactggatattgctgggagggatataactagatatcttatcaagctacttctgttgcgaggatacgccttcaaccactctgctgattttgaaacggttcgcatgattaaagaaaaactgtgttacgtgggatataatattgagcaagagcagaaactggccttagaaaccacagtattagttgaatcttatacactcccagatggacgtatcatcaaagttgggggagagagatttgaagcaccagaagctttatttcagcctcacttgatcaatgttgaaggagttggtgttgctgaattgctttttaacacaattcaggcagctgacattgataccagatctgaattctacaaacacattgtgctttctggagggtctactatgtatcctggcctgccatcacggttggaacgagaacttaaacagctttacttagaacgagttttgaagggtgatgtggaaaaactttctaaatttaagatccgcattgaagacccaccccgcagaaagcacatggtattcctgggtggtgcagttctagcggatatcatgaaagacaaagacaacttttggatgacccgacaagagtaccaagaaaagggtgtccgtgtgctagagaaacttggtgtgactgttcgataaactccaaagcttgttcccgtc

SEQ ID NO: 342 - DNA, 1406 bp, Homo sapiens
  source 1..1406: mol_type = genomic DNA
aagaggaagaagagaaaacggccgggcggcggtggctgtaggttgtgcggctgcagcggctcttccctgggcggacgatggacagccagggcaggaaggtggtggtgtgcgacaacggcaccgggtttgtgaagtgtggatatgcaggctctaactttccagaacacatcttcccagctttggttggaagacctattatcagatcaaccaccaaagtgggaaacattgaaatcaaggccttattttttgaacaattgagcaaaagaaacagatgaaacctcatacaaaaccctccaaaatatgaaaatgtggggtttatttgtgctaatgctcttcttttggaaacatttgtgttaaaggatcttatggttggtgatgaggcaagtgaattacgatcaatgttagaagttaactaccctatggaaaatggcatagtacgaaattgggatgacatgaaacacctgtgggactacacatttggaccagagaaacttaatatagataccagaaattgtaaaatcttactcacagaacctcctatgaacccaaccaaaaacagagagaagattgtagaggtaatgtttgaaacttaccagttttccggtgtatatgtagccatccaggcagttctgactttgtacgctcaaggtttattgactggtgtagtggtagactctggagatggtgtgactcacatttgcccagtatatgaaggcttttctctccctcatcttaccaggagactggatattgctgggagggatataactagatatcttatcaagctacttctgttgcgaggatacgccttcaaccactctgctgattttgaaacggttcgcatgattaaagaaaaactgtgttacgtgggatataatattgagcaagagcagaaactggccttagaaaccacagtattagttgaatcttatacactcccagatggacgtatcatcaaagttgggggagagagatttgaagcaccagaagctttatttcagcctcacttgatcaatgttgaaggagttggtgttgctgaattgctttttaacacaattcaggcagctgacattgataccagatctgaattctacaaacacattgtgctttctggagggtctactatgtatcctggcctgccatcacggttggaacgagaacttaaacagctttacttagaacgagttttgaagggtgatgtggaaaaactttctgtaagtattagtaaatcaactattactaacattcttttaaaaggctatacagtagtttgtgaatcttgacaaccaccagagggagcaagacgtcttccaaaacaaattcctactgcagtcaagtgcatcctggaaatgatagcaagaaggaaatagttcaagataagctctggtcacctctatagagttggt

SEQ ID NO: 343 - DNA, 6718 bp, Homo sapiens
  source 1..6718: mol_type = genomic DNA
atcttggcttcccggggaaaggcggcgtgaggggaagaagttgtagggtgggggcaggagtgaggaggagggaagagagagggggaggaggccgcggcggggcagggcggggactgcctgcctgcctgggttgcggaagtgatagccgccgaccgagcctgctgctttcttgctactgcttcggcttcccggctaccccccggacggtgaaggcggcccagctgtggatggtcagatagcccttgtctcccgccgccaatctctggcccctagcagcacggagcagacggcggcagcagcagcagcaggcgaggaggaagatggcgggacggctgccggcctgtgtggtggactgtggcacggggtatacaaaactaggatatgctggaaatacagaaccacagtttatcatcccttcctgtattgctattaaggagtcagcaaaagtgggtgatcaagctcaaaggagggtgatgaaaggtgttgatgacctagacttcttcattggtgatgaagcaatagaaaaacctacatatgcaacaaagtggccaatccgccatggtatagttgaagattgggacttaatggaaaggtttatggagcaagtgatctttaaatatttaagggcagaacctgaagaccattattttcttttgactgaacctccattgaatactccagaaaacagggaatatactgctgaaataatgtttgagtccttcaatgttccaggcttgtacattgctgtgcaggctgttcttgccttagctgcatcttggacctcaagacaagtaggagaacggacgttgaccggtacggtaatagacagtggagatggtgtcactcatgtcattcctgtggctgaagggtatgtgattggcagctgtattaaacacattccaatcgcaggacgagatataacatattttattcagcaactgctgagagaccgagaagtaggaatccctccagaacaatccttggaaactgctaaggcagtaaaggagcgctatagttatgtctgcccagatttagtaaaagaatttaacaagtatgatacagatgggtcaaaatggattaaacagtatactggaatcaatgctatctcaaagaaagagttttctatcgatgttggttatgagagatttttgggacctgaaatcttttttcatccagagtttgctaatccagactttacacaacctatctcagaagttgtagatgaagtaattcagaattgtcctattgatgtcagacgtcctctctacaagaatattgtcctctctggaggttcaaccatgttcagggactttggacgtcgcttgcaaagagatttgaaaagaactgtagatgcccggctgaaattaagtgaggaattgagtggtggtagattgaagccaaaacctattgatgtacaagtcattacacaccacatgcagcgatatgcagtttggtttggaggatcaatgctggcttccacgcctgagttctaccaagtatgccacaccaaaaaggattatgaagaaattggacctagcatttgtcgtcacaatccagtgtttggagtcatgtcgtaaaattggcttcatagttattggggttagggaggtggggaagagataatctttctgattacctgttttgtctggatggctggttttgaggttttaaacctgacttgaaatagtaacaccaaacatgattatacaggaatattttaataagtgtatcaccatgcagatgtagaagagagcgaaagtgattgtgtttttctttagattgaatatttgaatcttatgtgtaacaaaaagaagtgggttttagttctttctgtgccctgatattttgtatattaatgaattatccaagattcgatgggatttatcagtgtgtagatagctctataatgcttgaattgtacacttctaagtgtgcagtgcaagagcttgtttatatttcatactttttatactttgaggaaaaaaagtcaaagaaaaattgtatttgagggaaaaaaccatgaccaagtaaaggataaattcaaaaaatagcctcatgagacttggcatacacactcgtgggattccagttattatggagtgcttccatccctctccaccccttccccccaaaaggttttctttgcaagtgcttttggaactaagagctagtatcttggattaactgatgcctgctagtgctttctgattactcgcattctgtttcttgctttaaaagaagagtaaagacaagagtgttggaccagtattgcagttctgtagtgtcatttcttataaaaaacaaaacaacaacaataatttatcaaaattggcatatttaaagcctaacattctaataaaggcacaaatttctttttaatacttgtttcagcctctttaatctctttataagttaactaataaatctattttcttcagacttctgcaatagttctttaaaatcacaacagttagcaagctgacttttgtaatgtgctcaatacaaatacttgtgaacttttaatatgttgagtgctttcattttgataactggatctccatttgatattttcatttgtataactcatttgcagtctgaaaattttttttagtgccagtccctgaacatatcattgaaagttaattttctttgcattttaaaatatctggattatgaagaaaaagtgatgaaaataaattaaaactgaattaccttttctaatgttttttttttttaagtaatgtaattctattttgtttttatgtatgtgatatctgtttctgttgagatttgggagttattgaaatctctgtaatgtgtatggtagaaaatttcttgtgaccttaaaattttaccagttatttatagaaagagaaaatgggaaatgttttataggctttttactagcagtatcagtgaacacttgaactccattattcatgaaaataacacgttaggattggaatacgtctattcaaaagtgaaagaatataaagtgtttagttttttgtttttactctaaagatagaattggggagtaaacttcagtttttgtttagagtggatctgaatatttaaaatcctataataatttttgtgaatcttcattctttgagtatgggattgtaaaagacaaactatatcctacagtagtatcatcatcagtatcaaaggtctcctttttttacttggaaaagtaattcacaaacattataaaaatactattcaaacagtaccaaagagtagattagcaaaagtaagtttttttccctagcctgtctcatttttccatcattacacagactacttggaatgtcttagatgtccttgtattgtaattttctgtgtaggtagaaataaatgtagctttcttattttacacaaataggaacttactgtatatactgttctgcactttgcttttattaaagatcttttgataaagaactatattgataagcagtaaagatgtcatgctcctggcccaataaaatattgttagcattgtcataaatatgtcttttccaccggcgatggttgggtagttaagtgaataagctagaaagacatgtttataaagctatttgatgacaatctcaggcatatttatacagagatgttcttaactgtttgctacaaaaacatgaagatcaaaaactttcttgaagcttacgcttaacttatttggggaaacaaaactccagcccttcttgtgtatgttctgatatccctttgctctacttttagaggagtgaaccctaataggatggtagcagcattcttgtttctttatatctctcctctgtgattgtataccgttttttcaacttaaagcaacttcagctggaaatatgtagaggttggccaaggtgaactaaatagtctgtaacattgattagatatcaagcaacgtgagcatggtagcaaaagcactaactgaagccagtgatttaatttttaattctgattctgataattgatgatatagctcctcgaactttgttttttgttaaaacttggaaaatatatttgtattattttggacaaattatttgaactctctggaccttgattcaatttatatataaggtaaaggcattatactggattatcctgcaatttctttgagttgttagaatataatgtagcttattaatagcaatattagcagtgtagtagattctgactgcaaaacctagccttttctattgattcattagtggtagtaaaggtattatctgatttatcctttttaataggcagtgctttgatcaagtgggaaatagtaatggacaaataaaatcaatgatcattatctaacttgatgcctgcttttcaaaaagtgagcaaatttcacatcttcacccttagacattaattcatggcacctactataagtactcatcctcttcttacctatcttcttttctataggagataaagtggttattcagaccccccaatacaattttttggtttgttttcacagctacttaaaagattaaaataactattcttgcagatatttctaggaatatttttagaaataatatgaaatacagggataataggccaattatgatctttatttttaatttctacagaaaagtactagagaatatatctatagaaacttctttcagataaccctaaagatgatactagaatgtttataaaattattgagaagattatttgtgttataaagcttatttgtaccatagtaaaggatgtttttgttcctcttcattctgggctaatctgtcaatactgaagtccagtcttttcccccttttcttaccagctcaaccttgattcctgtgacccattctttctgatctttcgtagttcatagtcaccaggcatgagtaccttggatagccctctgaagtctgttaccacccagatttccaactcgggttaattggtactaattctattagctggtataaataatccaaaatctgtgcagactctgggagcaaaatgttctactcagtttggaatactgtgccttaaaatatatttcattgtaacagcaccttgtatatatagttggccaaggacagagttgttacaagttacgtggaactttcatagcaaatcttgacagtaaataccttgttcttgtattaggtctatatcctgaattgacctttagcaagaatctttagatctgctggagggctgggatggcttttggacttcagtgaaaaagaatttctgctactcattgttgataacgcttcagtactgtataaatgtttatccttttccacgtaatttgttttctatgatatgagaacttttattataatttgcctcagtcttgatagaatcttaacaaaaataaaatctgtggtcgtctgaggtattctccatgctataacccagtttagctgatgcatttggagcttgggtgctgaaattaaatataacctatttgagttaaggatttattactagtgctccagtggtcacaggaacaataaaaaaggaacaacgatagaaatacgtgatctaggaaagaaggcaactgaaaaacctgaaagaaaaaaaatgaaagattaaaagtatacgatattctattttgatttagcaattacttgttttctagtgttctgtcaatttttggtgacttttataattacattaaaactaagatgctgaattaaaataaagtttctcttttattcaagcaccaacattcacttatattacctatatattgcatcaagttttgagccttcaatcccagaagcattgattgactgtctactgtggttcaagtactgtgcataaagatgaataaatattctgtccttggcttagtctaatagtaaaggcactcttagaggagggacaaatattttgcctagataagatttgagagatagtaagtgcggaatttctcttcataaaaatggtagtgttagttgtttagagggagaagtccagctatgtaaggtgaaagtggggcttataaaagtggatctattgtttaaaaattagtactttgctcctaaaatttttacctaagtgttacatccaacaacagatgaaagtaattcgacagtagcatctgctttattcatttcatatttccagtgcctgacatattgcttggcatatagtagtttagtggatgtgtttgatgaatgaatgagtaaaaattatttttcatgttaaaataaaactttgaattacatgagtatacaacttttgttccttcaaaatacccatatttgtcaaatatgaccgaattacgactttttttctgttccactagtttctaccttagaagtgacattctgcgtaaggtagtgggggattactaagtgatcatgacttttctgaagcaggtcttaaataattatctaagccttcagtcatttcaaaatctctgtagtgtaaatgatcacaggctctaaatcagattgttgtacaaggtaattgacatgtcctgaaatgtaacattcaacattaacagtagaaacaggcctcatttctccctctggcttttattgatcaattttgatattgtccagatcccatgttaaaccacttgatttagagatgacttaattctaaacttcctccatttttaattaataagattcaaggttgcagtaaattgttaatcttatttggaattatattagaaagtcgatatcggaattggaaccacacatctttttcttattgtgggtacatgggat

SEQ ID NO: 344 - DNA, 1381 bp, Homo sapiens
  source 1..1381: mol_type = genomic DNA
gggggtggtccccgggcccgacccatccggctttcctttccctccgcgcccgtttttgccagtcggtttggggacccaggggccgagctcggggactggcctggcaggggagctagaaaagagaagcgctcctggtatacaaaactaggatatgctggaaatacagaaccacagtttatcatcccttcctgtattgctattaaggagtcagcaaaagtgggtgatcaagctcaaaggagggtgatgaaaggtgttgatgacctagacttcttcattggtgatgaagcaatagaaaaacctacatatgcaacaaagtggccaatccgccatggtatagttgaagattgggacttaatggaaaggtttatggagcaagtgatctttaaatatttaagggcagaacctgaagaccattattttcttttgactgaacctccattgaatactccagaaaacagggaatatactgctgaaataatgtttgagtccttcaatgttccaggcttgtacattgctgtgcaggctgttcttgccttagctgcatcttggacctcaagacaagtaggagaacggacgttgaccggtacggtaatagacagtggagatggtgtcactcatgtcattcctgtggctgaagggtatgtgattggcagctgtattaaacacattccaatcgcaggacgagatataacatattttattcagcaactgctgagagaccgagaagtaggaatccctccagaacaatccttggaaactgctaaggcagtaaaggagcgctatagttatgtctgcccagatttagtaaaagaatttaacaagtatgatacagatgggtcaaaatggattaaacagtatactggaatcaatgctatctcaaagaaagagttttctatcgatgttggttatgagagatttttgggacctgaaatcttttttcatccagagtttgctaatccagactttacacaacctatctcagaagttgtagatgaagtaattcagaattgtcctattgatgtcagacgtcctctctacaagaatattgtcctctctggaggttcaaccatgttcagggactttggacgtcgcttgcaaagagatttgaaaagaactgtagatgcccggctgaaattaagtgaggaattgagtggtggtagattgaagccaaaacctattgatgtacaagtcattacacaccacatgcagcgatatgcagtttggtttggaggatcaatgctggcttccacgcctgagttctaccaagtatgccacaccaaaaaggattatgaagaaattggacctagcatttgtcgtcacaatccagtgtttggagtcatgtcgtaaaattggcttcatagttattggggttagggaggtg

SEQ ID NO: 345 - DNA, 1417 bp, Homo sapiens
  source 1..1417: mol_type = genomic DNA
gaccgagcctgctgctttcttgctactgcttcggcttcccggctaccccccggacggtgaaggcggcccagctgtggatggtcagatagcccttgtctcccgccgccaatctctggcccctagcagcacggagcagacggcggcagcagcagcagcaggcgaggaggaagatggcgggacggctgccggcctgtgtggtggactgtggcacggggtatacaaaactaggatatgctggaaatacagaaccacagtttatcatcccttccttggccaatccgccatggtatagttgaagattgggacttaatggaaaggtttatggagcaagtgatctttaaatatttaagggcagaacctgaagaccattattttcttttgactgaacctccattgaatactccagaaaacagggaatatactgctgaaataatgtttgagtccttcaatgttccaggcttgtacattgctgtgcaggctgttcttgccttagctgcatcttggacctcaagacaagtaggagaacggacgttgaccggtacggtaatagacagtggagatggtgtcactcatgtcattcctgtggctgaagggtatgtgattggcagctgtattaaacacattccaatcgcaggacgagatataacatattttattcagcaactgctgagagaccgagaagtaggaatccctccagaacaatccttggaaactgctaaggcagtaaaggagcgctatagttatgtctgcccagatttagtaaaagaatttaacaagtatgatacagatgggtcaaaatggattaaacagtatactggaatcaatgctatctcaaagaaagagttttctatcgatgttggttatgagagatttttgggacctgaaatcttttttcatccagagtttgctaatccagactttacacaacctatctcagaagttgtagatgaagtaattcagaattgtcctattgatgtcagacgtcctctctacaagaatattgtcctctctggaggttcaaccatgttcagggactttggacgtcgcttgcaaagagatttgaaaagaactgtagatgcccggctgaaattaagtgaggaattgagtggtggtagattgaagccaaaacctattgatgtacaagtcattacacaccacatgcagcgatatgcagtttggtttggaggatcaatgctggcttccacgcctgagttctaccaagtatgccacaccaaaaaggattatgaagaaattggacctagcatttgtcgtcacaatccagtgtttggagtcatgtcgtaaaattggcttcatagttattggggttagggaggtggggaagagataatctttctgattacctgttttgtctggatggctggttttgaggttttaaacctgacttgaaatagtaaca

SEQ ID NO: 346 - DNA, 1557 bp, Homo sapiens
  source 1..1557: mol_type = genomic DNA
gctttcttgctactgcttcggcttcccggctaccccccggacggtgaaggcggcccagctgtggatggtcagatagcccttgtctcccgccgccaatctctggcccctagcagcacggagcagacggcggcagcagcagcagcaggcgaggagggtgatgaagcaatagaaaaacctacatatgcaacaaagtggccaatccgccatggtatagttgaagattgggacttaatggaaaggtttatggagcaagtgatctttaaatatttaagggcagaacctgaagaccattattttcttttgactgaacctccattgaatactccagaaaacagggaatatactgctgaaataatgtttgagtccttcaatgttccaggcttgtacattgctgtgcaggctgttcttgccttagctgcatcttggacctcaagacaagtaggagaacggacgttgaccggtacggtaatagacagtggagatggtgtcactcatgtcattcctgtggctgaagggtatgtgattggcagctgtattaaacacattccaatcgcaggacgagatataacatattttattcagcaactgctgagagaccgagaagtaggaatccctccagaacaatccttggaaactgctaaggcagtaaaggagcgctatagttatgtctgcccagatttagtaaaagaatttaacaagtatgatacagatgggtcaaaatggattaaacagtatactggaatcaatgctatctcaaagaaagagttttctatcgatgttggttatgagagatttttgggacctgaaatcttttttcatccagagtttgctaatccagactttacacaacctatctcagaagttgtagatgaagtaattcagaattgtcctattgatgtcagacgtcctctctacaagaatattgtcctctctggaggttcaaccatgttcagggactttggacgtcgcttgcaaagagatttgaaaagaactgtagatgcccggctgaaattaagtgaggaattgagtggtggtagattgaagccaaaacctattgatgtacaagtcattacacaccacatgcagcgatatgcagtttggtttggaggatcaatgctggcttccacgcctgagttctaccaagtatgccacaccaaaaaggattatgaagaaattggacctagcatttgtcgtcacaatccagtgtttggagtcatgtcgtaaaattggcttcatagttattggggttagggaggtggggaagagataatctttctgattacctgttttgtctggatggctggttttgaggttttaaacctgacttgaaatagtaacaccaaacatgattatacaggaatattttaataagtgtatcaccatgcagatgtagaagagagcgaaagtgattgtgtttttctttagattgaatatttgaatcttatgtgtaacaaaaagaagtgggttttagttctttctgtgccctgatattttgtatattaatgaattatccaagattcgatgggatttatcagtgtgtagatagctctataatgc

SEQ ID NO: 347 - DNA, 2254 bp, Homo sapiens
  source 1..2254: mol_type = genomic DNA
atagatatagaaagcatggacacagacaaagatgaccctcatggaaggttagaatatacagaacaccaaggaaggataaaaaatgcaagggaagctcacagtcagattgaaaagcggcgtcgggataaaatgaacagttttatagatgaattggcttctttggtaccaacatgcaacgcaatgtccaggaaattagataaacttactgtgctaaggatggctgttcagcacatgaaaacattaagaggtgccaccaatccatacacagaagcaaactacaaaccaacttttctatcagacgatgaattgaaacacctcattctcagggcagcagatggatttttgtttgtcgtaggatgtgaccgagggaagatactctttgtctcagagtctgtcttcaagatcctcaactacagccagaatgatctgattggtcagagtttgtttgactacctgcatcctaaagatattgccaaagtcaaggagcagctctcctcctctgacaccgcaccccgggagcggctcatagatgcaaaaactggacttccagttaaaacagatataacccctgggccatctcgattatgttctggagcacgacgttctttcttctgtaggatgaagtgtaacaggccttcagtaaaggttgaagacaaggacttcccctctacctgctcaaagaaaaaagcagatcgaaaaagcttctgcacaatccacagcacaggctatttgaaaagctggccacccacaaagatggggctggatgaagacaacgaaccagacaatgaggggtgtaacctcagctgcctcgtcgcaattggacgactgcattctcatgtagttccacaaccagtgaacggggaaatcagggtgaaatctatggaatatgtttctcggcacgcgatagatggaaagtttgtttttgtagaccagagggcaacagctattttggcatatttaccacaagaacttctaggcacatcgtgttatgaatattttcaccaagatgacataggacatcttgcagaatgtcataggcaagttttacagacgagagaaaaaattacaactaattgctataaatttaaaatcaaagatggttcttttatcacactacggagtcgatggttcagtttcatgaacccttggaccaaggaagtagaatatattgtctcaactaacactgttgttttagccaacgtcctggaaggcggggacccaaccttcccacagctcacagcatccccccacagcatggacagcatgctgccctctggagaaggtggcccaaagaggacccaccccactgttccagggattccagggggaacccgggctggggcaggaaaaataggccgaatgattgctgaggaaatcatggaaatccacaggataagagggtcatcgccttctagctgtggctccagcccattgaacatcacgagtacgcctccccctgatgcctcttctccaggaggcaagaagattttaaatggagggactccagacattccttccagtggcctactatcaggccaggctcaggagaacccaggttatccatattctgatagttcttctattcttggtgagaacccccacataggtatagacatgattgacaacgaccaaggatcaagtagtcccagtaatgatgaggcagcaatggctgtcatcatgagcctcttggaagcagatgctggactgggtggccctgttgactttagtgacttgccatggccgctgtaaacactacatgttgctttggcaacagctatagtatcaaagtgcattactggtggagttttacagtctgtgaagcttactggataaggagagaatagcttttatgtactgacttcataaaagccatctcagagccattgatacaagtcaatcttactatatgtaacttcagacaaagtggaactaagcctgctccagtgtttcctcatcattgattattgggctagctgtggatagcttgcattaattgtatattttggattctgtttgtgttgaattttttaatcattgtgcacagaagcatcattggtagcttttatatgcaaatggtcatttcagatgtatggtgtttttacactacaaagaagtcccccatgtggatatttcttatactaattgtatcataaagccgtttattcttccttgtaagaatcctttactataaatatgggttaaagtataatgtactagacagttaaatatttttaataaatgtttcccttgttct

SEQ ID NO: 348 - DNA, 2387 bp, Homo sapiens
  source 1..2387: mol_type = genomic DNA
cggaggtgcctgtttacccgcgccggactcaccgccgccgccgccgcgggatccgagtgcgggcgcgggcgcgggcgctcccggcgagccacggtggtgctggctagagtgtatacgtttggacccaagcttaacttttccaatgtggaatcctgggccttcattggttccgatgtcataggaatctacgctagagggcttcctgtgtgccgggcactgtggtttttggaagaagctgaccgcctgaaaagaaattataaaacatgaaaatcgctttgaggtgaccaagtccagaggcccctaactcctcccaagctggatctggggtgtaagaactgtgacttcagatcatccaatggcagaccagagaatggacatttcttcaaccatcagtgatttcatgtccccgggccccaccgacctgctttccagctctcttggtaccagtggtgtggattgcaaccgcaaacggaaaggcagctccactgactaccaagaaagcatggacacagacaaagatgaccctcatggaaggttagaatatacagaacaccaaggaaggataaaaaatgcaagggaagctcacagtcagattgaaaagcggcgtcgggataaaatgaacagttttatagatgaattggcttctttggtaccaacatgcaacgcaatgtccaggaaattagataaacttactgtgctaaggatggctgttcagcacatgaaaacattaagaggtgccaccaatccatacacagaagcaaactacaaaccaacttttctatcagacgatgaattgaaacacctcattctcagggcagcagatggatttttgtttgtcgtaggatgtgaccgagggaagatactctttgtctcagagtctgtcttcaagatcctcaactacagccagaatgatctgattggtcagagtttgtttgactacctgcatcctaaagatattgccaaagtcaaggagcagctctcctcctctgacaccgcaccccgggagcggctcatagatgcaaaaactggacttccagttaaaacagatataacccctgggccatctcgattatgttctggagcacgacgttctttcttctgtaggatgaagtgtaacaggccttcagtaaaggttgaagacaaggacttcccctctacctgctcaaagaaaaaagttttacagacgagagaaaaaattacaactaattgctataaatttaaaatcaaagatggttcttttatcacactacggagtcgatggttcagtttcatgaacccttggaccaaggaagtagaatatattgtctcaactaacactgttgttttagccaacgtcctggaaggcggggacccaaccttcccacagctcacagcatccccccacagcatggacagcatgctgccctctggagaaggtggcccaaagaggacccaccccactgttccagggattccagggggaacccgggctggggcaggaaaaataggccgaatgattgctgaggaaatcatggaaatccacaggataagagggtcatcgccttctagctgtggctccagcccattgaacatcacgagtacgcctccccctgatgcctcttctccaggaggcaagaagattttaaatggagggactccagacattccttccagtggcctactatcaggccaggctcaggagaacccaggttatccatattctgatagttcttctattcttggtgagaacccccacataggtatagacatgattgacaacgaccaaggatcaagtagtcccagtaatgatgaggcagcaatggctgtcatcatgagcctcttggaagcagatgctggactgggtggccctgttgactttagtgacttgccatggccgctgtaaacactacatgttgctttggcaacagctatagtatcaaagtgcattactggtggagttttacagtctgtgaagcttactggataaggagagaatagcttttatgtactgacttcataaaagccatctcagagccattgatacaagtcaatcttactatatgtaacttcagacaaagtggaactaagcctgctccagtgtttcctcatcattgattattgggctagctgtggatagcttgcattaattgtatattttggattctgtttgtgttgaattttttaatcattgtgcacagaagcatcattggtagcttttatatgcaaatggtcatttcagatgtatggtgtttttacactacaaagaagtcccccatgtggatatttcttatactaattgtatcataaagccgtttattcttccttgtaagaatcctttactataaatatgggttaaagtataatgtactagacagttaaatatttttaataaatgtttcccttgttct

SEQ ID NO: 349 - DNA, 2776 bp, Homo sapiens
  source 1..2776: mol_type = genomic DNA
gacatttagggaaggcagaaagtaggtcagggacggaggtgcctgtttacccgcgccggactcaccgccgccgccgccgcgggatccgagtgcgggcgcgggcgcgggcgctcccggcgagccacggtggtgctggctagagtgtatacgtttggacccaagcttaacttttccaatgtggaatcctgggccttcattggttccgatgtcataggaatctacgctagagggcttcctgtgtgccgggcactgtggtttttggaagaagctgaccgcctgaaaagaaattataaaacatgaaaatcgctttgaggtgaccaagtccagaggcccctaactcctcccaagctggatctggggtgtaagaactgtgacttcagatcatccaatggcagaccagagaatggacatttcttcaaccatcagtgatttcatgtccccgggccccaccgacctgctttccagctctcttggtaccagtggtgtggattgcaaccgcaaacggaaaggcagctccactgactaccaagaaagcatggacacagacaaagatgaccctcatggaaggttagaatatacagaacaccaaggaaggataaaaaatgcaagggaagctcacagtcagattgaaaagcggcgtcgggataaaatgaacagttttatagatgaattggcttctttggtaccaacatgcaacgcaatgtccaggaaattagataaacttactgtgctaaggatggctgttcagcacatgaaaacattaagaggtgccaccaatccatacacagaagcaaactacaaaccaacttttctatcagacgatgaattgaaacacctcattctcagggcagcagatggatttttgtttgtcgtaggatgtgaccgagggaagatactctttgtctcagagtctgtcttcaagatcctcaactacagccagaatgatctgattggtcagagtttgtttgactacctgcatcctaaagatattgccaaagtcaaggagcagctctcctcctctgacaccgcaccccgggagcggctcatagatgcaaaaactggacttccagttaaaacagatataacccctgggccatctcgattatgttctggagcacgacgttctttcttctgtaggatgaagtgtaacaggccttcagtaaaggttgaagacaaggacttcccctctacctgctcaaagaaaaaagatcgaaaaagcttctgcacaatccacagcacaggctatttgaaaagctggccacccacaaagatggggctggatgaagacaacgaaccagacaatgaggggtgtaacctcagctgcctcgtcgcaattggacgactgcattctcatgtagttccacaaccagtgaacggggaaatcagggtgaaatctatggaatatgtttctcggcacgcgatagatggaaagtttgtttttgtagaccagagggcaacagctattttggcatatttaccacaagaacttctaggcacatcgtgttatgaatattttcaccaagatgacataggacatcttgcagaatgtcataggcaagttttacagacgagagaaaaaattacaactaattgctataaatttaaaatcaaagatggttcttttatcacactacggagtcgatggttcagtttcatgaacccttggaccaaggaagtagaatatattgtctcaactaacactgttgttttagccaacgtcctggaaggcggggacccaaccttcccacagctcacagcatccccccacagcatggacagcatgctgccctctggagaaggtggcccaaagaggacccaccccactgttccagggattccagggggaacccgggctggggcaggaaaaataggccgaatgattgctgaggaaatcatggaaatccacaggataagagggtcatcgccttctagctgtggctccagcccattgaacatcacgagtacgcctccccctgatgcctcttctccaggaggcaagaagattttaaatggagggactccagacattccttccagtggcctactatcaggccaggctcaggagaacccaggttatccatattctgatagttcttctattcttggtgagaacccccacataggtatagacatgattgacaacgaccaaggatcaagtagtcccagtaatgatgaggcagcaatggctgtcatcatgagcctcttggaagcagatgctggactgggtggccctgttgactttagtgacttgccatggccgctgtaaacactacatgttgctttggcaacagctatagtatcaaagtgcattactggtggagttttacagtctgtgaagcttactggataaggagagaatagcttttatgtactgacttcataaaagccatctcagagccattgatacaagtcaatcttactatatgtaacttcagacaaagtggaactaagcctgctccagtgtttcctcatcattgattattgggctagctgtggatagcttgcattaattgtatattttggattctgtttgtgttgaattttttaatcattgtgcacagaagcatcattggtagcttttatatgcaaatggtcatttcagatgtatggtgtttttacactacaaagaagtcccccatgtggatatttcttatactaattgtatcataaagccgtttattcttccttgtaagaatcctttactataaatatgggttaaagtataatgtactagacagttaaatatttttaataaatgtttcccttgttctataaa

SEQ ID NO: 350 - DNA, 2836 bp, Homo sapiens
  source 1..2836: mol_type = genomic DNA
cggaggtgcctgtttacccgcgccggactcaccgccgccgccgccgcgggatccgagtgcgggcgcgggcgcgggcgctcccggcgagccacggtggtgctggctagagtgtatacgtttggacccaagcttaacttttccaatgtggaatcctgggccttcattggttccgatgtcataggaatctacgctagagggcttcctgtgtgccgggcactgtggtttttggaagaagctgaccgcctgaaaagaaattataaaacatgaaaatcgctttgaggtgaccaagtccagaggcccctaactcctcccaagctggatctggggtgtaagaactgtgacttcagatcatccaatggcagaccagagaatggacatttcttcaaccatcagtgatttcatgtccccgggccccaccgacctgctttccagctctcttggtaccagtggtgtggattgcaaccgcaaacggaaaggcagctccactgactaccaagaaagcatggacacagacaaagatgaccctcatggaaggttagaatatacagaacaccaaggaaggataaaaaatgcaagggaagctcacagtcagattgaaaagcggcgtcgggataaaatgaacagttttatagatgaattggcttctttggtaccaacatgcaacgcaatgtccaggaaattagataaacttactgtgctaaggatggctgttcagcacatgaaaacattaagaggtgccaccaatccatacacagaagcaaactacaaaccaacttttctatcagacgatgaattgaaacacctcattctcagggcagcagatggatttttgtttgtcgtaggatgtgaccgagggaagatactctttgtctcagagtctgtcttcaagatcctcaactacagccagaatgatctgattggtcagagtttgtttgactacctgcatcctaaagatattgccaaagtcaaggagcagctctcctcctctgacaccgcaccccgggagcggctcatagatgcaaaaactggacttccagttaaaacagatataacccctgggccatctcgattatgttctggagcacgacgttctttcttctgtaggatgaagtgtaacaggccttcagtaaaggttgaagacaaggacttcccctctacctgctcaaagaaaaaagcagatcgaaaaagcttctgcacaatccacagcacaggctatttgaaaagctggccacccacaaagatggggctggatgaagacaacgaaccagacaatgaggggtgtaacctcagctgcctcgtcgcaattggacgactgcattctcatgtagttccacaaccagtgaacggggaaatcagggtgaaatctatggaatatgtttctcggcacgcgatagatggaaagtttgtttttgtagaccagagggcaacagctattttggcatatttaccacaagaacttctaggcacatcgtgttatgaatattttcaccaagatgacataggacatcttgcagaatgtcataggcaagttttacagacgagagaaaaaattacaactaattgctataaatttaaaatcaaagatggttcttttatcacactacggagtcgatggttcagtttcatgaacccttggaccaaggaagtagaatatattgtctcaactaacactgttgttttgtccagagtggacaccggacaccttggccaagttgaatggtgcacagttctgagcaggcctgactcacgtttccttattgctgggatgttcacagagccaacgtcctggaaggcggggacccaaccttcccacagctcacagcatccccccacagcatggacagcatgctgccctctggagaaggtggcccaaagaggacccaccccactgttccagggattccagggggaacccgggctggggcaggaaaaataggccgaatgattgctgaggaaatcatggaaatccacaggataagagggtcatcgccttctagctgtggctccagcccattgaacatcacgagtacgcctccccctgatgcctcttctccaggaggcaagaagattttaaatggagggactccagacattccttccagtggcctactatcaggccaggctcaggagaacccaggttatccatattctgatagttcttctattcttggtgagaacccccacataggtatagacatgattgacaacgaccaaggatcaagtagtcccagtaatgatgaggcagcaatggctgtcatcatgagcctcttggaagcagatgctggactgggtggccctgttgactttagtgacttgccatggccgctgtaaacactacatgttgctttggcaacagctatagtatcaaagtgcattactggtggagttttacagtctgtgaagcttactggataaggagagaatagcttttatgtactgacttcataaaagccatctcagagccattgatacaagtcaatcttactatatgtaacttcagacaaagtggaactaagcctgctccagtgtttcctcatcattgattattgggctagctgtggatagcttgcattaattgtatattttggattctgtttgtgttgaattttttaatcattgtgcacagaagcatcattggtagcttttatatgcaaatggtcatttcagatgtatggtgtttttacactacaaagaagtcccccatgtggatatttcttatactaattgtatcataaagccgtttattcttccttgtaagaatcctttactataaatatgggttaaagtataatgtactagacagttaaatatttttaataaatgtttcccttgttct

SEQ ID NO: 351 - DNA, 2736 bp, Homo sapiens
  source 1..2736: mol_type = genomic DNA
ggaaagtaggttagtggtgcgacatttagggaaggcagaaagtaggtcagggacggaggtgcctgtttacccgcgccggactcaccgccgccgccgccgcgggatccgagtgcgggcgcgggcgcgggcgctcccggcgagccacggtggtgctggctagagtgtatacgtttggacccaagcttaacttttccaatgtggaatcctgggccttcattggtttttggaagaagctgaccgcctgaaaagaaattataaaacatgaaaatcgctttgaggtgaccaagtccagaggcccctaactcctcccaagctggatctggggtgtaagaactgtgacttcagatcatccaatggcagaccagagaatggacatttcttcaaccatcagtgatttcatgtccccgggccccaccgacctgctttccagctctcttggtaccagtggtgtggattgcaaccgcaaacggaaaggcagctccactgactaccaagaaagcatggacacagacaaagatgaccctcatggaaggttagaatatacagaacaccaaggaaggataaaaaatgcaagggaagctcacagtcagattgaaaagcggcgtcgggataaaatgaacagttttatagatgaattggcttctttggtaccaacatgcaacgcaatgtccaggaaattagataaacttactgtgctaaggatggctgttcagcacatgaaaacattaagaggtgccaccaatccatacacagaagcaaactacaaaccaacttttctatcagacgatgaattgaaacacctcattctcagggcagcagatggatttttgtttgtcgtaggatgtgaccgagggaagatactctttgtctcagagtctgtcttcaagatcctcaactacagccagaatgatctgattggtcagagtttgtttgactacctgcatcctaaagatattgccaaagtcaaggagcagctctcctcctctgacaccgcaccccgggagcggctcatagatgcaaaaactggacttccagttaaaacagatataacccctgggccatctcgattatgttctggagcacgacgttctttcttctgtaggatgaagtgtaacaggccttcagtaaaggttgaagacaaggacttcccctctacctgctcaaagaaaaaagatcgaaaaagcttctgcacaatccacagcacaggctatttgaaaagctggccacccacaaagatggggctggatgaagacaacgaaccagacaatgaggggtgtaacctcagctgcctcgtcgcaattggacgactgcattctcatgtagttccacaaccagtgaacggggaaatcagggtgaaatctatggaatatgtttctcggcacgcgatagatggaaagtttgtttttgtagaccagagggcaacagctattttggcatatttaccacaagaacttctaggcacatcgtgttatgaatattttcaccaagatgacataggacatcttgcagaatgtcataggcaagttttacagacgagagaaaaaattacaactaattgctataaatttaaaatcaaagatggttcttttatcacactacggagtcgatggttcagtttcatgaacccttggaccaaggaagtagaatatattgtctcaactaacactgttgttttagccaacgtcctggaaggcggggacccaaccttcccacagctcacagcatccccccacagcatggacagcatgctgccctctggagaaggtggcccaaagaggacccaccccactgttccagggattccagggggaacccgggctggggcaggaaaaataggccgaatgattgctgaggaaatcatggaaatccacaggataagagggtcatcgccttctagctgtggctccagcccattgaacatcacgagtacgcctccccctgatgcctcttctccaggaggcaagaagattttaaatggagggactccagacattccttccagtggcctactatcaggccaggctcaggagaacccaggttatccatattctgatagttcttctattcttggtgagaacccccacataggtatagacatgattgacaacgaccaaggatcaagtagtcccagtaatgatgaggcagcaatggctgtcatcatgagcctcttggaagcagatgctggactgggtggccctgttgactttagtgacttgccatggccgctgtaaacactacatgttgctttggcaacagctatagtatcaaagtgcattactggtggagttttacagtctgtgaagcttactggataaggagagaatagcttttatgtactgacttcataaaagccatctcagagccattgatacaagtcaatcttactatatgtaacttcagacaaagtggaactaagcctgctccagtgtttcctcatcattgattattgggctagctgtggatagcttgcattaattgtatattttggattctgtttgtgttgaattttttaatcattgtgcacagaagcatcattggtagcttttatatgcaaatggtcatttcagatgtatggtgtttttacactacaaagaagtcccccatgtggatatttcttatactaattgtatcataaagccgtttattcttccttgtaagaatcctttactataaatatgggttaaagtataatgtactagacagttaaatatttttaataaatgtttcccttgttct

SEQ ID NO: 352 - DNA, 2788 bp, Homo sapiens
  source 1..2788: mol_type = genomic DNA
gacatttagggaaggcagaaagtaggtcagggacggaggtgcctgtttacccgcgccggactcaccgccgccgccgccgcgggatccgagtgcgggcgcgggcgcgggcgctcccggcgagccacggtggtgctggctagagtgtatacgtttggacccaagcttaacttttccaatgtggaatcctgggccttcattggtttttggaagaagctgaccgcctgaaaagaaattataaaacatgaaaatcgctttgaggtgaccaagtccagaggcccctaactcctcccaagctggatctggggtgtaagaactgtgacttcagatcatccaatggcagaccagagaatggacatttcttcaaccatcagtgatttcatgtccccgggccccaccgacctgctttccagctctcttggtaccagtggtgtggattgcaaccgcaaacggaaaggcagctccactgactaccagtcgaatttggggagcacaatggctggaggtcagatgcccactaggagatgctatgattaatatagaaagcatggacacagacaaagatgaccctcatggaaggttagaatatacagaacaccaaggaaggataaaaaatgcaagggaagctcacagtcagattgaaaagcggcgtcgggataaaatgaacagttttatagatgaattggcttctttggtaccaacatgcaacgcaatgtccaggaaattagataaacttactgtgctaaggatggctgttcagcacatgaaaacattaagaggtgccaccaatccatacacagaagcaaactacaaaccaacttttctatcagacgatgaattgaaacacctcattctcagggcagcagatggatttttgtttgtcgtaggatgtgaccgagggaagatactctttgtctcagagtctgtcttcaagatcctcaactacagccagaatgatctgattggtcagagtttgtttgactacctgcatcctaaagatattgccaaagtcaaggagcagctctcctcctctgacaccgcaccccgggagcggctcatagatgcaaaaactggacttccagttaaaacagatataacccctgggccatctcgattatgttctggagcacgacgttctttcttctgtaggatgaagtgtaacaggccttcagtaaaggttgaagacaaggacttcccctctacctgctcaaagaaaaaagcagatcgaaaaagcttctgcacaatccacagcacaggctatttgaaaagctggccacccacaaagatggggctggatgaagacaacgaaccagacaatgaggggtgtaacctcagctgcctcgtcgcaattggacgactgcattctcatgtagttccacaaccagtgaacggggaaatcagggtgaaatctatggaatatgtttctcggcacgcgatagatggaaagtttgtttttgtagaccagagggcaacagctattttggcatatttaccacaagaacttctaggcacatcgtgttatgaatattttcaccaagatgacataggacatcttgcagaatgtcataggcaagttttacagacgagagaaaaaattacaactaattgctataaatttaaaatcaaagatggttcttttatcacactacggagtcgatggttcagtttcatgaacccttggaccaaggaagtagaatatattgtctcaactaacactgttgttttagccaacgtcctggaaggcggggacccaaccttcccacagctcacagcatccccccacagcatggacagcatgctgccctctggagaaggtggcccaaagaggacccaccccactgttccagggattccagggggaacccgggctggggcaggaaaaataggccgaatgattgctgaggaaatcatggaaatccacaggataagagggtcatcgccttctagctgtggctccagcccattgaacatcacgagtacgcctccccctgatgcctcttctccaggaggcaagaagattttaaatggagggactccagacattccttccagtggcctactatcaggccaggctcaggagaacccaggttatccatattctgatagttcttctattcttggtgagaacccccacataggtatagacatgattgacaacgaccaaggatcaagtagtcccagtaatgatgaggcagcaatggctgtcatcatgagcctcttggaagcagatgctggactgggtggccctgttgactttagtgacttgccatggccgctgtaaacactacatgttgctttggcaacagctatagtatcaaagtgcattactggtggagttttacagtctgtgaagcttactggataaggagagaatagcttttatgtactgacttcataaaagccatctcagagccattgatacaagtcaatcttactatatgtaacttcagacaaagtggaactaagcctgctccagtgtttcctcatcattgattattgggctagctgtggatagcttgcattaattgtatattttggattctgtttgtgttgaattttttaatcattgtgcacagaagcatcattggtagcttttatatgcaaatggtcatttcagatgtatggtgtttttacactacaaagaagtcccccatgtggatatttcttatactaattgtatcataaagccgtttattcttccttgtaagaatcctttactataaatatgggttaaagtataatgtactagacagttaaatatttttaataaatgtttcccttgttctataaa

SEQ ID NO: 353 - DNA, 2746 bp, Homo sapiens
  source 1..2746: mol_type = genomic DNA
cggaggtgcctgtttacccgcgccggactcaccgccgccgccgccgcgggatccgagtgcgggcgcgggcgcgggcgctcccggcgagccacggtggtgctggctagagtgtatacgtttggacccaagcttaacttttccaatgtggaatcctgggccttcattggttccgatgtcataggaatctacgctagagggcttcctgtgtgccgggcactgtggtttttggaagaagctgaccgcctgaaaagaaattataaaacatgaaaatcgctttgaggtgaccaagtccagaggcccctaactcctcccaagctggatctggggtgtaagaactgtgacttcagatcatccaatggcagaccagagaatggacatttcttcaaccatcagtgatttcatgtccccgggccccaccgacctgctttccagctctcttggtaccagtggtgtggattgcaaccgcaaacggaaaggcagctccactgactaccaagaaagcatggacacagacaaagatgaccctcatggaaggttagaatatacagaacaccaaggaaggataaaaaatgcaagggaagctcacagtcagattgaaaagcggcgtcgggataaaatgaacagttttatagatgaattggcttctttggtaccaacatgcaacgcaatgtccaggaaattagataaacttactgtgctaaggatggctgttcagcacatgaaaacattaagaggtgccaccaatccatacacagaagcaaactacaaaccaacttttctatcagacgatgaattgaaacacctcattctcagggcagcagatggatttttgtttgtcgtaggatgtgaccgagggaagatactctttgtctcagagtctgtcttcaagatcctcaactacagccagaatgatctgattggtcagagtttgtttgactacctgcatcctaaagatattgccaaagtcaaggagcagctctcctcctctgacaccgcaccccgggagcggctcatagatgcaaaaactggacttccagttaaaacagatataacccctgggccatctcgattatgttctggagcacgacgttctttcttctgtaggatgaagtgtaacaggccttcagtaaaggttgaagacaaggacttcccctctacctgctcaaagaaaaaagcagatcgaaaaagcttctgcacaatccacagcacaggctatttgaaaagctggccacccacaaagatggggctggatgaagacaacgaaccagacaatgaggggtgtaacctcagctgcctcgtcgcaattggacgactgcattctcatgtagttccacaaccagtgaacggggaaatcagggtgaaatctatggaatatgtttctcggcacgcgatagatggaaagtttgtttttgtagaccagagggcaacagctattttggcatatttaccacaagaacttctaggcacatcgtgttatgaatattttcaccaagatgacataggacatcttgcagaatgtcataggcaagttttacagacgagagaaaaaattacaactaattgctataaatttaaaatcaaagatggttcttttatcacactacggagtcgatggttcagtttcatgaacccttggaccaaggaagtagaatatattgtctcaactaacactgttgttttagccaacgtcctggaaggcggggacccaaccttcccacagctcacagcatccccccacagcatggacagcatgctgccctctggagaaggtggcccaaagaggacccaccccactgttccagggattccagggggaacccgggctggggcaggaaaaataggccgaatgattgctgaggaaatcatggaaatccacaggataagagggtcatcgccttctagctgtggctccagcccattgaacatcacgagtacgcctccccctgatgcctcttctccaggaggcaagaagattttaaatggagggactccagacattccttccagtggcctactatcaggccaggctcaggagaacccaggttatccatattctgatagttcttctattcttggtgagaacccccacataggtatagacatgattgacaacgaccaaggatcaagtagtcccagtaatgatgaggcagcaatggctgtcatcatgagcctcttggaagcagatgctggactgggtggccctgttgactttagtgacttgccatggccgctgtaaacactacatgttgctttggcaacagctatagtatcaaagtgcattactggtggagttttacagtctgtgaagcttactggataaggagagaatagcttttatgtactgacttcataaaagccatctcagagccattgatacaagtcaatcttactatatgtaacttcagacaaagtggaactaagcctgctccagtgtttcctcatcattgattattgggctagctgtggatagcttgcattaattgtatattttggattctgtttgtgttgaattttttaatcattgtgcacagaagcatcattggtagcttttatatgcaaatggtcatttcagatgtatggtgtttttacactacaaagaagtcccccatgtggatatttcttatactaattgtatcataaagccgtttattcttccttgtaagaatcctttactataaatatgggttaaagtataatgtactagacagttaaatatttttaataaatgtttcccttgttctataaa

SEQ ID NO: 354 - DNA, 2745 bp, Homo sapiens
  source 1..2745: mol_type = genomic DNA
gtttacccgcgccggactcaccgccgccgccgccgcgggatccgagtgcgggcgcgggcgcgggcgctcccggcgagccacggtggtgctggctagagtgtatacgtttggacccaagcttaacttttccaatgtggaatcctgggccttcattggtttttggaagaagctgaccgcctgaaaagaaattataaaacatgaaaatcgctttgaggtgaccaagtccagaggcccctaactcctcccaagctggatctggggtgtaagaactgtgacttcagatcatccaatggcagaccagagaatggacatttcttcaaccatcagtgatttcatgtccccgggccccaccgacctgctttccagctctcttggtaccagtggtgtggattgcaaccgcaaacggaaaggcagctccactgactaccattcacaggtcgaatttggggagcacaatggctggaggtcagatgcccactaggagatgctatgattaatatagaaagcatggacacagacaaagatgaccctcatggaaggttagaatatacagaacaccaaggaaggataaaaaatgcaagggaagctcacagtcagattgaaaagcggcgtcgggataaaatgaacagttttatagatgaattggcttctttggtaccaacatgcaacgcaatgtccaggaaattagataaacttactgtgctaaggatggctgttcagcacatgaaaacattaagaggtgccaccaatccatacacagaagcaaactacaaaccaacttttctatcagacgatgaattgaaacacctcattctcagggcagcagatggatttttgtttgtcgtaggatgtgaccgagggaagatactctttgtctcagagtctgtcttcaagatcctcaactacagccagaatgatctgattggtcagagtttgtttgactacctgcatcctaaagatattgccaaagtcaaggagcagctctcctcctctgacaccgcaccccgggagcggctcatagatgcaaaaactggacttccagttaaaacagatataacccctgggccatctcgattatgttctggagcacgacgttctttcttctgtaggatgaagtgtaacaggccttcagtaaaggttgaagacaaggacttcccctctacctgctcaaagaaaaaagatcgaaaaagcttctgcacaatccacagcacaggctatttgaaaagctggccacccacaaagatggggctggatgaagacaacgaaccagacaatgaggggtgtaacctcagctgcctcgtcgcaattggacgactgcattctcatgtagttccacaaccagtgaacggggaaatcagggtgaaatctatggaatatgtttctcggcacgcgatagatggaaagtttgtttttgtagaccagagggcaacagctattttggcatatttaccacaagaacttctaggcacatcgtgttatgaatattttcaccaagatgacataggacatcttgcagaatgtcataggcaagttttacagacgagagaaaaaattacaactaattgctataaatttaaaatcaaagatggttcttttatcacactacggagtcgatggttcagtttcatgaacccttggaccaaggaagtagaatatattgtctcaactaacactgttgttttagccaacgtcctggaaggcggggacccaaccttcccacagctcacagcatccccccacagcatggacagcatgctgccctctggagaaggtggcccaaagaggacccaccccactgttccagggattccagggggaacccgggctggggcaggaaaaataggccgaatgattgctgaggaaatcatggaaatccacaggataagagggtcatcgccttctagctgtggctccagcccattgaacatcacgagtacgcctccccctgatgcctcttctccaggaggcaagaagattttaaatggagggactccagacattccttccagtggcctactatcaggccaggctcaggagaacccaggttatccatattctgatagttcttctattcttggtgagaacccccacataggtatagacatgattgacaacgaccaaggatcaagtagtcccagtaatgatgaggcagcaatggctgtcatcatgagcctcttggaagcagatgctggactgggtggccctgttgactttagtgacttgccatggccgctgtaaacactacatgttgctttggcaacagctatagtatcaaagtgcattactggtggagttttacagtctgtgaagcttactggataaggagagaatagcttttatgtactgacttcataaaagccatctcagagccattgatacaagtcaatcttactatatgtaacttcagacaaagtggaactaagcctgctccagtgtttcctcatcattgattattgggctagctgtggatagcttgcattaattgtatattttggattctgtttgtgttgaattttttaatcattgtgcacagaagcatcattggtagcttttatatgcaaatggtcatttcagatgtatggtgtttttacactacaaagaagtcccccatgtggatatttcttatactaattgtatcataaagccgtttattcttccttgtaagaatcctttactataaatatgggttaaagtataatgtactagacagttaaatatttttaataaatgtttcccttgttctat

SEQ ID NO: 355 - DNA, 739 bp, Homo sapiens
  source 1..739: mol_type = genomic DNA
gagtgcgggcgcgggcgcgggcgctcccggcgagccacggtggtgctggctagagtgtatacgtttggacccaagcttaacttttccaatgtggaatcctgggccttcattggttccgatgtcataggaatctacgctagagggcttcctgtgtgccgggcactgtggtttttggaagaagctgaccgcctgaaaagaaattataaaacatgaaaatcgctttgaggtgaccaagtccagaggcccctaactcctcccaagctggatctggggtgtaagaactgtgacttcagatcatccaatggcagaccagagaatggacatttcttcaaccatcagtgatttcatgtccccgggccccaccgacctgctttccagctctcttggtaccagtggtgtggattgcaaccgcaaacggaaaggcagctccactgactaccaacttgttgacttttcgtttgattcacaggtcgaatttggggagcacaatggctggaggtcagatgcccactaggagatgctatgattaatatagaaagcatggacacagacaaagatgaccctcatggaaggttagaatatacagaacaccaaggaaggataaaaaatgcaagggaagctcacagtcagattgaaaagcggcgtcgggataaaatgaacagttttatagatgaattggcttctttggtaccaacatgcaacgcaatgtccaggaaattagataaacttactgtgctaa

SEQ ID NO: 356 - DNA, 519 bp, Homo sapiens
  source 1..519: mol_type = genomic DNA
cgggcgttcggattggctggcgggaagaggtggtgctggctagagtgtatacgtttggacccaagcttaacttttccaatgtggaatcctgggccttcattggttccgatgtcataggaatctacgctagagggcttcctgtgtgccgggcactgtggtttttggaagaagctgaccgcctgaaaagaaattataaaacatgaaaatcgctttgaggtgaccaagtccagaggcccctaactcctcccaagctggatctggggtgtaagaactgtgacttcagatcatccaatggcagaccagagaatggacatttcttcaaccatcagtgatttcatgtccccgggccccaccgacctgctttccagctctcttggtaccagtggtgtggattgcaaccgcaaacggaaaggcagctccactgactaccaagaaagcatggacacagacaaagatgaccctcatggaaggttagaatatacagaacaccaaggaaggataaaaaatgcaagggaagct

SEQ ID NO: 357 - DNA, 571 bp, Homo sapiens
  source 1..571: mol_type = genomic DNA
accctaccccagcaggcgctaaaggagagctgacatgatggataacgaaaaagaagacgctgtccttctattcagggagtttaacatctggaagagccgggagttctttgtgctaaaggccctctacaaagtgcctgagatgcaaaaataagtcactttctctgtcctctcagcaaccgagtcgcatgtcgttatcaaatttttattttctgtaactgtttccttccgtcttgctccgtagacagctttttgcagcagagagcgctgccgcggggctggtgtctactcttcagtaagtggtcaaaacctggctactggaaggaaatgcaatggaatcgctccgcgctcgagtattctctttggaactacgggaatgacagctccagtgggacacttggaggtcatgatgaacgcaaagaacgtggtgctggctagagtgtatacgtttggacccaagcttaacttttccaatgtggaatcctgggccttcattgatcatccaatggcagaccagagaatggacatttcttcaaccatcagtgatttcatgtccccgggccccaccgacctg

SEQ ID NO: 358 - DNA, 610 bp, Homo sapiens
  source 1..610: mol_type = genomic DNA
tttagggaaggcagaaagtaggtcagggacggaggtgcctgtttacccgcgccggactcaccgccgccgccgccgcgggatccgagtgcgggcgcgggcgcgggcgctcccggcgagccacggtggtgctggctagagtgtatacgtttggacccaagcttaacttttccaatgtggaatcctgggccttcattgatcatccaatggcagaccagagaatggacatttcttcaaccatcagtgatttcatgtccccgggccccaccgacctgctttccagctctcttggtaccagtggtgtggattgcaaccgcaaacggaaaggcagctccactgactaccaagaaagcatggacacagacaaagatgaccctcatggaaggttagaatatacagaacaccaaggaaggataaaaaatgcaagggaagctcacagtcagattgaaaagcggcgtcgggataaaatgaacagttttatagatgaattggcttctttggtaccaacatgcaacgcaatgtccaggaaattagataaacttactgtgctaaggatggctgttcagcacatgaaaacattaagaggtgccaccaatccatacacagaagcaaa

SEQ ID NO: 359 - DNA, 551 bp, Homo sapiens
  source 1..551: mol_type = genomic DNA
gtgcgacatttagggaaggcagaaagtaggtcagggacggaggtgcctgtttacccgcgccggactcaccgccgccgccgccgcgggatccgagtgcgggcgcgggcgcgggcgctcccggcgagccacggtggtgctggctagagtgtatacgtttggacccaagcttaacttttccaatgtggaatcctgggccttcattgatcatccaatggcagaccagagaatggacatttcttcaaccatcagtgatttcatgtccccgggccccaccgacctgctttccagctctcttggtaccagtggtgtggattgcaaccgcaaacggaaaggcagctccactgactaccattcacaggtcgaatttggggagcacaatggctggaggtcagatgcccactaggagatgctatgattaatatagaaagcatggacacagacaaagatgaccctcatggaaggttagaatatacagaacaccaaggaaggataaaaaatgcaagggaagctcacagtcagattgaaaagcggcgtcgggataaaatgaacag

SEQ ID NO: 360 - DNA, 868 bp, Homo sapiens
  source 1..868: mol_type = genomic DNA
gaaagtaggtcagggacggaggtgcctgtttacccgcgccggactcaccgccgccgccgccgcgggatccgagtgcgggcgcgggcgcgggcgctcccggcgagccacggtggtgctggctagagtgtatacgtttggacccaagcttaacttttccaatgtggaatcctgggccttcattggttccgatgtcataggaatctacgctagagggcttcctgtgtgccgggcactgtgatcatccaatggcagaccagagaatggacatttcttcaaccatcagtgatttcatgtccccgggccccaccgacctgctttccagctctcttggtaccagtggtgtggattgcaaccgcaaacggaaaggcagctccactgactaccattcacaggtcgaatttggggagcacaatggctggaggtcagatgcccactaggagatgctatgattaatatagaaagcatggacacagacaaagatgaccctcatggaaggttagaatatacagaacaccaaggaaggataaaaaatgcaagggaagctcacagtcagattgaaaagcggcgtcgggataaaatgaacagttttatagatgaattggcttctttggtaccaacatgcaacgcaatgtccaggaaattagataaacttactgtgctaaggatggctgttcagcacatgaaaacattaagaggtgccaccaatccatacacagaagcaaactacaaaccaacttttctatcagacgatgaattgaaacacctcattctcagggcagcagatggatttttgtttgtcgtaggatgtgaccgagggaagatactctttgtctcagagtctgtcttcaagatcctcaactacagccag

SEQ ID NO: 361 - DNA, 567 bp, Homo sapiens
  source 1..567: mol_type = genomic DNA
ggtgcgacatttagggaaggcagaaagtaggtcagggacggaggtgcctgtttacccgcgccggactcaccgccgccgccgccgcgggatccgagtgcgggcgcgggcgcgggcgctcccggcgagccacggtttttggaagaagctgaccgcctgaaaagaaattataaaacatgaaaatcgctttgaggtgaccaagtccagaggcccctaactcctcccaagctggatctggggtgtaagaactgtgacttcagatcatccaatggcagaccagagaatggacatttcttcaaccatcagtgatttcatgtccccgggccccaccgacctgctttccagctctcttggtaccagtggtgtggattgcaaccgcaaacggaaaggcagctccactgactaccaagaaagcatggacacagacaaagatgaccctcatggaaggttagaatatacagaacaccaaggaaggataaaaaatgcaagggaagctcacagtcagattgaaaagcggcgtcgggataaaatgaacagttttatagatgaattggcttctttggtaccaac

SEQ ID NO: 362 - DNA, 807 bp, Homo sapiens
  source 1..807: mol_type = genomic DNA
accctaccccagcaggcgctaaaggagagctgacatgatggataacgaaaaagaagacgctgtccttctattcagggagtttaacatctggaagagccgggagttctttgtgctaaaggccctctacaaagtgcctgagatgcaaaaataagtcactttctctgtcctctcagcaaccgagtcgcatgtcgttatcaaatttttattttctgtaactgtttccttccgtcttgctccgtagacagctttttgcagcagagagcgctgccgcggggctggtgtctactcttcagtaagtggtcaaaacctggctactggaaggaaatgcaatggaatcgctccgcgctcgagtattctctttggaactacgggaatgacagctccagtgggacacttggaggtcatgatgaacgcaaagaacgtggtgctggctagagtgtatacgtttggacccaagcttaacttttccaatgtggaatcctgggccttcattggtttttggaagaagctgaccgcctgaaaagaaattataaaacatgaaaatcgctttgaggtgaccaagtccagaggcccctaactcctcccaagctggatctggggtgtaagaactgtgacttcagatcatccaatggcagaccagagaatggacatttcttcaaccatcagtgatttcatgtccccgggccccaccgacctgctttccagctctcttggtaccagtggtgtggattgcaaccgcaaacggaaaggcagctccactgactaccaagaaagcatggacacagacaaagatgaccctcatggaag

SEQ ID NO: 363 - DNA, 4243 bp, Homo sapiens
  source 1..4243: mol_type = genomic DNA
gcttccggtgcgggccccgccccggctgtggcccccggctgcggaggagtccgagacgcagctgccgcgccggggcctgagctgccgcctcctccgccgcccgaaaacccggagtgccccgcacaggtttagacccagtgtgcctggtgggctgtgcccaggttcagagtcatgccactctgtgggtgaagcttgaggcaaaaatggagccacttcagcagcagcagcagcagcagcagcaacaacagaagcagccacacctggctcctctgcagatggatgccagagagaagcagggccagcagatgagagaagcccagttcttgtatgcccaaaagctggtcacacagccgactctcctttccgccacagctgggagaccttctggcagcactcccttaggtcccttagccagagttccacccaccgcagcagtggcccaagtgtttgaacggggcaacatgaactcagagcctgaggaagaggacggaggtttggaagatgaggatggggatgatgaagttgcagaggtggctgagaaagaaacccaggctgcttcaaaatattttcatgtgcagaaagtagctcgccaagatcccagagtggcacccatgtccaatctacttccagcaccagggctcccaccacatggacaacaagctaaagaagaccataccaaagatgcttccaaggcctcaccttctgtctccacagcaggacagccgaactggaatctggatgagcagctcaagcagaatggtggtttggcctggagtgatgatgcagatggaggccggggaagagagatctctcgagattttgccaagctgtatgaactggacggtgatcctgaaaggaaagagttcctggatgacctcttcgtctttatgcagaagagggggacccccatcaaccgaatccccatcatggccaaacagatcctggacctgtacatgctgtataagctggtgaccgagaagggaggcctggtggagatcatcaacaagaagatctggagggagatcaccaaaggcctaaacctgcccacatccatcaccagcgccgccttcaccctcaggacgcagtacatgaagtatctgtatgcctatgagtgtgagaagaaagccttgagttccccagccgagctccaggcagcaattgatggcaaccgcagggagggccggcggcccagctacagctcctccctctttggctactcacctgctgcggctactgctgctgccgctgccggggcccctgcccttctctccccacccaagatccgctttcccatccttgggcttggctccagcagtggtaccaataccagtagccctcggatatccccagcaaccactctcaggaaaggtgatggagccccagtgacaacagtgcctgtgccaaatcgtctggctgtgcccgtgaccttggcaagccagcaggctggtactcggaccgccgcactggagcagctgcgggagcggctggagtcaggggagcctgctgagaagaaggcatcgaggctgtctgaggaggagcagcgcctggtgcagcaggccttccagcgcaactttttcagcatggcacggcagctccccatgaagatcaggatcaacggcagggaagacagagcagaggcctcggctgcagcactgaacctgaccacgagtagcattgggagcattaacatgtctgtggacatcgatggcaccacctatgcaggtgtgctgtttgcccagaagcctgtggtccacctcatcacggggtctgctccccagagcctcggcagcagcgccagcagcagcagcagctctcactgttcaccaagtcctacctcatcccggggcacccccagcgcagagccctccaccagctggtccctctgatgggcaggacccagcttcccacttgccactctcctgtcgagagtgaaggaagttgatgcacagaatttacctcatctcacagagcccacgtcgacgagcaccatttggccagacattgagagtttggacgtgtccgtctgtccaggctccattcaggtcctgctgtactctgggggcagggagaggctagaggggcaggacagacagcgttgtccaatcagggattgtcctggagaactgggtgggggtctgtgggtgtccagcttcctccagggttccccagccacctcccagctcagggcacagtgtatcgacaatctgtcagccgacgcagggctggaggccctccatttccctccccttttaatttatttccctgaccctgccttctgccatgaccccagggccactagtctcttcccctgtttttaagtcccatgtggggctgccaggagccaagagcatgccttcatgcccttctctgcagagcatgggatggggcccttccagcccactttgcctactgttaggttcctggggtacgggtccctcaaacacaagtcttgaatcagtcctcagggccccagatcccccttctaatagtctgaaggaagaggctgtgagggcagttcagggccagggcccacagggcatctgctgatgggaaggcagagcctcggggctgcccagccctggcacctgcttcacacggaccattctctgaccgcccccgccaaacctcatgctccccacttgcccttattggcctgctttcccaaaaacagcccactcatcctttccccagccctcttcagccctccccagtcctccccagccttcttcagccttcttcagctcagccctcttctatttcttatggggccatcttggcctcaccatccccacacgtgccgatgtcaggttcattgaaatacctcagatttgtaattgttgatgtttgagtcttcaggaagtatttgcatctctgaaatcttttttatatgtgttttgctgacttttgttttttttttattttaaaatttttatcgtagcaccaaagaaatgaaaacagatcacccccaaagccaagcaagtgattgggtaacccggcccctctggcccttccctcaagcccagtgaggaggtgggtggaggcatgcaggggagacgactcagggatcgcgggggcggggaggtggagtggagaggcccgctctcacaccgggtcgggccctgaaactgtaccagttctgaagaccgttttctgccacacccccacccccagctgaccagggaggcagaggacacctccccatcactcagcattcccagctcagggcacaggcaggctggggtcctcgctggccttgccagaggttgagccgccccagggtatgaggagatgaataactccacagctcctcctggaccctgcgcgggagcaggcagctcctgtgctgtaaagaaaattgattcgcttgcggctcacctcagtcgaggaagccctggaatgttcagcagaacaccaccactgtgacatggggctgtggcagtgggagacaccgcgcgtggcgtgggtgtgtgtggcagcgtggctcgcattcagtcctgtgtaggagaggaaagggaatcaaaagcttgagcacaaacagatacctcagcccggtaagctgcagctctgctcaactgcgtcttctctcagccctccacacacactcacccccactcccacacacatacacacacacacacacataccccatctcccgagggctgacctcctctggcctcagcctgcagggtgtgggcagagaagggcatctgggacgtggtgccagtgaggagcccagttggctggcactgggcccatttgaaggtgtctcagacatttggccagtatgtctttctcaggggtttggtcacaaaggatggactcttcccacccagaggatgcagggaaagcacactgtgtctttccggtcattggatcctctccctttccccaggcagctcgcctggccacaccgttggagtgaaccctcactgccctcaaggacaacagcagggtgtcacccagagcccgatgaggggtgccagcaggtgcccccacgagtggggccttggcccaagcagagcttcccctgaaggtgccatcagccagggcagctctgtcccctcctgctctccatcttatatgtattctaaccaggaaaaatgtgatagcacatgggtagcctaggcagtgagtaaatacctcagatgtcctcctgcagcaagtgtctatatgttgtggttattttctatcttacatgttctcgaatgtttatatttcaataaacctctacctcttcacacaa

SEQ ID NO: 364 - DNA, 1599 bp, Homo sapiens
  source 1..1599: mol_type = genomic DNA
ctggctggcggtccagccccgcggcgccgcttccggtgcgggccccgccccggctgtggcccccggctgcggaggagtccgagacgcagctgccgcgccggggcctgagctgccgcctcctccgccgcccgaaaacccggagtgccccgcacaggtttagacccagtgtgcctggtgggctgtgcccaggttcagagtcatgccactctgtgggtgaagcttgaggcaaaaatggagccacttcagcagcagcagcagcagcagcagcaacaacagaagcagccacacctggctcctctgcagatggatgccagagagaagcagggccagcagatgagagaagcccagttcttgtatgcccaaaagctggtcacacagccgactctcctttccgccacagctgggagaccttctggcagcactcccttaggtcccttagccagagttccacccaccgcagcagtggcccaagtgtttgaacggggcaacatgaactcagagcctgaggaagaggacggaggtttggaagatgaggatggggatgatgaagttgcagaggtggctgagaaagaaacccaggctgcttcaaaatattttcatgtgcagaaagtagctcgccaagatcccagagtggcacccatgtccaatctacttccagcaccagggctcccaccacatggacaacaagctaaagaagaccataccaaagatgcttccaaggcctcaccttctgtctccacagcaggacagccgaactggaatctggatgagcagctcaagcagaatggtggtttggcctggagtgatgatgcagatggaggccggggaagagagatctctcgagattttgccaagctgtatgaactggacggtgatcctgaaaggaaagagttcctggatgacctcttcgtctttatgcagaagagggggacccccatcaaccgaatccccatcatggccaaacagatcctggacctgtacatgctgtataagctggtgaccgagaagggaggcctggtggagatcatcaacaagaagatctggagggagatcaccaaaggcctaaacctgcccacatccatcaccagcgccgccttcaccctcaggacgcagtacatgaagtatctgtatgcctatgagtgtgagaagaaagccttgagttccccagccgagctccaggcagcaattgatggcaaccgcagggagggccggcggcccagctacagctcctccctctttggctactcacctgctgcggctactgctgctgccgctgccggggcccctgcccttctctccccacccaagatccgctttcccatccttgggcttggctccagcagtggtaccaataccagtagccctcggatatccccagcaaccactctcaggaaaggtgatggagccccagtgacaacagtgcctgtgccaaatcgtctggctgtgcccgtgaccttggcaagccagcaggctggtactcggaccgccgcactggagcagctgcgggagcggctggagtcaggggagcctgctgagaagaaggcatctgggacgtggtgccagtgaggagcccagttggctggcactgggcccatttga

SEQ ID NO: 365 - DNA, 1719 bp, Homo sapiens
  source 1..1719: mol_type = genomic DNA
agtccgagacgcagctgccgcgccggggcctgagctgccgcctcctccgccgcccgaaaacccggagtgccccgcacaggtttagacccagtgtgcctggtgggctgtgcccaggttcagagtcatgccactctgtgggtgaagcttgaggcaaaaatggagccacttcagcagcagcagcagcagcagcagcaacaacagaagcagccacacctggctcctctgcagatggatgccagagagaagcagggccagcagatgagagaagcccagttcttgtatgcccaaaagctggtcacacagccgactctcctttccgccacagctgggagaccttctggcagcactcccttaggtcccttagccagagttccacccaccgcagcagtggcccaagtgtttgaacggggcaacatgaactcagagcctgaggaagaggacggaggtttggaagatgaggatggggatgatgaagttgcagaggtggctgagaaagaaacccaggctgcttcaaaatattttcatgtgcagaaagtagctcgccaagatcccagagtggcacccatgtccaatctacttccagcaccagggctcccaccacatggacaacaagctaaagaagaccataccaaagatgcttccaaggcctcaccttctgtctccacagcaggacagccgaactggaatctggatgagcagctcaagcagaatggtggtttggcctggagtgatgatgcagatggaggccggggaagagagatctctcgagattttgccaagctgtatgaactggacggtgatcctgaaaggaaagagttcctggatgacctcttcgtctttatgcagaagagggggacccccatcaaccgaatccccatcatggccaaacagatcctggacctgtacatgctgtataagctggtgaccgagaagggaggcctggtggagatcatcaacaagaagatctggagggagatcaccaaaggcctaaacctgcccacatccatcaccagcgccgccttcaccctcaggacgcagtacatgaagtatctgtatgcctatgagtgtgagaagaaagccttgagttccccagccgagctccaggcagcaattgatggcaaccgcagggagggccggcggcccagctacagctcctccctctttggctactcacctgctgcggctactgctgctgccgctgccggggcccctgcccttctctccccacccaagatccgctttcccatccttgggcttggctccagcagtggtaccaataccagtagccctcggatatccccagcaaccactctcaggaaaggtgatggagccccagtgacaacagtgcctgtgccaaatcgtctggctgtgcccgtgaccttggcaagccagcaggctggtactcggaccgccgcactggagcagctgcgggagcggctggagtcaggggagcctgctgagaagaaggcatcgaggctgtctgaggaggagcagcgcctggtgcagcaggccttccagcgcaactttttcagcatggcacggcagctctccatcttatatgtattctaaccaggaaaaatgtgatagcacatgggtagcctaggcagtgagtaaatacctcagatgtcctcctgcagcaagtgtctatatgttgtggttattttctatcttacatgttctcgaatgtttatatttcaataaacctctacctcttcacac

SEQ ID NO: 366 - DNA, 8249 bp, Homo sapiens
  source 1..8249: mol_type = genomic DNA
ttccgggaggagttttggcctccacacggctccgtcgggcgccgcgctcttccggcagcggtagctttggagacgccgggaacccgcgttggcgtggttgactagtgcctcgcagcctcagcatgggggaacatggcctggagctggcttccatgatccccgccctgcgggagctgggcagtgccacaccagaggaatataatacagttgtacagaagccaagacaaattctgtgtcaattcattgaccggatacttacagatgtaaatgttgttgctgtagaacttgtaaagaaaactgactctcagccaacctccgtgatgttgcttgatttcatccagcatatcatgaaatcctccccacttatgtttgtaaatgtgagtggaagccatgaggccaaaggcagttgtattgaattcagtaattggatcataacgagacttctgcggattgcagcaactccctcctgtcatttgttacacaagaaaatctgtgaagtcatctgttcattattatttctttttaaaagcaagagtcctgctatttttggggtactcacaaaagaattattacaactttttgaagacttggtttacctccatagaagaaatgtgatgggtcatgctgtggaatggccagtggtcatgagccgatttttaagtcaattagatgaacacatgggatatttacaatcagctcctttgcagttgatgagtatgcaaaatttagaatttattgaagtcactttattaatggttcttactcgtattattgcaattgtgttttttagaaggcaagaactcttactttggcagataggttgtgttctgctagagtatggtagtccaaaaattaaatccctagcaattagctttttaacagaactttttcagcttggaggactaccagcacaaccagctagcacttttttcagctcatttttggaattattaaaacaccttgtagaaatggatactgaccaattgaaactctatgaagagccattatcaaagctgataaagacactatttccctttgaagcagaagcttatagaaatattgaacctgtctatttaaatatgctgctggaaaaactctgtgtcatgtttgaagacggtgtgctcatgcggcttaagtctgatttgctaaaagcagctttgtgccatttactgcagtatttccttaaatttgtgccagctgggtatgaatctgctttacaagtcaggaaggtctatgtgagaaatatttgtaaagctcttttggatgtgcttggaattgaggtagatgcagagtacttgttgggcccactttatgcagctttgaaaatggaaagtatggaaatcattgaggagattcaatgccaaactcaacaggaaaacctcagcagtaatagtgatggaatatcacccaaaaggcgtcgtctcagctcgtctctaaacccttctaaaagagcaccaaaacagactgaggaaattaaacatgtggacatgaaccaaaagagcatattatggagtgcactgaaacagaaagctgaatcccttcagatttcccttgaatacagtggcctaaagaatcctgttattgagatgttagaaggaattgctgttgtcttacaactgactgctctgtgtactgttcattgttctcatcaaaacatgaactgccgtactttcaaggactgtcaacataaatccaagaagaaaccttctgtagtgataacttggatgtcattggatttttacacaaaagtgcttaagagctgtagaagtttgttagaatctgttcagaaactggacctggaggcaaccattgataaggtggtgaaaatttatgatgctttgatttatatgcaagtaaacagttcatttgaagatcatatcctggaagatttatgtggtatgctctcacttccatggatttattcccattctgatgatggctgtttaaagttgaccacatttgccgctaatcttctaacattaagctgtaggatttcagatagctattcaccacaggcacaatcacgatgtgtgtttcttctgactctgtttccaagaagaatattccttgagtggagaacagcagtttacaactgggccctgcagagctcccatgaagtaatccgggctagttgtgttagtggattttttatcttattgcagcagcagaattcttgtaacagagttcccaagattcttatagataaagtcaaagatgattctgacattgtcaagaaagaatttgcttctatacttggtcaacttgtctgtactcttcacggcatgttttatctgacaagttctttaacagaacctttctctgaacacggacatgtggacctcttctgtaggaacttgaaagccacttctcaacatgaatgttcatcttctcaactaaaagcttctgtctgcaagccattccttttcctactgaaaaaaaaaatacctagtccagtaaaacttgctttcatagataatctacatcatctttgtaagcatcttgattttagagaagatgaaacagatgtaaaagcagttcttggaactttattaaatttaatggaagatccagacaaagatgttagagtggcttttagtggaaatatcaagcacatattggaatccttggactctgaagatggatttataaaggagctttttgtcttaagaatgaaggaagcatatacacatgcccaaatatcaagaaataatgagctgaaggataccttgattcttacaacaggggatattggaagggccgcaaaaggagatttggtaccatttgcactcttacacttattgcattgtttgttatccaagtcagcatctgtctctggagcagcatacacagaaattagagctctggttgcagctaaaagtgttaaactgcaaagttttttcagccagtataagaaacccatctgtcagtttttggtagaatcccttcactctagtcagatgacagcacttccgaatactccatgccagaatgctgacgtgcgaaaacaagatgtggctcaccagagagaaatggctttaaatacgttgtctgaaattgccaacgttttcgactttcctgatcttaatcgttttcttactaggacattacaagttctactacctgatcttgctgccaaagcaagccctgcagcttctgctctcattcgaactttaggaaaacaattaaatgtcaatcgtagagagattttaataaacaacttcaaatatattttttctcatttggtctgttcttgttccaaagatgaattagaacgtgcccttcattatctgaagaatgaaacagaaattgaactggggagcctgttgagacaagatttccaaggattgcataatgaattattgctgcgtattggagaacactatcaacaggtttttaatggtttgtcaatacttgcctcatttgcatccagtgatgatccatatcagggcccgagagatatcatatcacctgaactgatggctgattatttacaacccaaattgttgggcattttggctttttttaacatgcagttactgagctctagtgttggcattgaagataagaaaatggccttgaacagtttgatgtctttgatgaagttaatgggacccaaacatgtcagttctgtgagggtgaagatgatgaccacactgagaactggccttcgattcaaggatgattttcctgaattgtgttgcagagcttgggactgctttgttcgctgcctggatcatgcttgtctgggctcccttctcagtcatgtaatagtagctttgttacctcttatacacatccagcctaaagaaactgcagctatcttccactacctcataattgaaaacagggatgctgtgcaagattttcttcatgaaatatattttttacctgatcatccagaattaaaaaagataaaagccgttctccaggaatacagaaaggagacctctgagagcactgatcttcagacaactcttcagctctctatgaaggccattcaacatgaaaatgtcgatgttcgtattcatgctcttacaagcttgaaggaaaccttgtataaaaatcaggaaaaactgataaagtatgcaacagacagtgaaacagtagaacctattatctcacagttggtgacagtgcttttgaaaggttgccaagatgcaaactctcaagctcggttgctctgtggggaatgtttaggggaattgggggcgatagatccaggtcgattagatttctcaacaactgaaactcaaggaaaagattttacatttgtgactggagtagaagattcaagctttgcctatggattattgatggagctaacaagagcttaccttgcgtatgctgataatagccgagctcaagattcagctgcctatgccattcaggagttgctttctatttatgactgtagagagatggagaccaacggcccaggtcaccaattgtggaggagatttcctgagcatgttcgggaaatactagaacctcatctaaataccagatacaagagttctcagaagtcaaccgattggtctggagtaaagaagccaatttacttaagtaaattgggtagtaactttgcagaatggtcagcatcttgggcaggttatcttattacaaaggttcgacatgatcttgccagtaaaattttcacctgctgtagcattatgatgaagcatgatttcaaagtgaccatctatcttcttccacatattctggtgtatgtcttactgggttgtaatcaagaagatcagcaggaggtttatgcagaaattatggcagttctaaagcatgacgatcagcataccataaatacccaagacattgcatctgatctgtgtcaactcagtacacagactgtgttctccatgcttgaccatctcacacagtgggcaaggcacaaatttcaggcactgaaagctgagaaatgtccacacagcaaatcaaacagaaataaggtagactcaatggtatctactgtggattatgaagactatcagagtgtaacccgttttctagacctcataccccaggatactctggcagtagcttcctttcgctccaaagcatacacacgagctgtaatgcactttgaatcatttattacagaaaagaagcaaaatattcaggaacatcttggatttttacagaaattgtatgctgctatgcatgaacctgatggagtggccggagtcagtgcaattagaaaggcagaaccatctctaaaagaacagatccttgaacatgaaagccttggcttgctgagggatgccactgcttgttatgacagggctattcagctagaaccagaccagatcattcattatcatggtgtagtaaagtccatgttaggtcttggtcagctgtctactgttatcactcaggtgaatggagtgcatgctaacaggtccgagtggacagatgaattaaacacgtacagagtggaagcagcttggaaattgtcacagtgggatttggtggaaaactatttggcagcagatggaaaatctacaacatggagtgtcagactgggacagctattattatcagccaaaaaaagagatatcacagctttttatgactcactgaaactagtgagagcagaacaaattgtacctctttcagctgcaagctttgaaagaggctcctaccaacgaggatatgaatatattgtgagattgcacatgttatgtgagttggagcatagcatcaaaccacttttccagcattctccaggtgacagttctcaagaagattctctaaactgggtagctcgactagaaatgacccagaattcctacagagccaaggagcctatcctggctctccggagggctttactaagcctcaacaaaagaccagattacaatgaaatggttggagaatgctggctgcagagtgccagggtagctagaaaggctggtcaccaccagacagcctacaatgctctccttaatgcaggggaatcacgactcgctgaactgtacgtggaaagggcaaagtggctctggtccaagggtgatgttcaccaggcactaattgttcttcaaaaaggtgttgaattatgttttcctgaaaatgaaaccccacctgagggtaagaacatgttaatccatggtcgagctatgctactagtgggccgatttatggaagaaacagctaactttgaaagcaatgcaattatgaaaaaatataaggatgtgaccgcgtgcctgccagaatgggaggatgggcatttttaccttgccaagtactatgacaaattgatgcccatggtcacagacaacaaaatggaaaagcaaggtgatctcatccggtatatagttcttcattttggcagatctctacaatatggaaatcagttcatatatcagtcaatgccacgaatgttaactctatggcttgattatggtacaaaggcatatgaatgggaaaaagctggccgctccgatcgtgtacaaatgaggaatgatttgggtaaaataaacaaggttatcacagagcatacaaactatttagctccatatcaatttttgactgctttttcacaattgatctctcgaatttgtcattctcacgatgaagtttttgttgtcttgatggaaataatagccaaagtatttctagcctatcctcaacaagcaatgtggatgatgacagctgtgtcaaagtcatcttatcccatgcgtgtgaacagatgcaaggaaatcctcaataaagctattcatatgaaaaaatccttagagaagtttgttggagatgcaactcgcctaacagataagcttctagaattgtgcaataaaccggttgatggaagtagttccacattaagcatgagcactcattttaaaatgcttaaaaagctggtagaagaagcaacatttagtgaaatcctcattcctctacaatcagtcatgatacctacacttccatcaattctgggtacccatgctaaccatgctagccatgaaccatttcctggacattgggcctatattgcagggtttgatgatatggtggaaattcttgcttctcttcagaaaccaaagaagatttctttaaaaggctcagatggaaagttctacatcatgatgtgtaagccaaaagatgacctgagaaaggattgtagactaatggaattcaattccttgattaataagtgcttaagaaaagatgcagagtctcgtagaagagaacttcatattcgaacatatgcagttattccactaaatgatgaatgtgggattattgaatgggtgaacaacactgctggtttgagacctattctgaccaaactatataaagaaaagggagtgtatatgacaggaaaagaacttcgccagtgtatgctaccaaagtcagcagctttatctgaaaaactcaaagtattccgagaatttctcctgcccaggcatcctcctatttttcatgagtggtttctgagaacattccctgatcctacatcatggtacagtagtagatcagcttactgccgttccactgcagtaatgtcaatggttggttatattctggggcttggagaccgtcatggtgaaaatattctctttgattctttgactggtgaatgcgtacatgtagatttcaattgtcttttcaataagggagaaacctttgaagttccagaaattgtgccatttcgcctgactcataatatggttaatggaatgggtcctatgggaacagagggtctttttcgaagagcatgtgaagttacaatgaggctgatgcgtgatcagcgagagcctttaatgagtgtcttaaagacttttctacatgatcctcttgtggaatggagtaaaccagtgaaagggcattccaaagcgccactgaatgaaactggagaagttgtcaatgaaaaggccaagacccatgttcttgacattgagcagcgactacaaggtgtaatcaagactcgaaatagagtgacaggactgccgttatctattgaaggacatgtgcattaccttatacaggaagctactgatgaaaacttactatgccagatgtatcttggttggactccatatatgtgaaatgaaattatgtaaaagaatatgttaataatctaaaagtaatgcatttggtatgaatctgtggttgtatctgttcaattctaaagtacaacataaatttacgttctcagcaactgttatttctctctgatcattaattatatgtaaaataatatacattcagttattaagaaataaactgctttcttaata

SEQ ID NO: 367 - DNA, 8056 bp, Homo sapiens
  source 1..8056: mol_type = genomic DNA
ttccgggaggagttttggcctccacacggctccgtcgggcgccgcgctcttccggcagcggtagctttggagacgccgggaacccgcgttggcgtggttgactagtgcctcgcagcctcagcatgggggaacatggcctggagctggcttccatgatccccgccctgcgggagctgggcagtgccacaccagaggaatataatacagttgtacagaagccaagacaaattctgtgtcaattcattgaccggatacttacagatgtaaatgttgttgctgtagaacttgtaaagaaaactgactctcagccaacctccgtgatgttgcttgatttcatccagcatatcatgaaatcctccccacttatgtttgtaaatgtgagtggaagccatgaggccaaaggcagttgtattgaattcagtaattggatcataacgagacttctgcggattgcagcaactccctcctgtcatttgttacacaagaaaatctgtgaagtcatctgttcattattatttctttttaaaagcaagagtcctgctatttttggggtactcacaaaagaattattacaactttttgaagacttggtttacctccatagaagaaatgtgatgggtcatgctgtggaatggccagtggtcatgagccgatttttaagtcaattagatgaacacatgggatatttacaatcagctcctttgcagttgatgagtatgcaaaatttagaatttattgaagtcactttattaatggttcttactcgtattattgcaattgtgttttttagaaggcaagaactcttactttggcagataggttgtgttctgctagagtatggtagtccaaaaattaaatccctagcaattagctttttaacagaactttttcagcttggaggactaccagcacaaccagctagcacttttttcagctcatttttggaattattaaaacaccttgtagaaatggatactgaccaattgaaactctatgaagagccattatcaaagctgataaagacactatttccctttgaagcagaagcttatagaaatattgaacctgtctatttaaatatgctgctggaaaaactctgtgtcatgtttgaagacggtgtgctcatgcggcttaagtctgatttgctaaaagcagctttgtgccatttactgcagtatttccttaaatttgtgccagctgggtatgaatctgctttacaagtcaggaaggtctatgtgagaaatatttgtaaagctcttttggatgtgcttggaattgaggtagatgcagagtacttgttgggcccactttatgcagctttgaaaatggaaagtatggaaatcattgaggagattcaatgccaaactcaacaggaaaacctcagcagtaatagtgatggaatatcacccaaaaggcgtcgtctcagctcgtctctaaacccttctaaaagagcaccaaaacagactgaggaccgtactttcaaggactgtcaacataaatccaagaagaaaccttctgtagtgataacttggatgtcattggatttttacacaaaagtgcttaagagctgtagaagtttgttagaatctgttcagaaactggacctggaggcaaccattgataaggtggtgaaaatttatgatgctttgatttatatgcaagtaaacagttcatttgaagatcatatcctggaagatttatgtggtatgctctcacttccatggatttattcccattctgatgatggctgtttaaagttgaccacatttgccgctaatcttctaacattaagctgtaggatttcagatagctattcaccacaggcacaatcacgatgtgtgtttcttctgactctgtttccaagaagaatattccttgagtggagaacagcagtttacaactgggccctgcagagctcccatgaagtaatccgggctagttgtgttagtggattttttatcttattgcagcagcagaattcttgtaacagagttcccaagattcttatagataaagtcaaagatgattctgacattgtcaagaaagaatttgcttctatacttggtcaacttgtctgtactcttcacggcatgttttatctgacaagttctttaacagaacctttctctgaacacggacatgtggacctcttctgtaggaacttgaaagccacttctcaacatgaatgttcatcttctcaactaaaagcttctgtctgcaagccattccttttcctactgaaaaaaaaaatacctagtccagtaaaacttgctttcatagataatctacatcatctttgtaagcatcttgattttagagaagatgaaacagatgtaaaagcagttcttggaactttattaaatttaatggaagatccagacaaagatgttagagtggcttttagtggaaatatcaagcacatattggaatccttggactctgaagatggatttataaaggagctttttgtcttaagaatgaaggaagcatatacacatgcccaaatatcaagaaataatgagctgaaggataccttgattcttacaacaggggatattggaagggccgcaaaaggagatttggtaccatttgcactcttacacttattgcattgtttgttatccaagtcagcatctgtctctggagcagcatacacagaaattagagctctggttgcagctaaaagtgttaaactgcaaagttttttcagccagtataagaaacccatctgtcagtttttggtagaatcccttcactctagtcagatgacagcacttccgaatactccatgccagaatgctgacgtgcgaaaacaagatgtggctcaccagagagaaatggctttaaatacgttgtctgaaattgccaacgttttcgactttcctgatcttaatcgttttcttactaggacattacaagttctactacctgatcttgctgccaaagcaagccctgcagcttctgctctcattcgaactttaggaaaacaattaaatgtcaatcgtagagagattttaataaacaacttcaaatatattttttctcatttggtctgttcttgttccaaagatgaattagaacgtgcccttcattatctgaagaatgaaacagaaattgaactggggagcctgttgagacaagatttccaaggattgcataatgaattattgctgcgtattggagaacactatcaacaggtttttaatggtttgtcaatacttgcctcatttgcatccagtgatgatccatatcagggcccgagagatatcatatcacctgaactgatggctgattatttacaacccaaattgttgggcattttggctttttttaacatgcagttactgagctctagtgttggcattgaagataagaaaatggccttgaacagtttgatgtctttgatgaagttaatgggacccaaacatgtcagttctgtgagggtgaagatgatgaccacactgagaactggccttcgattcaaggatgattttcctgaattgtgttgcagagcttgggactgctttgttcgctgcctggatcatgcttgtctgggctcccttctcagtcatgtaatagtagctttgttacctcttatacacatccagcctaaagaaactgcagctatcttccactacctcataattgaaaacagggatgctgtgcaagattttcttcatgaaatatattttttacctgatcatccagaattaaaaaagataaaagccgttctccaggaatacagaaaggagacctctgagagcactgatcttcagacaactcttcagctctctatgaaggccattcaacatgaaaatgtcgatgttcgtattcatgctcttacaagcttgaaggaaaccttgtataaaaatcaggaaaaactgataaagtatgcaacagacagtgaaacagtagaacctattatctcacagttggtgacagtgcttttgaaaggttgccaagatgcaaactctcaagctcggttgctctgtggggaatgtttaggggaattgggggcgatagatccaggtcgattagatttctcaacaactgaaactcaaggaaaagattttacatttgtgactggagtagaagattcaagctttgcctatggattattgatggagctaacaagagcttaccttgcgtatgctgataatagccgagctcaagattcagctgcctatgccattcaggagttgctttctatttatgactgtagagagatggagaccaacggcccaggtcaccaattgtggaggagatttcctgagcatgttcgggaaatactagaacctcatctaaataccagatacaagagttctcagaagtcaaccgattggtctggagtaaagaagccaatttacttaagtaaattgggtagtaactttgcagaatggtcagcatcttgggcaggttatcttattacaaaggttcgacatgatcttgccagtaaaattttcacctgctgtagcattatgatgaagcatgatttcaaagtgaccatctatcttcttccacatattctggtgtatgtcttactgggttgtaatcaagaagatcagcaggaggtttatgcagaaattatggcagttctaaagcatgacgatcagcataccataaatacccaagacattgcatctgatctgtgtcaactcagtacacagactgtgttctccatgcttgaccatctcacacagtgggcaaggcacaaatttcaggcactgaaagctgagaaatgtccacacagcaaatcaaacagaaataaggtagactcaatggtatctactgtggattatgaagactatcagagtgtaacccgttttctagacctcataccccaggatactctggcagtagcttcctttcgctccaaagcatacacacgagctgtaatgcactttgaatcatttattacagaaaagaagcaaaatattcaggaacatcttggatttttacagaaattgtatgctgctatgcatgaacctgatggagtggccggagtcagtgcaattagaaaggcagaaccatctctaaaagaacagatccttgaacatgaaagccttggcttgctgagggatgccactgcttgttatgacagggctattcagctagaaccagaccagatcattcattatcatggtgtagtaaagtccatgttaggtcttggtcagctgtctactgttatcactcaggtgaatggagtgcatgctaacaggtccgagtggacagatgaattaaacacgtacagagtggaagcagcttggaaattgtcacagtgggatttggtggaaaactatttggcagcagatggaaaatctacaacatggagtgtcagactgggacagctattattatcagccaaaaaaagagatatcacagctttttatgactcactgaaactagtgagagcagaacaaattgtacctctttcagctgcaagctttgaaagaggctcctaccaacgaggatatgaatatattgtgagattgcacatgttatgtgagttggagcatagcatcaaaccacttttccagcattctccaggtgacagttctcaagaagattctctaaactgggtagctcgactagaaatgacccagaattcctacagagccaaggagcctatcctggctctccggagggctttactaagcctcaacaaaagaccagattacaatgaaatggttggagaatgctggctgcagagtgccagggtagctagaaaggctggtcaccaccagacagcctacaatgctctccttaatgcaggggaatcacgactcgctgaactgtacgtggaaagggcaaagtggctctggtccaagggtgatgttcaccaggcactaattgttcttcaaaaaggtgttgaattatgttttcctgaaaatgaaaccccacctgagggtaagaacatgttaatccatggtcgagctatgctactagtgggccgatttatggaagaaacagctaactttgaaagcaatgcaattatgaaaaaatataaggatgtgaccgcgtgcctgccagaatgggaggatgggcatttttaccttgccaagtactatgacaaattgatgcccatggtcacagacaacaaaatggaaaagcaaggtgatctcatccggtatatagttcttcattttggcagatctctacaatatggaaatcagttcatatatcagtcaatgccacgaatgttaactctatggcttgattatggtacaaaggcatatgaatgggaaaaagctggccgctccgatcgtgtacaaatgaggaatgatttgggtaaaataaacaaggttatcacagagcatacaaactatttagctccatatcaatttttgactgctttttcacaattgatctctcgaatttgtcattctcacgatgaagtttttgttgtcttgatggaaataatagccaaagtatttctagcctatcctcaacaagcaatgtggatgatgacagctgtgtcaaagtcatcttatcccatgcgtgtgaacagatgcaaggaaatcctcaataaagctattcatatgaaaaaatccttagagaagtttgttggagatgcaactcgcctaacagataagcttctagaattgtgcaataaaccggttgatggaagtagttccacattaagcatgagcactcattttaaaatgcttaaaaagctggtagaagaagcaacatttagtgaaatcctcattcctctacaatcagtcatgatacctacacttccatcaattctgggtacccatgctaaccatgctagccatgaaccatttcctggacattgggcctatattgcagggtttgatgatatggtggaaattcttgcttctcttcagaaaccaaagaagatttctttaaaaggctcagatggaaagttctacatcatgatgtgtaagccaaaagatgacctgagaaaggattgtagactaatggaattcaattccttgattaataagtgcttaagaaaagatgcagagtctcgtagaagagaacttcatattcgaacatatgcagttattccactaaatgatgaatgtgggattattgaatgggtgaacaacactgctggtttgagacctattctgaccaaactatataaagaaaagggagtgtatatgacaggaaaagaacttcgccagtgtatgctaccaaagtcagcagctttatctgaaaaactcaaagtattccgagaatttctcctgcccaggcatcctcctatttttcatgagtggtttctgagaacattccctgatcctacatcatggtacagtagtagatcagcttactgccgttccactgcagtaatgtcaatggttggttatattctggggcttggagaccgtcatggtgaaaatattctctttgattctttgactggtgaatgcgtacatgtagatttcaattgtcttttcaataagggagaaacctttgaagttccagaaattgtgccatttcgcctgactcataatatggttaatggaatgggtcctatgggaacagagggtctttttcgaagagcatgtgaagttacaatgaggctgatgcgtgatcagcgagagcctttaatgagtgtcttaaagacttttctacatgatcctcttgtggaatggagtaaaccagtgaaagggcattccaaagcgccactgaatgaaactggagaagttgtcaatgaaaaggccaagacccatgttcttgacattgagcagcgactacaaggtgtaatcaagactcgaaatagagtgacaggactgccgttatctattgaaggacatgtgcattaccttatacaggaagctactgatgaaaacttactatgccagatgtatcttggttggactccatatatgtgaaatgaaattatgtaaaagaatatgttaataatctaaaagtaatgcatttggtatgaatctgtggttgtatctgttcaattctaaagtacaacataaatttacgttctcagcaactgttatttctctctgatcattaattatatgtaaaataatatacattcagttattaagaaataaactgctttcttaat

SEQ ID NO: 368 - DNA, 13147 bp, Homo sapiens
  source 1..13147: mol_type = genomic DNA
ccggagcccgagccgaagggcgagccgcaaacgctaagtcgctggccattggtggacatggcgcaggcgcgtttgctccgacgggccgaatgttttggggcagtgttttgagcgcggagaccgcgtgatactggatgcgcatgggcataccgtgctctgcggctgcttggcgttgcttcttcctccagaagtgggcgctgggcagtcacgcagggtttgaaccggaagcgggagtaggtagctgcgtggctaacggagaaaagaagccgtggccgcgggaggaggcgagaggagtcgggatctgcgctgcagccaccgccgcggttgatactactttgaccttccgagtgcagtgacagtgatgtgtgttctgaaattgtgaaccatgagtctagtacttaatgatctgcttatctgctgccgtcaactagaacatgatagagctacagaacgaaagaaagaagttgagaaatttaagcgcctgattcgagatcctgaaacaattaaacatctagatcggcattcagattccaaacaaggaaaatatttgaattgggatgctgtttttagatttttacagaaatatattcagaaagaaacagaatgtctgagaatagcaaaaccaaatgtatcagcctcaacacaagcctccaggcagaaaaagatgcaggaaatcagtagtttggtcaaatacttcatcaaatgtgcaaacagaagagcacctaggctaaaatgtcaagaactcttaaattatatcatggatacagtgaaagattcatctaatggtgctatttacggagctgattgtagcaacatactactcaaagacattctttctgtgagaaaatactggtgtgaaatatctcagcaacagtggttagaattgttctctgtgtacttcaggctctatctgaaaccttcacaagatgttcatagagttttagtggctagaataattcatgctgttaccaaaggatgctgttctcagactgacggattaaattccaaatttttggactttttttccaaggctattcagtgtgcgagacaagaaaagagctcttcaggtctaaatcatatcttagcagctcttactatcttcctcaagactttggctgtcaactttcgaattcgagtgtgtgaattaggagatgaaattcttcccactttgctttatatttggactcaacataggcttaatgattctttaaaagaagtcattattgaattatttcaactgcaaatttatatccatcatccgaaaggagccaaaacccaagaaaaaggtgcttatgaatcaacaaaatggagaagtattttatacaacttatatgatctgctagtgaatgagataagtcatataggaagtagaggaaagtattcttcaggatttcgtaatattgccgtcaaagaaaatttgattgaattgatggcagatatctgtcaccaggtttttaatgaagataccagatccttggagatttctcaatcttacactactacacaaagagaatctagtgattacagtgtcccttgcaaaaggaagaaaatagaactaggctgggaagtaataaaagatcaccttcagaagtcacagaatgattttgatcttgtgccttggctacagattgcaacccaattaatatcaaagtatcctgcaagtttacctaactgtgagctgtctccattactgatgatactatctcagcttctaccccaacagcgacatggggaacgtacaccatatgtgttacgatgccttacggaagttgcattgtgtcaagacaagaggtcaaacctagaaagctcacaaaagtcagatttattaaaactctggaataaaatttggtgtattacctttcgtggtataagttctgagcaaatacaagctgaaaactttggcttacttggagccataattcagggtagtttagttgaggttgacagagaattctggaagttatttactgggtcagcctgcagaccttcatgtcctgcagtatgctgtttgactttggcactgaccaccagtatagttccaggaacggtaaaaatgggaatagagcaaaatatgtgtgaagtaaatagaagcttttctttaaaggaatcaataatgaaatggctcttattctatcagttagagggtgacttagaaaatagcacagaagtgcctccaattcttcacagtaattttcctcatcttgtactggagaaaattcttgtgagtctcactatgaaaaactgtaaagctgcaatgaattttttccaaagcgtgccagaatgtgaacaccaccaaaaagataaagaagaactttcattctcagaagtagaagaactatttcttcagacaacttttgacaagatggactttttaaccattgtgagagaatgtggtatagaaaagcaccagtccagtattggcttctctgtccaccagaatctcaaggaatcactggatcgctgtcttctgggattatcagaacagcttctgaataattactcatctgagattacaaattcagaaactcttgtccggtgttcacgtcttttggtgggtgtccttggctgctactgttacatgggtgtaatagctgaagaggaagcatataagtcagaattattccagaaagccaagtctctaatgcaatgtgcaggagaaagtatcactctgtttaaaaataagacaaatgaggaattcagaattggttccttgagaaatatgatgcagctatgtacacgttgcttgagcaactgtaccaagaagagtccaaataagattgcatctggctttttcctgcgattgttaacatcaaagctaatgaatgacattgcagatatttgtaaaagtttagcatccttcatcaaaaagccatttgaccgtggagaagtagaatcaatggaagatgatactaatggaaatctaatggaggtggaggatcagtcatccatgaatctatttaacgattaccctgatagtagtgttagtgatgcaaacgaacctggagagagccaaagtaccataggtgccattaatcctttagctgaagaatatctgtcaaagcaagatctacttttcttagacatgctcaagttcttgtgtttgtgtgtaactactgctcagaccaatactgtgtcctttagggcagctgatattcggaggaaattgttaatgttaattgattctagcacgctagaacctaccaaatccctccacctgcatatgtatctaatgcttttaaaggagcttcctggagaagagtaccccttgccaatggaagatgttcttgaacttctgaaaccactatccaatgtgtgttctttgtatcgtcgtgaccaagatgtttgtaaaactattttaaaccatgtccttcatgtagtgaaaaacctaggtcaaagcaatatggactctgagaacacaagggatgctcaaggacagtttcttacagtaattggagcattttggcatctaacaaaggagaggaaatatatattctctgtaagaatggccctagtaaattgccttaaaactttgcttgaggctgatccttattcaaaatgggccattcttaatgtaatgggaaaagactttcctgtaaatgaagtatttacacaatttcttgctgacaatcatcaccaagttcgcatgttggctgcagagtcaatcaatagattgttccaggacacgaagggagattcttccaggttactgaaagcacttcctttgaagcttcagcaaacagcttttgaaaatgcatacttgaaagctcaggaaggaatgagagaaatgtcccatagtgctgagaaccctgaaactttggatgaaatttataatagaaaatctgttttactgacgttgatagctgtggttttatcctgtagccctatctgcgaaaaacaggctttgtttgccctgtgtaaatctgtgaaagagaatggattagaacctcaccttgtgaaaaaggttttagagaaagtttctgaaacttttggatatagacgtttagaagactttatggcatctcatttagattatctggttttggaatggctaaatcttcaagatactgaatacaacttatcttcttttccttttattttattaaactacacaaatattgaggatttctatagatcttgttataaggttttgattccacatctggtgattagaagtcattttgatgaggtgaagtccattgctaatcagattcaagaggactggaaaagtcttctaacagactgctttccaaagattcttgtaaatattcttccttattttgcctatgagggtaccagagacagtgggatggcacagcaaagagagactgctaccaaggtctatgatatgcttaaaagtgaaaacttattgggaaaacagattgatcacttattcattagtaatttaccagagattgtggtggagttattgatgacgttacatgagccagcaaattctagtgccagtcagagcactgacctctgtgacttttcaggggatttggatcctgctcctaatccacctcattttccatcgcatgtgattaaagcaacatttgcctatatcagcaattgtcataaaaccaagttaaaaagcattttagaaattctttccaaaagccctgattcctatcagaaaattcttcttgccatatgtgagcaagcagctgaaacaaataatgtttataagaagcacagaattcttaaaatatatcacctgtttgttagtttattactgaaagatataaaaagtggcttaggaggagcttgggcctttgttcttcgagacgttatttatactttgattcactatatcaaccaaaggccttcttgtatcatggatgtgtcattacgtagcttctccctttgttgtgacttattaagtcaggtttgccagacagccgtgacttactgtaaggatgctctagaaaaccatcttcatgttattgttggtacacttataccccttgtgtatgagcaggtggaggttcagaaacaggtattggacttgttgaaatacttagtgatagataacaaggataatgaaaacctctatatcacgattaagcttttagatccttttcctgaccatgttgtttttaaggatttgcgtattactcagcaaaaaatcaaatacagtagaggacccttttcactcttggaggaaattaaccattttctctcagtaagtgtttatgatgcacttccattgacaagacttgaaggactaaaggatcttcgaagacaactggaactacataaagatcagatggtggacattatgagagcttctcaggataatccgcaagatgggattatggtgaaactagttgtcaatttgttgcagttatccaagatggcaataaaccacactggtgaaaaagaagttctagaggctgttggaagctgcttgggagaagtgggtcctatagatttctctaccatagctatacaacatagtaaagatgcatcttataccaaggcccttaagttatttgaagataaagaacttcagtggaccttcataatgctgacctacctgaataacacactggtagaagattgtgtcaaagttcgatcagcagctgttacctgtttgaaaaacattttagccacaaagactggacatagtttctgggagatttataagatgacaacagatccaatgctggcctatctacagccttttagaacatcaagaaaaaagtttttagaagtacccagatttgacaaagaaaacccttttgaaggcctggatgatataaatctgtggattcctctaagtgaaaatcatgacatttggataaagacactgacttgtgcttttttggacagtggaggcacaaaatgtgaaattcttcaattattaaagccaatgtgtgaagtgaaaactgacttttgtcagactgtacttccatacttgattcatgatattttactccaagatacaaatgaatcatggagaaatctgctttctacacatgttcagggatttttcaccagctgtcttcgacacttctcgcaaacgagccgatccacaacccctgcaaacttggattcagagtcagagcactttttccgatgctgtttggataaaaaatcacaaagaacaatgcttgctgttgtggactacatgagaagacaaaagagaccttcttcaggaacaatttttaatgatgctttctggctggatttaaattatctagaagttgccaaggtagctcagtcttgtgctgctcactttacagctttactctatgcagaaatctatgcagataagaaaagtatggatgatcaagagaaaagaagtcttgcatttgaagaaggaagccagaatacaactatttctagcttgagtgaaaaaagtaaagaagaaactggaataagtttacaggatcttctcttagaaatctacagaagtataggggagccagatagtttgtatggctgtggtggagggaagatgttacaacccattactagactacgaacatatgaacacgaagcaatgtggggcaaagccctagtaacatatgacctcgaaacagcaatcccctcatcaacacgccaggcaggaatcattcaggccttgcagaatttgggactctgccatattctttccgtctatttaaaaggattggattatgaaaataaagactggtgtcctgaactagaagaacttcattaccaagcagcatggaggaatatgcagtgggaccattgcacttccgtcagcaaagaagtagaaggaaccagttaccatgaatcattgtacaatgctctacaatctctaagagacagagaattctctacattttatgaaagtctcaaatatgccagagtaaaagaagtggaagagatgtgtaagcgcagccttgagtctgtgtattcgctctatcccacacttagcaggttgcaggccattggagagctggaaagcattggggagcttttctcaagatcagtcacacatagacaactctctgaagtatatattaagtggcagaaacactcccagcttctcaaggacagtgattttagttttcaggagcctatcatggctctacgcacagtcattttggagatcctgatggaaaaggaaatggacaactcacaaagagaatgtattaaggacattctcaccaaacaccttgtagaactctctatactggccagaactttcaagaacactcagctccctgaaagggcaatatttcaaattaaacagtacaattcagttagctgtggagtctctgagtggcagctggaagaagcacaagtattctgggcaaaaaaggagcagagtcttgccctgagtattctcaagcaaatgatcaagaagttggatgccagctgtgcagcgaacaatcccagcctaaaacttacatacacagaatgtctgagggtttgtggcaactggttagcagaaacgtgcttagaaaatcctgcggtcatcatgcagacctatctagaaaaggcagtagaagttgctggaaattatgatggagaaagtagtgatgagctaagaaatggaaaaatgaaggcatttctctcattagcccggttttcagatactcaataccaaagaattgaaaactacatgaaatcatcggaatttgaaaacaagcaagctctcctgaaaagagccaaagaggaagtaggtctccttagggaacataaaattcagacaaacagatacacagtaaaggttcagcgagagctggagttggatgaattagccctgcgtgcactgaaagaggatcgtaaacgcttcttatgtaaagcagttgaaaattatatcaactgcttattaagtggagaagaacatgatatgtgggtattccgactttgttccctctggcttgaaaattctggagtttctgaagtcaatggcatgatgaagagagacggaatgaagattccaacatataaatttttgcctcttatgtaccaattggctgctagaatggggaccaagatgatgggaggcctaggatttcatgaagtcctcaataatctaatctctagaatttcaatggatcacccccatcacactttgtttattatactggccttagcaaatgcaaacagagatgaatttctgactaaaccagaggtagccagaagaagcagaataactaaaaatgtgcctaaacaaagctctcagcttgatgaggatcgaacagaggctgcaaatagaataatatgtactatcagaagtaggagacctcagatggtcagaagtgttgaggcactttgtgatgcttatattatattagcaaacttagatgccactcagtggaagactcagagaaaaggcataaatattccagcagaccagccaattactaaacttaagaatttagaagatgttgttgtccctactatggaaattaaggtggaccacacaggagaatatggaaatctggtgactatacagtcatttaaagcagaatttcgcttagcaggaggtgtaaatttaccaaaaataatagattgtgtaggttccgatggcaaggagaggagacagcttgttaagggccgtgatgacctgagacaagatgctgtcatgcaacaggtcttccagatgtgtaatacattactgcagagaaacacggaaactaggaagaggaaattaactatctgtacttataaggtggttcccctctctcagcgaagtggtgttcttgaatggtgcacaggaactgtccccattggtgaatttcttgttaacaatgaagatggtgctcataaaagatacaggccaaatgatttcagtgcctttcagtgccaaaagaaaatgatggaggtgcaaaaaaagtcttttgaagagaaatatgaagtcttcatggatgtttgccaaaattttcaaccagttttccgttacttctgcatggaaaaattcttggatccagctatttggtttgagaagcgattggcttatacgcgcagtgtagctacttcttctattgttggttacatacttggacttggtgatagacatgtacagaatatcttgataaatgagcagtcagcagaacttgtacatatagatctaggtgttgcttttgaacagggcaaaatccttcctactcctgagacagttccttttagactcaccagagatattgtggatggcatgggcattacgggtgttgaaggtgtcttcagaagatgctgtgagaaaaccatggaagtgatgagaaactctcaggaaactctgttaaccattgtagaggtccttctatatgatccactctttgactggaccatgaatcctttgaaagctttgtatttacagcagaggccggaagatgaaactgagcttcaccctactctgaatgcagatgaccaagaatgcaaacgaaatctcagtgatattgaccagagtttcaacaaagtagctgaacgtgtcttaatgagactacaagagaaactgaaaggagtggaagaaggcactgtgctcagtgttggtggacaagtgaatttgctcatacagcaggccatagaccccaaaaatctcagccgacttttcccaggatggaaagcttgggtgtgatcttcagtatatgaattaccctttcattcagcctttagaaattatattttagcctttatttttaacctgccaacatactttaagtagggattaatatttaagtgaactattgtgggtttttttgaatgttggttttaatacttgatttaatcaccactcaaaaatgttttgatggtcttaaggaacatctctgctttcactctttagaaataatggtcattcgggctgggcgcagcggctcacgcctgtaatcccagcactttgggaggccgaggtgagcggatcacaaggtcaggagttcgagaccagcctggccaagagaccagcctggccagtatggtgaaaccctgtctctactaaaaatacaaaaattagccgagcatggtggcgggcacctgtaatcccagctactcgagaggctgaggcaggagaatctcttgaacctgggaggtgaaggttgctgtgggccaaaatcatgccattgcactccagcctgggtgacaagagcgaaactccatctcaaaaaaaaaaaaaaaaaaacagaaacgtatttggatttttcctagtaagatcactcagtgttactaaataatgaagttgttatggagaacaaatttcaaagacacagttagtgtagttactatttttttaagtgtgtattaaaacttctcattctattctctttatcttttaagcccttctgtactgtccatgtatgttatctttctgtgataacttcatagattgccttctagttcatgaattctcttgtcagatgtatataatctcttttaccctatccattgggcttcttctttcagaaattgtttttcatttctaattatgcatcatttttcagatctctgtttcttgatgtcatttttaatgtttttttaatgttttttatgtcactaattattttaaatgtctgtacttgatagacactgtaatagttctattaaatttagttcctgctgtttatatctgttgatttttgtatttgataggctgttcatccagttttgtctttttgaaaagtgagtttattttcagcaaggctttatctatgggaatcttgagtgtctgtttatgtcatattcccagggctgttgctgcacacaagcccattcttattttaatttcttggctttagggtttccatacctgaagtgtagcataaatactgataggagatttcccaggccaaggcaaacacacttcctcctcatctccttgtgctagtgggcagaatatttgattgatgcctttttcactgagagtataagcttccatgtgtcccacctttatggcaggggtggaaggaggtacatttaattcccactgcctgcctttggcaagccctgggttctttgctccccatatagatgtctaagctaaaagccgtgggttaatgagactggcaaattgttccaggacagctacagcatcagctcacatattcacctctctggtttttcattcccctcatttttttctgagacagagtcttgctctgtcacccaggctggagtgcagtggcatgatctcagctcactgaaacctctgcctcctgggttcaagcaattctcctgcctcagcctcccgagtagctgggactacaggcgtgtgccaacacgcccggctaattttttgtatttttattagagacggagtttcaccgtgttagccaggatggtctcgatcgcttgacctcgtgatccaccctcctcggcctcccaaagtgctgggattacaggtgtgagccaccgcgcccggcctcattcccctcatttttgaccgtaaggatttcccctttcttgtaagttctgctatgtatttaaaagaatgttttctacattttatccagcatttctctgtgttctgttggaagggaagggcttaggtatctagtttgatacataggtagaagtggaacatttctctgtcccccagctgtcatcatataagataaacatcagataaaaagccacctgaaagtaaaactactgactcgtgtattagtgagtataatctcttctccatccttaggaaaatgttcatcccagctgcggagattaacaaatgggtgattgagctttctcctcgtatttggaccttgaaggttatataaatttttttcttatgaagagttggcatttctttttattgccaatggcaggcactcattcatatttgatctcctcaccttcccctcccctaaaaccaatctccagaactttttggactataaatttcttggtttgacttctggagaactgttcagaatattactttgcatttcaaattacaaacttaccttggtgtatctttttcttacaagctgcctaaatgaatatttggtatatattggtagttttattactatagtaaatcaaggaaatgcagtaaacttaaaatgtctttaagaaagccctgaaatcttcatgggtgaaattagaaattatcaactagataatagtatagataaatgaatttgtagctaattcttgctagttgttgcatccagagagctttgaataacatcattaatctactctttagccttgcatggtatgctatgaggctcctgttctgttcaagtattctaatcaatggctttgaaaagtttatcaaatttacatacagatcacaagcctaggagaaataactaattcacagatgacagaattaagattataaaagattttttttttgtaattttagtagagacagggttgccattgtattccagccttggcgacagagcaagactctgcctcaaaaaaaaaaaaaaaaaggttttggcaagctggaactctttctgcaaatgactaagatagaaaactgccaaggacaaatgaggagtagttagattttgaaaatattaatcatagaatagttgttgtatgctaagtcactgacccatattatgtacagcatttctgatctttactttgcaagattagtgatactatcccaatacactgctggagaaatcagaatttggagaaataagttgtccaaggcaagaagatagtaaattataagtacaagtgtaatatggacagtatctaacttgaaaagatttcaggcgaaaagaatctggggtttgccagtcagttgctcaaaaggtcaatgaaaaccaaatagtgaagctatcagagaagctaataaattatagactgcttgaacagttgtgtccagattaagggagataatagctttcccaccctactttgtgcaggtcatacctccccaaagtgtttacctaatcagtaggttcacaaactcttggtcattatagtatatgcctaaaatgtatgcacttaggaatgctaaaaatttaaatatggtctaaagcaaataaaagcaaagaggaaaaactttggacagcgtaaagactagaatagtcttttaaaaagaaagccagtatattggtttgaaatatagagatgtgtcccaatttcaagtattttaattgcaccttaatgaaattatctattttctatagattttagtactattgaatgtattactttactgttacctgaatttattataaagtgtttttgaataaataattctaaaagc

SEQ ID NO: 369 - DNA, 1511 bp, Homo sapiens
  source 1..1511: mol_type = genomic DNA
agattgatcacttattcattagtaatttaccagagattgtggtggagttattgatgacgttacatgagccagcaaattctagtgccagtcagagcactgacctctgtgacttttcaggggatttggatcctgctcctaatccacctcattttccatcgcatgtgattaaagcaacatttgcctatatcagcaattgtcataaaaccaagttaaaaagcattttagaaattctttccaaaagccctgattcctatcagaaaattcttcttgccatatgtgagcaagcagctgaaacaaataatgtttataagaagcacagaattcttaaaatatatcacctgtttgttagtttattactgaaagatataaaaagtggcttaggaggagcttgggcctttgttcttcgagacgttatttatactttgattcactatatcaaccaaaggaaattaaccattttctctcagtaagtgtttatgatgcacttccattgacaagacttgaaggactaaaggatcttcgaagacaactggaactacataaagatcagatggtggacattatgagagcttctcagggtgctaattttaaatgacatgggctatttctacctgtttctttttgaaagaatattttgcaaagtcttgctcttggtttcattgtcacagacttagttcagactctcatcatttagttcagaccctcatttctcatctaactgtaaaactggtcctaactggtcttctcaccctgaactcttcctgttttattcatcctctgccagatgatttctctaaacccaaatatgatcatgtttttctactgcctaaattttttttttaagagacagagtttttttttttttttaagagtctcactctgtcacctaggctggagtgtagtggcaccatcataacttactatgaccttgaattcctgggtacaaggaattctcctgtctcagccttctgaatagctggaacaacaggcacacaccactacacctagctactttatttattttttttattttttgtagggacaggggtcccactatgttgcctaggttggtctcgaattcttggcctcaagtgatcctcctgccttagcctcacaaagcattgggattagaggtgtgagccacggcatctagccatgcttaaacatttttcatttctttttctttttttttaagacggagtttcgctcttgttgcccaggctggaatgcagtggcactatcttagctcactgcaacctccacctcctgagctcagattctcgtgcctcagccttcctagtagctaggattacaggcacctgccaccatgcctggctaattttttgtattttttttagtagagacggggtttcaccatgttggccagggtggtctcaaactcctgagctcaggcaatccgcccacctcagcctcccaaagtgctgggattacaggcatgagccaccgcggctggcccatgcttaaacatttttaacaccttccaaccatgt

SEQ ID NO: 370 - DNA, 12954 bp, Homo sapiens
  source 1..12954: mol_type = genomic DNA
gcgagaggagtcgggatctgcgctgcagccaccgccgcggttgatactactttgaccttccgagtgcagtgaggcatacatcacaatttggaattatgcattggtttatcaatttacttgtttattgtcaccctgctgcccagatatgacttcatgaggacagtgatgtgtgttctgaaattgtgaaccatgagtctagtacttaatgatctgcttatctgctgccgtcaactagaacatgatagagctacagaacgaaagaaagaagttgagaaatttaagcgcctgattcgagatcctgaaacaattaaacatctagatcggcattcagattccaaacaaggaaaatatttgaattgggatgctgtttttagatttttacagaaatatattcagaaagaaacagaatgtctgagaatagcaaaaccaaatgtatcagcctcaacacaagcctccaggcagaaaaagatgcaggaaatcagtagtttggtcaaatacttcatcaaatgtgcaaacagaagagcacctaggctaaaatgtcaagaactcttaaattatatcatggatacagtgaaagattcatctaatggtgctatttacggagctgattgtagcaacatactactcaaagacattctttctgtgagaaaatactggtgtgaaatatctcagcaacagtggttagaattgttctctgtgtacttcaggctctatctgaaaccttcacaagatgttcatagagttttagtggctagaataattcatgctgttaccaaaggatgctgttctcagactgacggattaaattccaaatttttggactttttttccaaggctattcagtgtgcgagacaagaaaagagctcttcaggtctaaatcatatcttagcagctcttactatcttcctcaagactttggctgtcaactttcgaattcgagtgtgtgaattaggagatgaaattcttcccactttgctttatatttggactcaacataggcttaatgattctttaaaagaagtcattattgaattatttcaactgcaaatttatatccatcatccgaaaggagccaaaacccaagaaaaaggtgcttatgaatcaacaaaatggagaagtattttatacaacttatatgatctgctagtgaatgagataagtcatataggaagtagaggaaagtattcttcaggatttcgtaatattgccgtcaaagaaaatttgattgaattgatggcagatatctgtcaccaggtttttaatgaagataccagatccttggagatttctcaatcttacactactacacaaagagaatctagtgattacagtgtcccttgcaaaaggaagaaaatagaactaggctgggaagtaataaaagatcaccttcagaagtcacagaatgattttgatcttgtgccttggctacagattgcaacccaattaatatcaaagtatcctgcaagtttacctaactgtgagctgtctccattactgatgatactatctcagcttctaccccaacagcgacatggggaacgtacaccatatgtgttacgatgccttacggaagttgcattgtgtcaagacaagaggtcaaacctagaaagctcacaaaagtcagatttattaaaactctggaataaaatttggtgtattacctttcgtggtataagttctgagcaaatacaagctgaaaactttggcttacttggagccataattcagggtagtttagttgaggttgacagagaattctggaagttatttactgggtcagcctgcagaccttcatgtcctgcagtatgctgtttgactttggcactgaccaccagtatagttccaggaacggtaaaaatgggaatagagcaaaatatgtgtgaagtaaatagaagcttttctttaaaggaatcaataatgaaatggctcttattctatcagttagagggtgacttagaaaatagcacagaagtgcctccaattcttcacagtaattttcctcatcttgtactggagaaaattcttgtgagtctcactatgaaaaactgtaaagctgcaatgaattttttccaaagcgtgccagaatgtgaacaccaccaaaaagataaagaagaactttcattctcagaagtagaagaactatttcttcagacaacttttgacaagatggactttttaaccattgtgagagaatgtggtatagaaaagcaccagtccagtattggcttctctgtccaccagaatctcaaggaatcactggatcgctgtcttctgggattatcagaacagcttctgaataattactcatctgagattacaaattcagaaactcttgtccggtgttcacgtcttttggtgggtgtccttggctgctactgttacatgggtgtaatagctgaagaggaagcatataagtcagaattattccagaaagccaagtctctaatgcaatgtgcaggagaaagtatcactctgtttaaaaataagacaaatgaggaattcagaattggttccttgagaaatatgatgcagctatgtacacgttgcttgagcaactgtaccaagaagagtccaaataagattgcatctggctttttcctgcgattgttaacatcaaagctaatgaatgacattgcagatatttgtaaaagtttagcatccttcatcaaaaagccatttgaccgtggagaagtagaatcaatggaagatgatactaatggaaatctaatggaggtggaggatcagtcatccatgaatctatttaacgattaccctgatagtagtgttagtgatgcaaacgaacctggagagagccaaagtaccataggtgccattaatcctttagctgaagaatatctgtcaaagcaagatctacttttcttagacatgctcaagttcttgtgtttgtgtgtaactactgctcagaccaatactgtgtcctttagggcagctgatattcggaggaaattgttaatgttaattgattctagcacgctagaacctaccaaatccctccacctgcatatgtatctaatgcttttaaaggagcttcctggagaagagtaccccttgccaatggaagatgttcttgaacttctgaaaccactatccaatgtgtgttctttgtatcgtcgtgaccaagatgtttgtaaaactattttaaaccatgtccttcatgtagtgaaaaacctaggtcaaagcaatatggactctgagaacacaagggatgctcaaggacagtttcttacagtaattggagcattttggcatctaacaaaggagaggaaatatatattctctgtaagaatggccctagtaaattgccttaaaactttgcttgaggctgatccttattcaaaatgggccattcttaatgtaatgggaaaagactttcctgtaaatgaagtatttacacaatttcttgctgacaatcatcaccaagttcgcatgttggctgcagagtcaatcaatagattgttccaggacacgaagggagattcttccaggttactgaaagcacttcctttgaagcttcagcaaacagcttttgaaaatgcatacttgaaagctcaggaaggaatgagagaaatgtcccatagtgctgagaaccctgaaactttggatgaaatttataatagaaaatctgttttactgacgttgatagctgtggttttatcctgtagccctatctgcgaaaaacaggctttgtttgccctgtgtaaatctgtgaaagagaatggattagaacctcaccttgtgaaaaaggttttagagaaagtttctgaaacttttggatatagacgtttagaagactttatggcatctcatttagattatctggttttggaatggctaaatcttcaagatactgaatacaacttatcttcttttccttttattttattaaactacacaaatattgaggatttctatagatcttgttataaggttttgattccacatctggtgattagaagtcattttgatgaggtgaagtccattgctaatcagattcaagaggactggaaaagtcttctaacagactgctttccaaagattcttgtaaatattcttccttattttgcctatgagggtaccagagacagtgggatggcacagcaaagagagactgctaccaaggtctatgatatgcttaaaagtgaaaacttattgggaaaacagattgatcacttattcattagtaatttaccagagattgtggtggagttattgatgacgttacatgagccagcaaattctagtgccagtcagagcactgacctctgtgacttttcaggggatttggatcctgctcctaatccacctcattttccatcgcatgtgattaaagcaacatttgcctatatcagcaattgtcataaaaccaagttaaaaagcattttagaaattctttccaaaagccctgattcctatcagaaaattcttcttgccatatgtgagcaagcagctgaaacaaataatgtttataagaagcacagaattcttaaaatatatcacctgtttgttagtttattactgaaagatataaaaagtggcttaggaggagcttgggcctttgttcttcgagacgttatttatactttgattcactatatcaaccaaaggccttcttgtatcatggatgtgtcattacgtagcttctccctttgttgtgacttattaagtcaggtttgccagacagccgtgacttactgtaaggatgctctagaaaaccatcttcatgttattgttggtacacttataccccttgtgtatgagcaggtggaggttcagaaacaggtattggacttgttgaaatacttagtgatagataacaaggataatgaaaacctctatatcacgattaagcttttagatccttttcctgaccatgttgtttttaaggatttgcgtattactcagcaaaaaatcaaatacagtagaggacccttttcactcttggaggaaattaaccattttctctcagtaagtgtttatgatgcacttccattgacaagacttgaaggactaaaggatcttcgaagacaactggaactacataaagatcagatggtggacattatgagagcttctcaggataatccgcaagatgggattatggtgaaactagttgtcaatttgttgcagttatccaagatggcaataaaccacactggtgaaaaagaagttctagaggctgttggaagctgcttgggagaagtgggtcctatagatttctctaccatagctatacaacatagtaaagatgcatcttataccaaggcccttaagttatttgaagataaagaacttcagtggaccttcataatgctgacctacctgaataacacactggtagaagattgtgtcaaagttcgatcagcagctgttacctgtttgaaaaacattttagccacaaagactggacatagtttctgggagatttataagatgacaacagatccaatgctggcctatctacagccttttagaacatcaagaaaaaagtttttagaagtacccagatttgacaaagaaaacccttttgaaggcctggatgatataaatctgtggattcctctaagtgaaaatcatgacatttggataaagacactgacttgtgcttttttggacagtggaggcacaaaatgtgaaattcttcaattattaaagccaatgtgtgaagtgaaaactgacttttgtcagactgtacttccatacttgattcatgatattttactccaagatacaaatgaatcatggagaaatctgctttctacacatgttcagggatttttcaccagctgtcttcgacacttctcgcaaacgagccgatccacaacccctgcaaacttggattcagagtcagagcactttttccgatgctgtttggataaaaaatcacaaagaacaatgcttgctgttgtggactacatgagaagacaaaagagaccttcttcaggaacaatttttaatgatgctttctggctggatttaaattatctagaagttgccaaggtagctcagtcttgtgctgctcactttacagctttactctatgcagaaatctatgcagataagaaaagtatggatgatcaagagaaaagaagtcttgcatttgaagaaggaagccagaatacaactatttctagcttgagtgaaaaaagtaaagaagaaactggaataagtttacaggatcttctcttagaaatctacagaagtataggggagccagatagtttgtatggctgtggtggagggaagatgttacaacccattactagactacgaacatatgaacacgaagcaatgtggggcaaagccctagtaacatatgacctcgaaacagcaatcccctcatcaacacgccaggcaggaatcattcaggccttgcagaatttgggactctgccatattctttccgtctatttaaaaggattggattatgaaaataaagactggtgtcctgaactagaagaacttcattaccaagcagcatggaggaatatgcagtgggaccattgcacttccgtcagcaaagaagtagaaggaaccagttaccatgaatcattgtacaatgctctacaatctctaagagacagagaattctctacattttatgaaagtctcaaatatgccagagtaaaagaagtggaagagatgtgtaagcgcagccttgagtctgtgtattcgctctatcccacacttagcaggttgcaggccattggagagctggaaagcattggggagcttttctcaagatcagtcacacatagacaactctctgaagtatatattaagtggcagaaacactcccagcttctcaaggacagtgattttagttttcaggagcctatcatggctctacgcacagtcattttggagatcctgatggaaaaggaaatggacaactcacaaagagaatgtattaaggacattctcaccaaacaccttgtagaactctctatactggccagaactttcaagaacactcagctccctgaaagggcaatatttcaaattaaacagtacaattcagttagctgtggagtctctgagtggcagctggaagaagcacaagtattctgggcaaaaaaggagcagagtcttgccctgagtattctcaagcaaatgatcaagaagttggatgccagctgtgcagcgaacaatcccagcctaaaacttacatacacagaatgtctgagggtttgtggcaactggttagcagaaacgtgcttagaaaatcctgcggtcatcatgcagacctatctagaaaaggcagtagaagttgctggaaattatgatggagaaagtagtgatgagctaagaaatggaaaaatgaaggcatttctctcattagcccggttttcagatactcaataccaaagaattgaaaactacatgaaatcatcggaatttgaaaacaagcaagctctcctgaaaagagccaaagaggaagtaggtctccttagggaacataaaattcagacaaacagatacacagtaaaggttcagcgagagctggagttggatgaattagccctgcgtgcactgaaagaggatcgtaaacgcttcttatgtaaagcagttgaaaattatatcaactgcttattaagtggagaagaacatgatatgtgggtattccgactttgttccctctggcttgaaaattctggagtttctgaagtcaatggcatgatgaagagagacggaatgaagattccaacatataaatttttgcctcttatgtaccaattggctgctagaatggggaccaagatgatgggaggcctaggatttcatgaagtcctcaataatctaatctctagaatttcaatggatcacccccatcacactttgtttattatactggccttagcaaatgcaaacagagatgaatttctgactaaaccagaggtagccagaagaagcagaataactaaaaatgtgcctaaacaaagctctcagcttgatgaggatcgaacagaggctgcaaatagaataatatgtactatcagaagtaggagacctcagatggtcagaagtgttgaggcactttgtgatgcttatattatattagcaaacttagatgccactcagtggaagactcagagaaaaggcataaatattccagcagaccagccaattactaaacttaagaatttagaagatgttgttgtccctactatggaaattaaggtggaccacacaggagaatatggaaatctggtgactatacagtcatttaaagcagaatttcgcttagcaggaggtgtaaatttaccaaaaataatagattgtgtaggttccgatggcaaggagaggagacagcttgttaagggccgtgatgacctgagacaagatgctgtcatgcaacaggtcttccagatgtgtaatacattactgcagagaaacacggaaactaggaagaggaaattaactatctgtacttataaggtggttcccctctctcagcgaagtggtgttcttgaatggtgcacaggaactgtccccattggtgaatttcttgttaacaatgaagatggtgctcataaaagatacaggccaaatgatttcagtgcctttcagtgccaaaagaaaatgatggaggtgcaaaaaaagtcttttgaagagaaatatgaagtcttcatggatgtttgccaaaattttcaaccagttttccgttacttctgcatggaaaaattcttggatccagctatttggtttgagaagcgattggcttatacgcgcagtgtagctacttcttctattgttggttacatacttggacttggtgatagacatgtacagaatatcttgataaatgagcagtcagcagaacttgtacatatagatctaggtgttgcttttgaacagggcaaaatccttcctactcctgagacagttccttttagactcaccagagatattgtggatggcatgggcattacgggtgttgaaggtgtcttcagaagatgctgtgagaaaaccatggaagtgatgagaaactctcaggaaactctgttaaccattgtagaggtccttctatatgatccactctttgactggaccatgaatcctttgaaagctttgtatttacagcagaggccggaagatgaaactgagcttcaccctactctgaatgcagatgaccaagaatgcaaacgaaatctcagtgatattgaccagagtttcaacaaagtagctgaacgtgtcttaatgagactacaagagaaactgaaaggagtggaagaaggcactgtgctcagtgttggtggacaagtgaatttgctcatacagcaggccatagaccccaaaaatctcagccgacttttcccaggatggaaagcttgggtgtgatcttcagtatatgaattaccctttcattcagcctttagaaattatattttagcctttatttttaacctgccaacatactttaagtagggattaatatttaagtgaactattgtgggtttttttgaatgttggttttaatacttgatttaatcaccactcaaaaatgttttgatggtcttaaggaacatctctgctttcactctttagaaataatggtcattcgggctgggcgcagcggctcacgcctgtaatcccagcactttgggaggccgaggtgagcggatcacaaggtcaggagttcgagaccagcctggccaagagaccagcctggccagtatggtgaaaccctgtctctactaaaaatacaaaaattagccgagcatggtggcgggcacctgtaatcccagctactcgagaggctgaggcaggagaatctcttgaacctgggaggtgaaggttgctgtgggccaaaatcatgccattgcactccagcctgggtgacaagagcgaaactccatctcaaaaaaaaaaaaaaaaaaacagaaacgtatttggatttttcctagtaagatcactcagtgttactaaataatgaagttgttatggagaacaaatttcaaagacacagttagtgtagttactatttttttaagtgtgtattaaaacttctcattctattctctttatcttttaagcccttctgtactgtccatgtatgttatctttctgtgataacttcatagattgccttctagttcatgaattctcttgtcagatgtatataatctcttttaccctatccattgggcttcttctttcagaaattgtttttcatttctaattatgcatcatttttcagatctctgtttcttgatgtcatttttaatgtttttttaatgttttttatgtcactaattattttaaatgtctgtacttgatagacactgtaatagttctattaaatttagttcctgctgtttatatctgttgatttttgtatttgataggctgttcatccagttttgtctttttgaaaagtgagtttattttcagcaaggctttatctatgggaatcttgagtgtctgtttatgtcatattcccagggctgttgctgcacacaagcccattcttattttaatttcttggctttagggtttccatacctgaagtgtagcataaatactgataggagatttcccaggccaaggcaaacacacttcctcctcatctccttgtgctagtgggcagaatatttgattgatgcctttttcactgagagtataagcttccatgtgtcccacctttatggcaggggtggaaggaggtacatttaattcccactgcctgcctttggcaagccctgggttctttgctccccatatagatgtctaagctaaaagccgtgggttaatgagactggcaaattgttccaggacagctacagcatcagctcacatattcacctctctggtttttcattcccctcatttttttctgagacagagtcttgctctgtcacccaggctggagtgcagtggcatgatctcagctcactgaaacctctgcctcctgggttcaagcaattctcctgcctcagcctcccgagtagctgggactacaggcgtgtgccaacacgcccggctaattttttgtatttttattagagacggagtttcaccgtgttagccaggatggtctcgatcgcttgacctcgtgatccaccctcctcggcctcccaaagtgctgggattacaggtgtgagccaccgcgcccggcctcattcccctcatttttgaccgtaaggatttcccctttcttgtaagttctgctatgtatttaaaagaatgttttctacattttatccagcatttctctgtgttctgttggaagggaagggcttaggtatctagtttgatacataggtagaagtggaacatttctctgtcccccagctgtcatcatataagataaacatcagataaaaagccacctgaaagtaaaactactgactcgtgtattagtgagtataatctcttctccatccttaggaaaatgttcatcccagctgcggagattaacaaatgggtgattgagctttctcctcgtatttggaccttgaaggttatataaatttttttcttatgaagagttggcatttctttttattgccaatggcaggcactcattcatatttgatctcctcaccttcccctcccctaaaaccaatctccagaactttttggactataaatttcttggtttgacttctggagaactgttcagaatattactttgcatttcaaattacaaacttaccttggtgtatctttttcttacaagctgcctaaatgaatatttggtatatattggtagttttattactatagtaaatcaaggaaatgcagtaaacttaaaatgtctttaagaaagccctgaaatcttcatgggtgaaattagaaattatcaactagataatagtatagataaatgaatttgtagctaattcttgctagttgttgcatccagagagctttgaataacatcattaatctactctttagccttgcatggtatgctatgaggctcctgttctgttcaagtattctaatcaatggctttgaaaagtttatcaaatttacatacagatcacaagcctaggagaaataactaattcacagatgacagaattaagattataaaagattttttttttgtaattttagtagagacagggttgccattgtattccagccttggcgacagagcaagactctgcctcaaaaaaaaaaaaaaaaaggttttggcaagctggaactctttctgcaaatgactaagatagaaaactgccaaggacaaatgaggagtagttagattttgaaaatattaatcatagaatagttgttgtatgctaagtcactgacccatattatgtacagcatttctgatctttactttgcaagattagtgatactatcccaatacactgctggagaaatcagaatttggagaaataagttgtccaaggcaagaagatagtaaattataagtacaagtgtaatatggacagtatctaacttgaaaagatttcaggcgaaaagaatctggggtttgccagtcagttgctcaaaaggtcaatgaaaaccaaatagtgaagctatcagagaagctaataaattatagactgcttgaacagttgtgtccagattaagggagataatagctttcccaccctactttgtgcaggtcatacctccccaaagtgtttacctaatcagtaggttcacaaactcttggtcattatagtatatgcctaaaatgtatgcacttaggaatgctaaaaatttaaatatggtctaaagcaaataaaagcaaagaggaaaaactttggacagcgtaaagactagaatagtcttttaaaaagaaagccagtatattggtttgaaatatagagatgtgtcccaatttcaagtattttaattgcaccttaatgaaattatctattttctatagattttagtactattgaatgtattactttactgttacctgaatttattataaagtgtttttgaataaataattctaaaagcata

SEQ ID NO: 371 - DNA, 4841 bp, Homo sapiens
  source 1..4841: mol_type = genomic DNA
ccgcgtccgcgcttacccaatacaagccgggctacgtccgagggtaacaacatgatcaaaaccacagcaggaaccacaataaggaacaagactcaggttaaagcaaacacagcgacagctcctgcgccgcatctcctggttccagtggcggcactgaactcgcggcaatttgtcccgcctctttcgcttcacggcagccaatcgcttccgccagagaaagaaaggcgccgaaatgaaacccgcctccgttcgccttcggaactgtcgtcacttccgtcctcagacttggaggggcggggatgaggagggcggggaggacgacgagggcgaagagggtgggtgagagccccggagcccgagccgaagggcgagccgcaaacgctaagtcgctggccattggtggacatggcgcaggcgcgtttgctccgacgggccgaatgttttggggcagtgttttgagcgcggagaccgcgtgatactggatgcgcatgggcataccgtgctctgcggctgcttggcgttgcttcttcctccagaagtgggcgctgggcagtcacgcagggtttgaaccggaagcgggagtaggtagctgcgtggctaacggagaaaagaagccgtggccgcgggaggaggcgagaggagtcgggatctgcgctgcagccaccgccgcggttgatactactttgaccttccgagtgcagtgacagtgatgtgtgttctgaaattgtgaaccatgagtctagtacttaatgatctgcttatctgctgccgtcaactagaacatgatagagctacagaacgaaagaaagaagttgagaaatttaagcgcctgattcgagatcctgaaacaattaaacatctagatcggcattcagattccaaacaaggaaaatatttgaattgggatgctgtttttagatttttacagaaatatattcagaaagaaacagaatgtctgagaatagcaaaaccaaatgtatcagcctcaacacaagcctccaggcagaaaaagatgcaggaaatcagtagtttggtcaaatacttcatcaaatgtgcaaacagaagagcacctaggctaaaatgtcaagaactcttaaattatatcatggatacagtgaaagattcatctaatggtgctatttacggagctgattgtagcaacatactactcaaagacattctttctgtgagaaaatactggtgtgaaatatctcagcaacagtggttagaattgttctctgtgtacttcaggctctatctgaaaccttcacaagatgttcatagagttttagtggctagaataattcatgctgttaccaaaggatgctgttctcagactgacggattaaattccaaatttttggactttttttccaaggctattcagtgtgcgagacaagaaaagagctcttcaggtctaaatcatatcttagcagctcttactatcttcctcaagactttggctgtcaactttcgaattcgagtgtgtgaattaggagatgaaattcttcccactttgctttatatttggactcaacataggcttaatgattctttaaaagaagtcattattgaattatttcaactgcaaatttatatccatcatccgaaaggagccaaaacccaagaaaaaggtgcttatgaatcaacaaaatggagaagtattttatacaacttatatgatctgctagtgaatgagataagtcatataggaagtagaggaaagtattcttcaggatttcgtaatattgccgtcaaagaaaatttgattgaattgatggcagatatctgtcaccaggtttttaatgaagataccagatccttggagatttctcaatcttacactactacacaaagagaatctagtgattacagtgtcccttgcaaaaggaagaaaatagaactaggctgggaagtaataaaagatcaccttcagaagtcacagaatgattttgatcttgtgccttggctacagattgcaacccaattaatatcaaagtatcctgcaagtttacctaactgtgagctgtctccattactgatgatactatctcagcttctaccccaacagcgacatggggaacgtacaccatatgtgttacgatgccttacggaagttgcattgtgtcaagacaagaggtcaaacctagaaagctcacaaaagtcagatttattaaaactctggaataaaatttggtgtattacctttcgtggtataagttctgagcaaatacaagctgaaaactttggcttacttggagccataattcagggtagtttagttgaggttgacagagaattctggaagttatttactgggtcagcctgcagaccttcatgtcctgcagtatgctgtttgactttggcactgaccaccagtatagttccaggaacggtaaaaatgggaatagagcaaaatatgtgtgaagtaaatagaagcttttctttaaaggaatcaataatgaaatggctcttattctatcagttagagggtgacttagaaaatagcacagaagtgcctccaattcttcacagtaattttcctcatcttgtactggagaaaattcttgtgagtctcactatgaaaaactgtaaagctgcaatgaattttttccaaagcgtgccagaatgtgaacaccaccaaaaagataaagaagaactttcattctcagaagtagaagaactatttcttcagacaacttttgacaagatggactttttaaccattgtgagagaatgtggtatagaaaagcaccagtccagtattggcttctctgtccaccagaatctcaaggaatcactggatcgctgtcttctgggattatcagaacagcttctgaataattactcatctgagattacaaattcagaaactcttgtccggtgttcacgtcttttggtgggtgtccttggctgctactgttacatgggtgtaatagctgaagaggaagcatataagtcagaattattccagaaagccaagtctctaatgcaatgtgcaggagaaagtatcactctgtttaaaaataagacaaatgaggaattcagaattggttccttgagaaatatgatgcagctatgtacacgttgcttgagcaactgtaccaagaagagtccaaataagattgcatctggctttttcctgcgattgttaacatcaaagctaatgaatgacattgcagatatttgtaaaagtttagcatccttcatcaaaaagccatttgaccgtggagaagtagaatcaatggaagatgatactaatggaaatctaatggaggtggaggatcagtcatccatgaatctatttaacgattaccctgatagtagtgttagtgatgcaaacgaacctggagagagccaaagtaccataggtgccattaatcctttagctgaagaatatctgtcaaagcaagatctacttttcttagacatgctcaagttcttgtgtttgtgtgtaactactgctcagaccaatactgtgtcctttagggcagctgatattcggaggaaattgttaatgttaattgattctagcacgctagaacctaccaaatccctccacctgcatatgtatctaatgcttttaaaggagcttcctggagaagagtaccccttgccaatggaagatgttcttgaacttctgaaaccactatccaatgtgtgttctttgtatcgtcgtgaccaagatgtttgtaaaactattttaaaccatgtccttcatgtagtgaaaaacctaggtcaaagcaatatggactctgagaacacaagggatgctcaaggacagtttcttacagtaattggagcattttggcatctaacaaaggagaggaaatatatattctctgtaagaatggccctagtaaattgccttaaaactttgcttgaggctgatccttattcaaaatgggccattcttaatgtaatgggaaaagactttcctgtaaatgaagtatttacacaatttcttgctgacaatcatcaccaagttcgcatgttggctgcagagtcaatcaatagattgttccaggacacgaagggagattcttccaggttactgaaagcacttcctttgaagcttcagcaaacagcttttgaaaatgcatacttgaaagctcaggaaggaatgagagaaatgtcccatagtgctgagaaccctgaaactttggatgaaatttataatagaaaatctgttttactgacgttgatagctgtggttttatcctgtagccctatctgcgaaaaacaggctttgtttgccctgtgtaaatctgtgaaagagaatggattagaacctcaccttgtgaaaaaggttttagagaaagtttctgaaacttttggatatagacgtttagaagactttatggcatctcatttagattatctggttttggaatggctaaatcttcaagatactgaatacaacttatcttcttttccttttattttattaaactacacaaatattgaggatttctatagatcttgttataaggttttgattccacatctggtgattagaagtcattttgatgaggtgaagtccattgctaatcagattcaagaggactggaaaagtcttctaacagactgctttccaaagattcttgtaaatattcttccttattttgcctatgagggtaccagagacagtgggatggcacagcaaagagagactgctaccaaggtctatgatatgcttaaaagtgaaaacttattgggaaaacagattgatcacttattcattagtaatttaccagagattgtggtggagttattgatgacgttacatgagccagcaaattctagtgccagtcagagcactgacctctgtgacttttcag

SEQ ID NO: 372 - DNA, 481 bp, Homo sapiens
  source 1..481: mol_type = genomic DNA
aaaagaagccgtggccgcgggaggaggcgagaggagtcgggatctgcgctgcagccaccgccgcggttgatactactttgaccttccgagtgcagtgtctcgctctgtcgcccatgctggagtgcaattgcgtgatctcagctaactgcactttccgcctcctgggttcaaacagtgatgtgtgttctgaaattgtgaaccatgagtctagtacttaatgatctgcttatctgctgccgtcaactagaacatgatagagctacagaacgaaagaaagaagttgagaaatttaagcgcctgattcgagatcctgaaacaattaaacatctagatcggcattcagattccaaacaaggaaaatatttgaattgggatgctgtttttagatttttacagaaatatattcagaaagaaacagaatgtctgagaatagcaaaaccaaatgtatcagcctcaacacaagcctccaggcagaaaaaga

SEQ ID NO: 373 - DNA, 1205 bp, Homo sapiens
  source 1..1205: mol_type = genomic DNA
ggggcggagctggagggggtggttcggcgtgggggccgttggctccagacaaataaacatggagtccatcttccacgagaaacagccttctggaaatatggatgacagtggttttttctctattcaggttataagcaatgccttgaaagtttggggtttagaactaatcctgttcaacagtccagagtatcagaggctcaggatcgatcctataaatgaaagatcatttatatgcaattataaggaacactggtttacagttagaaaattaggaaaacagtggtttaacttgaattctctcttgacgggtccagaattaatatcagatacatatcttgcacttttcttggctcaattacaacaggaaggttattctatatttgtcgttaagggtgatctgccagattgcgaagctgaccaactcctgcagatgattagggtccaacagatgcatcgaccaaaacttattggagaagaattagcacaactaaaagagcaaagagtccataaaacagacctggaacgagtgttagaagcaaatgatggctcaggaatgttagacgaagatgaggaggatttgcagagggctctggcactaagtcgccaagaaattgacatggaagatgaggaagcagatctccgcagggctattcagctaagtatgcaaggtagttccagaaacatatctcaagatatgacacagacatcaggtacaaatcttacttcagaagagcttcggaagagacgagaagcctactttgaaaaacagcagcaaaagcagcaacagcagcagcagcagcagcagcagggggacctatcaggacagagttcacatccatgtgaaaggccagccaccagttcaggagcacttgggagtgatctaggtgatgctatgagtgaagaagacatgcttcaggcagctgtgaccatgtctttagaaactgtcagaaatgatttgaaaacagaaggaaaaaaataatacctttaaaaaataatttagatattcatactttccaacattatcctgtgtgattacagcatagggtccactttggtaatgtgtcaaagagatgaggaaataagacttttagcggtttgcaaacaaaatgatgggaaagtggaacaatgcgtcggttgtaggactaaataatgatcttccaaatattagccaaagaggcattcagcaattaaagacatttaaaata

SEQ ID NO: 374 - DNA, 6947 bp, Homo sapiens
  source 1..6947: mol_type = genomic DNA
gagaggggcagggggcggagctggagggggtggttcggcgtgggggccgttggctccagacaaataaacatggagtccatcttccacgagaaacaagaaggctcactttgtgctcaacattgcctgaataacttattgcaaggagaatattttagccctgtggaattatcctcaattgcacatcagctggatgaggaggagaggatgagaatggcagaaggaggagttactagtgaagattatcgcacgtttttacagcagccttctggaaatatggatgacagtggttttttctctattcaggttataagcaatgccttgaaagtttggggtttagaactaatcctgttcaacagtccagagtatcagaggctcaggatcgatcctataaatgaaagatcatttatatgcaattataaggaacactggtttacagttagaaaattaggaaaacagtggtttaacttgaattctctcttgacgggtccagaattaatatcagatacatatcttgcacttttcttggctcaattacaacaggaaggttattctatatttgtcgttaagggtgatctgccagattgcgaagctgaccaactcctgcagatgattagggtccaacagatgcatcgaccaaaacttattggagaagaattagcacaactaaaagagcaaagagtccataaaacagacctggaacgagtgttagaagcaaatgatggctcaggaatgttagacgaagatgaggaggatttgcagagggctctggcactaagtcgccaagaaattgacatggaagatgaggaagcagatctccgcagggctattcagctaagtatgcaaggtagttccagaaacatatctcaagatatgacacagacatcaggtacaaatcttacttcagaagagcttcggaagagacgagaagcctactttgaaaaggatcagcacttccatattttaaaacagcagcaaaagcagcaacagcagcagcagcagcagcagcagggggacctatcaggacagagttcacatccatgtgaaaggccagccaccagttcaggagcacttgggagtgatctaggtgatgctatgagtgaagaagacatgcttcaggcagctgtgaccatgtctttagaaactgtcagaaatgatttgaaaacagaaggaaaaaaataatacctttaaaaaataatttagatattcatactttccaacattatcctgtgtgattacagcatagggtccactttggtaatgtgtcaaagagatgaggaaataagacttttagcggtttgcaaacaaaatgatgggaaagtggaacaatgcgtcggttgtaggactaaataatgatcttccaaatattagccaaagaggcattcagcaattaaagacatttaaaatagttttctaaatgtttctttttcttttttgagtgtgcaatatgtaacatgtctaaagttagggcatttttcttggatctttttgcagactagctaattagctctcgcctcaggctttttccatatagtttgttttctttttctgtcttgtaggtaagttggctcacatcatgtaatagtggctttcatttcttattaaccaaattaacctttcaggaaagtatctctactttcctgatgttgataatagtaatggttctagaaggatgaacagttctcccttcaactgtataccgtgtgctccagtgttttcttgtgttgttttctctgatcacaacttttctgctacctggttttcattattttcccacaattcttttgaaagatggtaatcttttctgaggtttagcgttttaagccctacgatgggatcattatttcatgactggtgcgttcctaaactctgaaatcagccttgcacaagtacttgagaataaatgagcattttttaaaatgtgtgagcatgtgctttcccagatgctttatgaatgtcttttcacttatatcaaaaccttacagctttgttgcaaccccttcttcctgcgccttattttttcctttcttctccaattgagaaaactaggagaagcatagtatgcaggcaagtctccttctgttagaagactaaacatacgtacccaccatgaatgtatgatacatgaaatttggccttcaattttaatagcagttttattttattttttctcctatgactggagctttgtgttctctttacagttgagtcatggaatgtaggtgtctgcttcacatcttttagtaggtatagcttgtcaaagatggtgatctggaacatgaaaataatttactaatgaaaatatgtttaaatttatactgtgatttgacacttgcatcatgtttagatagcttaagaacaatggaagtcacagtacttagtggatctataaataagaaagtccatagttttgataaatattctctttaattgagatgtacagagagtttcttgctgggtcaataggatagtatcattttggtgaaaaccatgtctctgaaattgatgttttagtttcagtgttccctatccctcattctccatctccttttgaagctcttttgaatgttgaattgttcataagctaaaatccaagaaatttcagctgacaacttcgaaaattataatatggtatattgccctcctggtgtgtggctgcacacattttatcagggaaagttttttgatctaggatttattgctaactaactgaaaagagaagaaaaaatatcttttatttatgattataaaatagctttttcttcgatataacagattttttaagtcattattttgtgccaatcagttttctgaagtttcccttacacaaaaggatagctttattttaaaatctaaagtttcttttaatagttaaaaatgtttcagaagaattataaaactttaaaactgcaagggatgttggagtttagtactactccctcaagatttaaaaagctaaatattttaagactgaacatttatgttaattattaccagtgtgtttgtcatattttccatggatatttgttcattacctttttccattgaaaagttacattaaacttttcatacacttgaattgatgagctacctaatataaaaatgagaaaaccaatatgcattttaaagttttaactttagagtttataaagttcatatataccctagttaaagcacttaagaaaatatggcatgtttgacttttagttcctagagagtttttgtttttgtttttgtttttttttgagacggagtcttgctatgtctcccaggctggagggcagtggcatgatctcggctcactacaacttccacctcccgggttcaagcaattctcctgcctcagcctccagagtagctgggattacaggcgcccaccaccacacccggcagatttttgtatttttggtagagacgcggtttcatcatgtttggccaggctggtctcgaactcctgacctcaggtgatccgcctgccttggcctcccaaagtgttgggattacaggcatgagccactgcgcctggccagctagagagtttttaaagcagagctgagcacacactggatgcgtttgaatgtgtttgtgtagtttgttgtgaaattgttacatttagcaggcagatccagaagcactagtgaactgtcatcttggtggggttggcttaaatttaattgactgtttagattccatttcttaattgattggccagtatgaaaagatgccagtgcaagtaaccatagtatcaaaaaagttaaaaattattcaaagctatagtttatacatcaggtactgccatttactgtaaaccacctgcaagaaagtcaggaacaactaaattcacaagaactgtcctgctaagaagtgtattaaagatttccattttgttttactaattgggaacatcttaatgtttaatatttaaactattggtatcatttttctaatgtataatttgtattactgggatcaagtatgtacagtggtgatgctagtagaagtttaagccttggaaataccactttcatattttcagatgtcatggatttaatgagtaatttatgtttttaaaattcagaatagttaatctctgatctaaaaccatcaatctatgttttttacggtaatcatgtaaatatttcagtaatataaactgtttgaaaaggctgctgcaggtaaactctatactaggatcttggccaaataatttacaattcacagaatattttatttaaggtggtgctttttttttttgtccttaaaacttgatttttcttaactttattcatgatgccaaagtaaatgaggaaaaaaactcaaaaccagttgagtatcattgcagacaaaactaccagtagtccatattgtttaatattaagttgaataaaataaattttatttcagtcagagcctaaatcacattttgattgtctgaatttttgatactatttttaaaatcatgctagtggcggctgggcgtggtagctcacgcctgtaatcccagcattttgggaggccgaagtgggtggatcacgaggtcgggagttcgagaccagcttggccaaaatggtgaaaccccatctgtactaaaaactacaaaaattagctgggcgcggtggcaggtgcctgtaatcccagctacctgggagtctgaggcaggagaattgcttgaaccctggcgacagaggatgcagtgagccaagatggtgccactgtactccagactgggcgacagagtgagactctgtctcaaaaaaaaaaaaaaaatcatgctagtgccaagagctactaaattcttaaaaccggcccattggacctgtacagataaaaaatagattcagtgcataatcaaaatatgataattttaaaatcttaagtagaaaaataaatcttgatgttttaaattcttacgaggattcaatagttaatattgatgatctcccggctgggtgcagtggctcacgcctgtaatcccagcagttctggaggctgaggtgggcgaatcacttcaggccaggagttcaagaccagtctgggcaacatggtgaaacctcgtttctactaaaaatacaaaaattagccgggcgtggttgcacacacttgtaatcccagctactcaggaggctaagaatcgcatgagcctaggaggcagaggttgcagagtgccaagggctcaccactgcattccagcctgcccaacagagtgagacactgtttctgaaaaaaaaaaatatatatatatatatatatatgtgtgtatatatatatgtatatatatatgacttcctattaaaaactttatcccagtcgggggcagtggctcacgcctgtaatcccaacactttgggaggctgaggcaggtggatcacctgaagtccggagtttgagaccagcctggccaacatggtgaaaccccatctctactaaaaatacaaaacttaagccaggtatggtggcgggcacctgtaatcccagttacttgggaggctgaggcaggagaatcgtttaaacccaggaggtggaggttgcagtgagctgagatcgtgccattgcactctagcctgggcaacaagagtaaaactccatcttaaaggtttgtttgtttttttttaatccggaaacgaagaggcgttgggccgctattttctttttctttctttctttctttctttttttttttttctgagacggagtctagctctgctgcccaggctggagtacaatgacacgatgttggctcactgcaacctccacctcctgggttcaagcgattctcctgcctcagcctcccaagtacctgggattacaggcacctgccactacacctggcgaatatttgttttttttagtagagacgggcttttaccatgttaggctggtctcaaactcctgacctcaggtgatctgcctgccttggcctcccaaagtgctgggattacaggtgcaggccaccacacccggccttgggccactgttttcaaagtgaattgtttgttgtatcgagtccttaagtatggatatatatgtgaccctaattaagaactaccagattggatcaactaatcatgtcagcaatgtaaataactttatttttcatattcaaaataaaaactttcttttatttctggcccctttataaccagcatctttttgctttaaaaaatgacctggctttgtatttttttagtcttaaacataataaaaatatttttgttctaatttgctttcatgagtgaagattattgacatcgttggtaaattctagaattttgattttgttttttaatttgaagaaaatctttgctattattattttttccaagtggtctggcattttaagaattagtgctaataacgtaacttctaaatttgtcgtaattggcatgtttaatagcatatcaaaaaacattttaagcctgtggattcatagacaaagcaatgagaaacattagtaaaatataaatggatattcctgatgcatttaggaagctctcaattgtctcttgcatagttcaaggaatgttttctgaatttttttaatgctttttttttttttgaaagaggaaaacatacatttttaaatgtgattatctaatttttacaacactgggctattaggaataactttttaaaaattactgttctgtataaatatttgaaattcaagtacagaaaatatctgaaacaaaaagcattgttgtttggccatgatacaagtgcactgtggcagtgccgcttgctcaggacccagccctgcagcccttctgtgtgtgctccctcgttaagttcatttgctgttattacacacacaggccttcctgtctggtcgttagaaaagccgggcttccaaagcactgttgaacacaggattctgttgttagtgtggatgttcaatgagttgtattttaaatatcaaagattattaaataaagataatgtttgcttttcta

SEQ ID NO: 375 - DNA, 4713 bp, Homo sapiens
  source 1..4713: mol_type = genomic DNA
ggggcggagctggagggggtggttcggcgtgggggccgttggctccagacaaataaacatggagtccatcttccacgagaaacaagaaggctcactttgtgctcaacattgcctgaataacttattgcaaggagaatattttagccctgtggaattatcctcaattgcacatcagctggatgaggaggagaggatgagaatggcagaaggaggagttactagtgaagattatcgcacgtttttacagcagccttctggaaatatggatgacagtggttttttctctattcaggttataagcaatgccttgaaagtttggggtttagaactaatcctgttcaacagtccagagtatcagaggctcaggatcgatcctataaatgaaagatcatttatatgcaattataaggaacactggtttacagttagaaaattaggaaaacagtggtttaacttgaattctctcttgacgggtccagaattaatatcagatacatatcttgcacttttcttggctcaattacaacaggaaggttattctatatttgtcgttaagggtgatctgccagattgcgaagctgaccaactcctgcagatgattagggtccaacagatgcatcgaccaaaacttattggagaagaattagcacaactaaaagagcaaagagtccataaaacagacctggaacgagtgttagaagcaaatgatggctcaggaatgttagacgaagatgaggaggatttgcagagggctctggcactaagtcgccaagaaattgacatggaagatgaggaagcagatctccgcagggctattcagctaagtatgcaaggtagttccagaaacatatctcaagatatgacacagacatcaggtacaaatcttacttcagaagagcttcggaagagacgagaagcctactttgaaaaacagcagcaaaagcagcaacagcagcagcagcagcagcagcagggggacctatcaggacagagttcacatccatgtgaaaggccagccaccagttcaggagcacttgggagtgatctaggtgatgctatgagtgaagaagacatgcttcaggcagctgtgaccatgtctttagaaactgtcagaaatgatttgaaaacagaaggaaaaaaataatacctttaaaaaataatttagatattcatactttccaacattatcctgtgtgattacagcatagggtccactttggtaatgtgtcaaagagatgaggaaataagacttttagcggtttgcaaacaaaatgatgggaaagtggaacaatgcgtcggttgtaggactaaataatgatcttccaaatattagccaaagaggcattcagcaattaaagacatttaaaatagttttctaaatgtttctttttcttttttgagtgtgcaatatgtaacatgtctaaagttagggcatttttcttggatctttttgcagactagctaattagctctcgcctcaggctttttccatatagtttgttttctttttctgtcttgtaggtaagttggctcacatcatgtaatagtggctttcatttcttattaaccaaattaacctttcaggaaagtatctctactttcctgatgttgataatagtaatggttctagaaggatgaacagttctcccttcaactgtataccgtgtgctccagtgttttcttgtgttgttttctctgatcacaacttttctgctacctggttttcattattttcccacaattcttttgaaagatggtaatcttttctgaggtttagcgttttaagccctacgatgggatcattatttcatgactggtgcgttcctaaactctgaaatcagccttgcacaagtacttgagaataaatgagcattttttaaaatgtgtgagcatgtgctttcccagatgctttatgaatgtcttttcacttatatcaaaaccttacagctttgttgcaaccccttcttcctgcgccttattttttcctttcttctccaattgagaaaactaggagaagcatagtatgcaggcaagtctccttctgttagaagactaaacatacgtacccaccatgaatgtatgatacatgaaatttggccttcaattttaatagcagttttattttattttttctcctatgactggagctttgtgttctctttacagttgagtcatggaatgtaggtgtctgcttcacatcttttagtaggtatagcttgtcaaagatggtgatctggaacatgaaaataatttactaatgaaaatatgtttaaatttatactgtgatttgacacttgcatcatgtttagatagcttaagaacaatggaagtcacagtacttagtggatctataaataagaaagtccatagttttgataaatattctctttaattgagatgtacagagagtttcttgctgggtcaataggatagtatcattttggtgaaaaccatgtctctgaaattgatgttttagtttcagtgttccctatccctcattctccatctccttttgaagctcttttgaatgttgaattgttcataagctaaaatccaagaaatttcagctgacaacttcgaaaattataatatggtatattgccctcctggtgtgtggctgcacacattttatcagggaaagttttttgatctaggatttattgctaactaactgaaaagagaagaaaaaatatcttttatttatgattataaaatagctttttcttcgatataacagattttttaagtcattattttgtgccaatcagttttctgaagtttcccttacacaaaaggatagctttattttaaaatctaaagtttcttttaatagttaaaaatgtttcagaagaattataaaactttaaaactgcaagggatgttggagtttagtactactccctcaagatttaaaaagctaaatattttaagactgaacatttatgttaattattaccagtgtgtttgtcatattttccatggatatttgttcattacctttttccattgaaaagttacattaaacttttcatacacttgaattgatgagctacctaatataaaaatgagaaaaccaatatgcattttaaagttttaactttagagtttataaagttcatatataccctagttaaagcacttaagaaaatatggcatgtttgacttttagttcctagagagtttttgtttttgtttttgtttttttttgagacggagtcttgctatgtctcccaggctggagggcagtggcatgatctcggctcactacaacttccacctcccgggttcaagcaattctcctgcctcagcctccagagtagctgggattacaggcgcccaccaccacacccggcagatttttgtatttttggtagagacgcggtttcatcatgtttggccaggctggtctcgaactcctgacctcaggtgatccgcctgccttggcctcccaaagtgttgggattacaggcatgagccactgcgcctggccagctagagagtttttaaagcagagctgagcacacactggatgcgtttgaatgtgtttgtgtagtttgttgtgaaattgttacatttagcaggcagatccagaagcactagtgaactgtcatcttggtggggttggcttaaatttaattgactgtttagattccatttcttaattgattggccagtatgaaaagatgccagtgcaagtaaccatagtatcaaaaaagttaaaaattattcaaagctatagtttatacatcaggtactgccatttactgtaaaccacctgcaagaaagtcaggaacaactaaattcacaagaactgtcctgctaagaagtgtattaaagatttccattttgttttactaattgggaacatcttaatgtttaatatttaaactattggtatcatttttctaatgtataatttgtattactgggatcaagtatgtacagtggtgatgctagtagaagtttaagccttggaaataccactttcatattttcagatgtcatggatttaatgagtaatttatgtttttaaaattcagaatagttaatctctgatctaaaaccatcaatctatgttttttacggtaatcatgtaaatatttcagtaatataaactgtttgaaaaggctgctgcaggtaaactctatactaggatcttggccaaataatttacaattcacagaatattttatttaaggtggtgctttttttttttgtccttaaaacttgatttttcttaactttattcatgatgccaaagtaaatgaggaaaaaaactcaaaaccagttgagtatcattgcagacaaaactaccagtagtccatattgtttaatattaagttgaataaaataaattttatttcagtcagagcctaaatcacattttgattgtctgaatttttgatactatttttaaaatcatgctagtggcggctgggcgtggtagctcacgcctgtaatcccagcattttgggaggccgaagtgggtggatcacgaggtcgggagttcgagaccagcttggccaaaatggtgaaaccccatctgtactaaaaactacaaaaattagctgggcgcggtggcaggtgcctgtaatcccagctacctgggagtctgaggcaggagaattgcttgaaccctggcgacagaggatgcagtgagccaagatggtgccactgtactccagactgggcgacagagtgagactctgtctc

SEQ ID NO: 376 - DNA, 6938 bp, Homo sapiens
  source 1..6938: mol_type = genomic DNA
gagaggggcagggggcggagctggagggggtggttcggcgtgggggccgttggctccagacaaataaacatggagtccatcttccacgagaaacaagaaggctcactttgtgctcaacattgcctgaataacttattgcaaggagaatattttagccctgtggaattatcctcaattgcacatcagctggatgaggaggagaggatgagaatggcagaaggaggagttactagtgaagattatcgcacgtttttacagcagccttctggaaatatggatgacagtggttttttctctattcaggttataagcaatgccttgaaagtttggggtttagaactaatcctgttcaacagtccagagtatcagaggctcaggatcgatcctataaatgaaagatcatttatatgcaattataaggaacactggtttacagttagaaaattaggaaaacagtggtttaacttgaattctctcttgacgggtccagaattaatatcagatacatatcttgcacttttcttggctcaattacaacaggaaggttattctatatttgtcgttaagggtgatctgccagattgcgaagctgaccaactcctgcagatgattagggtccaacagatgcatcgaccaaaacttattggagaagaattagcacaactaaaagagcaaagagtccataaaacagacctggaacgagtgttagaagcaaatgatggctcaggaatgttagacgaagatgaggaggatttgcagagggctctggcactaagtcgccaagaaattgacatggaagatgaggaagcagatctccgcagggctattcagctaagtatgcaaggtagttccagaaacatatctcaagatatgacacagacatcaggtacaaatcttacttcagaagagcttcggaagagacgagaagcctactttgaaaatgactactttgattcacagcagcaaaagcagcaacagcagcagcagcagcagcagcagggggacctatcaggacagagttcacatccatgtgaaaggccagccaccagttcaggagcacttgggagtgatctaggtgatgctatgagtgaagaagacatgcttcaggcagctgtgaccatgtctttagaaactgtcagaaatgatttgaaaacagaaggaaaaaaataatacctttaaaaaataatttagatattcatactttccaacattatcctgtgtgattacagcatagggtccactttggtaatgtgtcaaagagatgaggaaataagacttttagcggtttgcaaacaaaatgatgggaaagtggaacaatgcgtcggttgtaggactaaataatgatcttccaaatattagccaaagaggcattcagcaattaaagacatttaaaatagttttctaaatgtttctttttcttttttgagtgtgcaatatgtaacatgtctaaagttagggcatttttcttggatctttttgcagactagctaattagctctcgcctcaggctttttccatatagtttgttttctttttctgtcttgtaggtaagttggctcacatcatgtaatagtggctttcatttcttattaaccaaattaacctttcaggaaagtatctctactttcctgatgttgataatagtaatggttctagaaggatgaacagttctcccttcaactgtataccgtgtgctccagtgttttcttgtgttgttttctctgatcacaacttttctgctacctggttttcattattttcccacaattcttttgaaagatggtaatcttttctgaggtttagcgttttaagccctacgatgggatcattatttcatgactggtgcgttcctaaactctgaaatcagccttgcacaagtacttgagaataaatgagcattttttaaaatgtgtgagcatgtgctttcccagatgctttatgaatgtcttttcacttatatcaaaaccttacagctttgttgcaaccccttcttcctgcgccttattttttcctttcttctccaattgagaaaactaggagaagcatagtatgcaggcaagtctccttctgttagaagactaaacatacgtacccaccatgaatgtatgatacatgaaatttggccttcaattttaatagcagttttattttattttttctcctatgactggagctttgtgttctctttacagttgagtcatggaatgtaggtgtctgcttcacatcttttagtaggtatagcttgtcaaagatggtgatctggaacatgaaaataatttactaatgaaaatatgtttaaatttatactgtgatttgacacttgcatcatgtttagatagcttaagaacaatggaagtcacagtacttagtggatctataaataagaaagtccatagttttgataaatattctctttaattgagatgtacagagagtttcttgctgggtcaataggatagtatcattttggtgaaaaccatgtctctgaaattgatgttttagtttcagtgttccctatccctcattctccatctccttttgaagctcttttgaatgttgaattgttcataagctaaaatccaagaaatttcagctgacaacttcgaaaattataatatggtatattgccctcctggtgtgtggctgcacacattttatcagggaaagttttttgatctaggatttattgctaactaactgaaaagagaagaaaaaatatcttttatttatgattataaaatagctttttcttcgatataacagattttttaagtcattattttgtgccaatcagttttctgaagtttcccttacacaaaaggatagctttattttaaaatctaaagtttcttttaatagttaaaaatgtttcagaagaattataaaactttaaaactgcaagggatgttggagtttagtactactccctcaagatttaaaaagctaaatattttaagactgaacatttatgttaattattaccagtgtgtttgtcatattttccatggatatttgttcattacctttttccattgaaaagttacattaaacttttcatacacttgaattgatgagctacctaatataaaaatgagaaaaccaatatgcattttaaagttttaactttagagtttataaagttcatatataccctagttaaagcacttaagaaaatatggcatgtttgacttttagttcctagagagtttttgtttttgtttttgtttttttttgagacggagtcttgctatgtctcccaggctggagggcagtggcatgatctcggctcactacaacttccacctcccgggttcaagcaattctcctgcctcagcctccagagtagctgggattacaggcgcccaccaccacacccggcagatttttgtatttttggtagagacgcggtttcatcatgtttggccaggctggtctcgaactcctgacctcaggtgatccgcctgccttggcctcccaaagtgttgggattacaggcatgagccactgcgcctggccagctagagagtttttaaagcagagctgagcacacactggatgcgtttgaatgtgtttgtgtagtttgttgtgaaattgttacatttagcaggcagatccagaagcactagtgaactgtcatcttggtggggttggcttaaatttaattgactgtttagattccatttcttaattgattggccagtatgaaaagatgccagtgcaagtaaccatagtatcaaaaaagttaaaaattattcaaagctatagtttatacatcaggtactgccatttactgtaaaccacctgcaagaaagtcaggaacaactaaattcacaagaactgtcctgctaagaagtgtattaaagatttccattttgttttactaattgggaacatcttaatgtttaatatttaaactattggtatcatttttctaatgtataatttgtattactgggatcaagtatgtacagtggtgatgctagtagaagtttaagccttggaaataccactttcatattttcagatgtcatggatttaatgagtaatttatgtttttaaaattcagaatagttaatctctgatctaaaaccatcaatctatgttttttacggtaatcatgtaaatatttcagtaatataaactgtttgaaaaggctgctgcaggtaaactctatactaggatcttggccaaataatttacaattcacagaatattttatttaaggtggtgctttttttttttgtccttaaaacttgatttttcttaactttattcatgatgccaaagtaaatgaggaaaaaaactcaaaaccagttgagtatcattgcagacaaaactaccagtagtccatattgtttaatattaagttgaataaaataaattttatttcagtcagagcctaaatcacattttgattgtctgaatttttgatactatttttaaaatcatgctagtggcggctgggcgtggtagctcacgcctgtaatcccagcattttgggaggccgaagtgggtggatcacgaggtcgggagttcgagaccagcttggccaaaatggtgaaaccccatctgtactaaaaactacaaaaattagctgggcgcggtggcaggtgcctgtaatcccagctacctgggagtctgaggcaggagaattgcttgaaccctggcgacagaggatgcagtgagccaagatggtgccactgtactccagactgggcgacagagtgagactctgtctcaaaaaaaaaaaaaaaatcatgctagtgccaagagctactaaattcttaaaaccggcccattggacctgtacagataaaaaatagattcagtgcataatcaaaatatgataattttaaaatcttaagtagaaaaataaatcttgatgttttaaattcttacgaggattcaatagttaatattgatgatctcccggctgggtgcagtggctcacgcctgtaatcccagcagttctggaggctgaggtgggcgaatcacttcaggccaggagttcaagaccagtctgggcaacatggtgaaacctcgtttctactaaaaatacaaaaattagccgggcgtggttgcacacacttgtaatcccagctactcaggaggctaagaatcgcatgagcctaggaggcagaggttgcagagtgccaagggctcaccactgcattccagcctgcccaacagagtgagacactgtttctgaaaaaaaaaaatatatatatatatatatatatgtgtgtatatatatatgtatatatatatgacttcctattaaaaactttatcccagtcgggggcagtggctcacgcctgtaatcccaacactttgggaggctgaggcaggtggatcacctgaagtccggagtttgagaccagcctggccaacatggtgaaaccccatctctactaaaaatacaaaacttaagccaggtatggtggcgggcacctgtaatcccagttacttgggaggctgaggcaggagaatcgtttaaacccaggaggtggaggttgcagtgagctgagatcgtgccattgcactctagcctgggcaacaagagtaaaactccatcttaaaggtttgtttgtttttttttaatccggaaacgaagaggcgttgggccgctattttctttttctttctttctttctttctttttttttttttctgagacggagtctagctctgctgcccaggctggagtacaatgacacgatgttggctcactgcaacctccacctcctgggttcaagcgattctcctgcctcagcctcccaagtacctgggattacaggcacctgccactacacctggcgaatatttgttttttttagtagagacgggcttttaccatgttaggctggtctcaaactcctgacctcaggtgatctgcctgccttggcctcccaaagtgctgggattacaggtgcaggccaccacacccggccttgggccactgttttcaaagtgaattgtttgttgtatcgagtccttaagtatggatatatatgtgaccctaattaagaactaccagattggatcaactaatcatgtcagcaatgtaaataactttatttttcatattcaaaataaaaactttcttttatttctggcccctttataaccagcatctttttgctttaaaaaatgacctggctttgtatttttttagtcttaaacataataaaaatatttttgttctaatttgctttcatgagtgaagattattgacatcgttggtaaattctagaattttgattttgttttttaatttgaagaaaatctttgctattattattttttccaagtggtctggcattttaagaattagtgctaataacgtaacttctaaatttgtcgtaattggcatgtttaatagcatatcaaaaaacattttaagcctgtggattcatagacaaagcaatgagaaacattagtaaaatataaatggatattcctgatgcatttaggaagctctcaattgtctcttgcatagttcaaggaatgttttctgaatttttttaatgctttttttttttttgaaagaggaaaacatacatttttaaatgtgattatctaatttttacaacactgggctattaggaataactttttaaaaattactgttctgtataaatatttgaaattcaagtacagaaaatatctgaaacaaaaagcattgttgtttggccatgatacaagtgcactgtggcagtgccgcttgctcaggacccagccctgcagcccttctgtgtgtgctccctcgttaagttcatttgctgttattacacacacaggccttcctgtctggtcgttagaaaagccgggcttccaaagcactgttgaacacaggattctgttgttagtgtggatgttcaatgagttgtattttaaatatcaaagattattaaataaagataatgtttgcttttcta

SEQ ID NO: 377 - DNA, 6902 bp, Homo sapiens
  source 1..6902: mol_type = genomic DNA
gagaggggcagggggcggagctggagggggtggttcggcgtgggggccgttggctccagacaaataaacatggagtccatcttccacgagaaacaagaaggctcactttgtgctcaacattgcctgaataacttattgcaaggagaatattttagccctgtggaattatcctcaattgcacatcagctggatgaggaggagaggatgagaatggcagaaggaggagttactagtgaagattatcgcacgtttttacaggttataagcaatgccttgaaagtttggggtttagaactaatcctgttcaacagtccagagtatcagaggctcaggatcgatcctataaatgaaagatcatttatatgcaattataaggaacactggtttacagttagaaaattaggaaaacagtggtttaacttgaattctctcttgacgggtccagaattaatatcagatacatatcttgcacttttcttggctcaattacaacaggaaggttattctatatttgtcgttaagggtgatctgccagattgcgaagctgaccaactcctgcagatgattagggtccaacagatgcatcgaccaaaacttattggagaagaattagcacaactaaaagagcaaagagtccataaaacagacctggaacgagtgttagaagcaaatgatggctcaggaatgttagacgaagatgaggaggatttgcagagggctctggcactaagtcgccaagaaattgacatggaagatgaggaagcagatctccgcagggctattcagctaagtatgcaaggtagttccagaaacatatctcaagatatgacacagacatcaggtacaaatcttacttcagaagagcttcggaagagacgagaagcctactttgaaaaggatcagcacttccatattttaaaacagcagcaaaagcagcaacagcagcagcagcagcagcagcagggggacctatcaggacagagttcacatccatgtgaaaggccagccaccagttcaggagcacttgggagtgatctaggtgatgctatgagtgaagaagacatgcttcaggcagctgtgaccatgtctttagaaactgtcagaaatgatttgaaaacagaaggaaaaaaataatacctttaaaaaataatttagatattcatactttccaacattatcctgtgtgattacagcatagggtccactttggtaatgtgtcaaagagatgaggaaataagacttttagcggtttgcaaacaaaatgatgggaaagtggaacaatgcgtcggttgtaggactaaataatgatcttccaaatattagccaaagaggcattcagcaattaaagacatttaaaatagttttctaaatgtttctttttcttttttgagtgtgcaatatgtaacatgtctaaagttagggcatttttcttggatctttttgcagactagctaattagctctcgcctcaggctttttccatatagtttgttttctttttctgtcttgtaggtaagttggctcacatcatgtaatagtggctttcatttcttattaaccaaattaacctttcaggaaagtatctctactttcctgatgttgataatagtaatggttctagaaggatgaacagttctcccttcaactgtataccgtgtgctccagtgttttcttgtgttgttttctctgatcacaacttttctgctacctggttttcattattttcccacaattcttttgaaagatggtaatcttttctgaggtttagcgttttaagccctacgatgggatcattatttcatgactggtgcgttcctaaactctgaaatcagccttgcacaagtacttgagaataaatgagcattttttaaaatgtgtgagcatgtgctttcccagatgctttatgaatgtcttttcacttatatcaaaaccttacagctttgttgcaaccccttcttcctgcgccttattttttcctttcttctccaattgagaaaactaggagaagcatagtatgcaggcaagtctccttctgttagaagactaaacatacgtacccaccatgaatgtatgatacatgaaatttggccttcaattttaatagcagttttattttattttttctcctatgactggagctttgtgttctctttacagttgagtcatggaatgtaggtgtctgcttcacatcttttagtaggtatagcttgtcaaagatggtgatctggaacatgaaaataatttactaatgaaaatatgtttaaatttatactgtgatttgacacttgcatcatgtttagatagcttaagaacaatggaagtcacagtacttagtggatctataaataagaaagtccatagttttgataaatattctctttaattgagatgtacagagagtttcttgctgggtcaataggatagtatcattttggtgaaaaccatgtctctgaaattgatgttttagtttcagtgttccctatccctcattctccatctccttttgaagctcttttgaatgttgaattgttcataagctaaaatccaagaaatttcagctgacaacttcgaaaattataatatggtatattgccctcctggtgtgtggctgcacacattttatcagggaaagttttttgatctaggatttattgctaactaactgaaaagagaagaaaaaatatcttttatttatgattataaaatagctttttcttcgatataacagattttttaagtcattattttgtgccaatcagttttctgaagtttcccttacacaaaaggatagctttattttaaaatctaaagtttcttttaatagttaaaaatgtttcagaagaattataaaactttaaaactgcaagggatgttggagtttagtactactccctcaagatttaaaaagctaaatattttaagactgaacatttatgttaattattaccagtgtgtttgtcatattttccatggatatttgttcattacctttttccattgaaaagttacattaaacttttcatacacttgaattgatgagctacctaatataaaaatgagaaaaccaatatgcattttaaagttttaactttagagtttataaagttcatatataccctagttaaagcacttaagaaaatatggcatgtttgacttttagttcctagagagtttttgtttttgtttttgtttttttttgagacggagtcttgctatgtctcccaggctggagggcagtggcatgatctcggctcactacaacttccacctcccgggttcaagcaattctcctgcctcagcctccagagtagctgggattacaggcgcccaccaccacacccggcagatttttgtatttttggtagagacgcggtttcatcatgtttggccaggctggtctcgaactcctgacctcaggtgatccgcctgccttggcctcccaaagtgttgggattacaggcatgagccactgcgcctggccagctagagagtttttaaagcagagctgagcacacactggatgcgtttgaatgtgtttgtgtagtttgttgtgaaattgttacatttagcaggcagatccagaagcactagtgaactgtcatcttggtggggttggcttaaatttaattgactgtttagattccatttcttaattgattggccagtatgaaaagatgccagtgcaagtaaccatagtatcaaaaaagttaaaaattattcaaagctatagtttatacatcaggtactgccatttactgtaaaccacctgcaagaaagtcaggaacaactaaattcacaagaactgtcctgctaagaagtgtattaaagatttccattttgttttactaattgggaacatcttaatgtttaatatttaaactattggtatcatttttctaatgtataatttgtattactgggatcaagtatgtacagtggtgatgctagtagaagtttaagccttggaaataccactttcatattttcagatgtcatggatttaatgagtaatttatgtttttaaaattcagaatagttaatctctgatctaaaaccatcaatctatgttttttacggtaatcatgtaaatatttcagtaatataaactgtttgaaaaggctgctgcaggtaaactctatactaggatcttggccaaataatttacaattcacagaatattttatttaaggtggtgctttttttttttgtccttaaaacttgatttttcttaactttattcatgatgccaaagtaaatgaggaaaaaaactcaaaaccagttgagtatcattgcagacaaaactaccagtagtccatattgtttaatattaagttgaataaaataaattttatttcagtcagagcctaaatcacattttgattgtctgaatttttgatactatttttaaaatcatgctagtggcggctgggcgtggtagctcacgcctgtaatcccagcattttgggaggccgaagtgggtggatcacgaggtcgggagttcgagaccagcttggccaaaatggtgaaaccccatctgtactaaaaactacaaaaattagctgggcgcggtggcaggtgcctgtaatcccagctacctgggagtctgaggcaggagaattgcttgaaccctggcgacagaggatgcagtgagccaagatggtgccactgtactccagactgggcgacagagtgagactctgtctcaaaaaaaaaaaaaaaatcatgctagtgccaagagctactaaattcttaaaaccggcccattggacctgtacagataaaaaatagattcagtgcataatcaaaatatgataattttaaaatcttaagtagaaaaataaatcttgatgttttaaattcttacgaggattcaatagttaatattgatgatctcccggctgggtgcagtggctcacgcctgtaatcccagcagttctggaggctgaggtgggcgaatcacttcaggccaggagttcaagaccagtctgggcaacatggtgaaacctcgtttctactaaaaatacaaaaattagccgggcgtggttgcacacacttgtaatcccagctactcaggaggctaagaatcgcatgagcctaggaggcagaggttgcagagtgccaagggctcaccactgcattccagcctgcccaacagagtgagacactgtttctgaaaaaaaaaaatatatatatatatatatatatgtgtgtatatatatatgtatatatatatgacttcctattaaaaactttatcccagtcgggggcagtggctcacgcctgtaatcccaacactttgggaggctgaggcaggtggatcacctgaagtccggagtttgagaccagcctggccaacatggtgaaaccccatctctactaaaaatacaaaacttaagccaggtatggtggcgggcacctgtaatcccagttacttgggaggctgaggcaggagaatcgtttaaacccaggaggtggaggttgcagtgagctgagatcgtgccattgcactctagcctgggcaacaagagtaaaactccatcttaaaggtttgtttgtttttttttaatccggaaacgaagaggcgttgggccgctattttctttttctttctttctttctttctttttttttttttctgagacggagtctagctctgctgcccaggctggagtacaatgacacgatgttggctcactgcaacctccacctcctgggttcaagcgattctcctgcctcagcctcccaagtacctgggattacaggcacctgccactacacctggcgaatatttgttttttttagtagagacgggcttttaccatgttaggctggtctcaaactcctgacctcaggtgatctgcctgccttggcctcccaaagtgctgggattacaggtgcaggccaccacacccggccttgggccactgttttcaaagtgaattgtttgttgtatcgagtccttaagtatggatatatatgtgaccctaattaagaactaccagattggatcaactaatcatgtcagcaatgtaaataactttatttttcatattcaaaataaaaactttcttttatttctggcccctttataaccagcatctttttgctttaaaaaatgacctggctttgtatttttttagtcttaaacataataaaaatatttttgttctaatttgctttcatgagtgaagattattgacatcgttggtaaattctagaattttgattttgttttttaatttgaagaaaatctttgctattattattttttccaagtggtctggcattttaagaattagtgctaataacgtaacttctaaatttgtcgtaattggcatgtttaatagcatatcaaaaaacattttaagcctgtggattcatagacaaagcaatgagaaacattagtaaaatataaatggatattcctgatgcatttaggaagctctcaattgtctcttgcatagttcaaggaatgttttctgaatttttttaatgctttttttttttttgaaagaggaaaacatacatttttaaatgtgattatctaatttttacaacactgggctattaggaataactttttaaaaattactgttctgtataaatatttgaaattcaagtacagaaaatatctgaaacaaaaagcattgttgtttggccatgatacaagtgcactgtggcagtgccgcttgctcaggacccagccctgcagcccttctgtgtgtgctccctcgttaagttcatttgctgttattacacacacaggccttcctgtctggtcgttagaaaagccgggcttccaaagcactgttgaacacaggattctgttgttagtgtggatgttcaatgagttgtattttaaatatcaaagattattaaataaagataatgtttgcttttcta

SEQ ID NO: 378 - DNA, 6950 bp, Homo sapiens
  source 1..6950: mol_type = genomic DNA
gagaggggcagggggcggagctggagggggtggttcggcgtgggggccgttggctccagacaaataaacatggagtccatcttccacgagaaacaagaaggctcactttgtgctcaacattgcctgaataacttattgcaaggagaatattttagccctgtggaattatcctcaattgcacatcagctggatgaggaggagaggatgagaatggcagaaggaggagttactagtgaagattatcgcacgtttttacagcagccttctggaaatatggatgacagtggttttttctctattcaggttataagcaatgccttgaaagtttggggtttagaactaatcctgttcaacagtccagagtatcagaggctcaggatcgatcctataaatgaaagatcatttatatgcaattataaggaacactggtttacagttagaaaattaggaaaacagtggtttaacttgaattctctcttgacgggtccagaattaatatcagatacatatcttgcacttttcttggctcaattacaacaggaaggttattctatatttgtcgttaagggtgatctgccagattgcgaagctgaccaactcctgcagatgattagggtccaacagatgcatcgaccaaaacttattggagaagaattagcacaactaaaagagcaaagagtccataaaacagacctggaacgagtgttagaagcaaatgatggctcaggaatgttagacgaagatgaggaggatttgcagagggctctggcactaagtcgccaagaaattgacatggaagatgaggaagcagatctccgcagggctattcagctaagtatgcaaggtagttccagaaacatatctcaagatatgacacagacatcaggtacaaatcttacttcagaagagcttcggaagagacgagaagcctactttgaaaagacagagtctcgctctgtcgcccaggcacagcagcaaaagcagcaacagcagcagcagcagcagcagcagggggacctatcaggacagagttcacatccatgtgaaaggccagccaccagttcaggagcacttgggagtgatctaggtgatgctatgagtgaagaagacatgcttcaggcagctgtgaccatgtctttagaaactgtcagaaatgatttgaaaacagaaggaaaaaaataatacctttaaaaaataatttagatattcatactttccaacattatcctgtgtgattacagcatagggtccactttggtaatgtgtcaaagagatgaggaaataagacttttagcggtttgcaaacaaaatgatgggaaagtggaacaatgcgtcggttgtaggactaaataatgatcttccaaatattagccaaagaggcattcagcaattaaagacatttaaaatagttttctaaatgtttctttttcttttttgagtgtgcaatatgtaacatgtctaaagttagggcatttttcttggatctttttgcagactagctaattagctctcgcctcaggctttttccatatagtttgttttctttttctgtcttgtaggtaagttggctcacatcatgtaatagtggctttcatttcttattaaccaaattaacctttcaggaaagtatctctactttcctgatgttgataatagtaatggttctagaaggatgaacagttctcccttcaactgtataccgtgtgctccagtgttttcttgtgttgttttctctgatcacaacttttctgctacctggttttcattattttcccacaattcttttgaaagatggtaatcttttctgaggtttagcgttttaagccctacgatgggatcattatttcatgactggtgcgttcctaaactctgaaatcagccttgcacaagtacttgagaataaatgagcattttttaaaatgtgtgagcatgtgctttcccagatgctttatgaatgtcttttcacttatatcaaaaccttacagctttgttgcaaccccttcttcctgcgccttattttttcctttcttctccaattgagaaaactaggagaagcatagtatgcaggcaagtctccttctgttagaagactaaacatacgtacccaccatgaatgtatgatacatgaaatttggccttcaattttaatagcagttttattttattttttctcctatgactggagctttgtgttctctttacagttgagtcatggaatgtaggtgtctgcttcacatcttttagtaggtatagcttgtcaaagatggtgatctggaacatgaaaataatttactaatgaaaatatgtttaaatttatactgtgatttgacacttgcatcatgtttagatagcttaagaacaatggaagtcacagtacttagtggatctataaataagaaagtccatagttttgataaatattctctttaattgagatgtacagagagtttcttgctgggtcaataggatagtatcattttggtgaaaaccatgtctctgaaattgatgttttagtttcagtgttccctatccctcattctccatctccttttgaagctcttttgaatgttgaattgttcataagctaaaatccaagaaatttcagctgacaacttcgaaaattataatatggtatattgccctcctggtgtgtggctgcacacattttatcagggaaagttttttgatctaggatttattgctaactaactgaaaagagaagaaaaaatatcttttatttatgattataaaatagctttttcttcgatataacagattttttaagtcattattttgtgccaatcagttttctgaagtttcccttacacaaaaggatagctttattttaaaatctaaagtttcttttaatagttaaaaatgtttcagaagaattataaaactttaaaactgcaagggatgttggagtttagtactactccctcaagatttaaaaagctaaatattttaagactgaacatttatgttaattattaccagtgtgtttgtcatattttccatggatatttgttcattacctttttccattgaaaagttacattaaacttttcatacacttgaattgatgagctacctaatataaaaatgagaaaaccaatatgcattttaaagttttaactttagagtttataaagttcatatataccctagttaaagcacttaagaaaatatggcatgtttgacttttagttcctagagagtttttgtttttgtttttgtttttttttgagacggagtcttgctatgtctcccaggctggagggcagtggcatgatctcggctcactacaacttccacctcccgggttcaagcaattctcctgcctcagcctccagagtagctgggattacaggcgcccaccaccacacccggcagatttttgtatttttggtagagacgcggtttcatcatgtttggccaggctggtctcgaactcctgacctcaggtgatccgcctgccttggcctcccaaagtgttgggattacaggcatgagccactgcgcctggccagctagagagtttttaaagcagagctgagcacacactggatgcgtttgaatgtgtttgtgtagtttgttgtgaaattgttacatttagcaggcagatccagaagcactagtgaactgtcatcttggtggggttggcttaaatttaattgactgtttagattccatttcttaattgattggccagtatgaaaagatgccagtgcaagtaaccatagtatcaaaaaagttaaaaattattcaaagctatagtttatacatcaggtactgccatttactgtaaaccacctgcaagaaagtcaggaacaactaaattcacaagaactgtcctgctaagaagtgtattaaagatttccattttgttttactaattgggaacatcttaatgtttaatatttaaactattggtatcatttttctaatgtataatttgtattactgggatcaagtatgtacagtggtgatgctagtagaagtttaagccttggaaataccactttcatattttcagatgtcatggatttaatgagtaatttatgtttttaaaattcagaatagttaatctctgatctaaaaccatcaatctatgttttttacggtaatcatgtaaatatttcagtaatataaactgtttgaaaaggctgctgcaggtaaactctatactaggatcttggccaaataatttacaattcacagaatattttatttaaggtggtgctttttttttttgtccttaaaacttgatttttcttaactttattcatgatgccaaagtaaatgaggaaaaaaactcaaaaccagttgagtatcattgcagacaaaactaccagtagtccatattgtttaatattaagttgaataaaataaattttatttcagtcagagcctaaatcacattttgattgtctgaatttttgatactatttttaaaatcatgctagtggcggctgggcgtggtagctcacgcctgtaatcccagcattttgggaggccgaagtgggtggatcacgaggtcgggagttcgagaccagcttggccaaaatggtgaaaccccatctgtactaaaaactacaaaaattagctgggcgcggtggcaggtgcctgtaatcccagctacctgggagtctgaggcaggagaattgcttgaaccctggcgacagaggatgcagtgagccaagatggtgccactgtactccagactgggcgacagagtgagactctgtctcaaaaaaaaaaaaaaaatcatgctagtgccaagagctactaaattcttaaaaccggcccattggacctgtacagataaaaaatagattcagtgcataatcaaaatatgataattttaaaatcttaagtagaaaaataaatcttgatgttttaaattcttacgaggattcaatagttaatattgatgatctcccggctgggtgcagtggctcacgcctgtaatcccagcagttctggaggctgaggtgggcgaatcacttcaggccaggagttcaagaccagtctgggcaacatggtgaaacctcgtttctactaaaaatacaaaaattagccgggcgtggttgcacacacttgtaatcccagctactcaggaggctaagaatcgcatgagcctaggaggcagaggttgcagagtgccaagggctcaccactgcattccagcctgcccaacagagtgagacactgtttctgaaaaaaaaaaatatatatatatatatatatatgtgtgtatatatatatgtatatatatatgacttcctattaaaaactttatcccagtcgggggcagtggctcacgcctgtaatcccaacactttgggaggctgaggcaggtggatcacctgaagtccggagtttgagaccagcctggccaacatggtgaaaccccatctctactaaaaatacaaaacttaagccaggtatggtggcgggcacctgtaatcccagttacttgggaggctgaggcaggagaatcgtttaaacccaggaggtggaggttgcagtgagctgagatcgtgccattgcactctagcctgggcaacaagagtaaaactccatcttaaaggtttgtttgtttttttttaatccggaaacgaagaggcgttgggccgctattttctttttctttctttctttctttctttttttttttttctgagacggagtctagctctgctgcccaggctggagtacaatgacacgatgttggctcactgcaacctccacctcctgggttcaagcgattctcctgcctcagcctcccaagtacctgggattacaggcacctgccactacacctggcgaatatttgttttttttagtagagacgggcttttaccatgttaggctggtctcaaactcctgacctcaggtgatctgcctgccttggcctcccaaagtgctgggattacaggtgcaggccaccacacccggccttgggccactgttttcaaagtgaattgtttgttgtatcgagtccttaagtatggatatatatgtgaccctaattaagaactaccagattggatcaactaatcatgtcagcaatgtaaataactttatttttcatattcaaaataaaaactttcttttatttctggcccctttataaccagcatctttttgctttaaaaaatgacctggctttgtatttttttagtcttaaacataataaaaatatttttgttctaatttgctttcatgagtgaagattattgacatcgttggtaaattctagaattttgattttgttttttaatttgaagaaaatctttgctattattattttttccaagtggtctggcattttaagaattagtgctaataacgtaacttctaaatttgtcgtaattggcatgtttaatagcatatcaaaaaacattttaagcctgtggattcatagacaaagcaatgagaaacattagtaaaatataaatggatattcctgatgcatttaggaagctctcaattgtctcttgcatagttcaaggaatgttttctgaatttttttaatgctttttttttttttgaaagaggaaaacatacatttttaaatgtgattatctaatttttacaacactgggctattaggaataactttttaaaaattactgttctgtataaatatttgaaattcaagtacagaaaatatctgaaacaaaaagcattgttgtttggccatgatacaagtgcactgtggcagtgccgcttgctcaggacccagccctgcagcccttctgtgtgtgctccctcgttaagttcatttgctgttattacacacacaggccttcctgtctggtcgttagaaaagccgggcttccaaagcactgttgaacacaggattctgttgttagtgtggatgttcaatgagttgtattttaaatatcaaagattattaaataaagataatgtttgcttttcta

SEQ ID NO: 379 - DNA, 1315 bp, Homo sapiens
  source 1..1315: mol_type = genomic DNA
tggagggggtggttcggcgtgggggccgttggctccagacaaataaacatggagtccatcttccacgagaaacaagaaggctcactttgtgctcaacattgcctgaataacttattgcaaggagaatattttagccctgtggaattatcctcaattgcacatcagctggatgaggaggagaggatgagaatggcagaaggaggagttactagtgaagattatcgcacgtttttacaggttataagcaatgccttgaaagtttggggtttagaactaatcctgttcaacagtccagagtatcagaggctcaggatcgatcctataaatgaaagatcatttatatgcaattataaggaacactggtttacagttagaaaattaggaaaacagtggtttaacttgaattctctcttgacgggtccagaattaatatcagatacatatcttgcacttttcttggctcaattacaacaggaaggttattctatatttgtcgttaagggtgatctgccagattgcgaagctgaccaactcctgcagatgattagggtccaacagatgcatcgaccaaaacttattggagaagaattagcacaactaaaagagcaaagagtccataaaacagacctggaacgagtgttagaagcaaatgatggctcaggaatgttagacgaagatgaggaggatttgcagagggctctggcactaagtcgccaagaaattgacatggaagatgaggaagcagatctccgcagggctattcagctaagtatgcaaggtagttccagaaacatatctcaagatatgacacagacatcaggtacaaatcttacttcagaagagcttcggaagagacgagaagcctactttgaaaaacagcagcaaaagcagcaacagcagcagcagcagcagcagcagggggacctatcaggacagagttcacatccatgtgaaaggccagccaccagttcaggagcacttgggagtgatctaggtgatgctatgagtgaagaagacatgcttcaggcagctgtgaccatgtctttagaaactgtcagaaatgatttgaaaacagaaggaaaaaaataatacctttaaaaaataatttagatattcatactttccaacattatcctgtgtgattacagcatagggtccactttggtaatgtgtcaaagagatgaggaaataagacttttagcggtttgcaaacaaaatgatgggaaagtggaacaatgcgtcggttgtaggactaaataatgatcttccaaatattagccaaagaggcattcagcaattaaagacatttaaaata

SEQ ID NO: 380 - DNA, 1191 bp, Homo sapiens
  source 1..1191: mol_type = genomic DNA
acaaataaacatggagtccatcttccacgagaaacaagaaggctcactttgtgctcaacattgcctgaataacttattgcaaggagaatattttagccctgtggaattatcctcaattgcacatcagctggatgaggaggagaggatgagaatggcagaaggaggagttactagtgaagattatcgcacgtttttacagcagccttctggaaatatggatgacagtggttttttctctattcaggttataagcaatgccttgaaagtttggggtttagaactaatcctgttcaacagtccagagtatcagaggctcaggatcgatcctataaatgaaagatcatttatatgcaattataaggaacactggtttacagttagaaaattaggaaaacagtggtttaacttgaattctctcttgacgggtccagaattaatatcagatacatatcttgcacttttcttggctcaattacaacaggaaggttattctatatttgtcgttaagggtgatctgccagattgcgaagctgaccaactcctgcagatgattagggtccaacagatgcatcgaccaaaacttattggagaagaattagcacaactaaaagagcaaagagtccataaaacagacctggaacgagtgttagaagcaaatgatggctcaggaatgttagacgaagatgaggaggatttgcagagggctctggcactaagtcgccaagaaattgacatggaagatgaggaagcagatctccgcagggctattcagctaagtatgcaaggtagttccagaaacatatctcaagatatgacacagacatcaggtacaaatcttacttcagaagagcttcggaagagacgagaagcctactttgaaaaacagcagcaaaagcagcaacagcagcagcagcagcagcagcagggggacctatcaggacagagttcacatccatgtgaaaggccagccaccagttcaggagcacttgggagtgatctaggtaaggcctgctcaccattcatcatgttcgctaccttcacactttatctgacatacgagctccatgtgatttttgctttacattattcttcattccctctttaatcatattaagaatcttaagtaaatttgtaatctactaaatttccctggattaaggagcagttaccaaaagaaaaaaaaaaaaaaaa

SEQ ID NO: 381 - DNA, 6956 bp, Homo sapiens
  source 1..6956: mol_type = genomic DNA
gagaggggcagggggcggagctggagggggtggttcggcgtgggggccgttggctccagacaaataaacatggagtccatcttccacgagaaacaagaaggctcactttgtgctcaacattgcctgaataacttattgcaaggagaatattttagccctgtggaattatcctcaattgcacatcagctggatgaggaggagaggatgagaatggcagaaggaggagttactagtgaagattatcgcacgtttttacagcagccttctggaaatatggatgacagtggttttttctctattcaggttataagcaatgccttgaaagtttggggtttagaactaatcctgttcaacagtccagagtatcagaggctcaggatcgatcctataaatgaaagatcatttatatgcaattataaggaacactggtttacagttagaaaattaggaaaacagtggtttaacttgaattctctcttgacgggtccagaattaatatcagatacatatcttgcacttttcttggctcaattacaacaggaaggttattctatatttgtcgttaagggtgatctgccagattgcgaagctgaccaactcctgcagatgattagggtccaacagatgcatcgaccaaaacttattggagaagaattagcacaactaaaagagcaaagagtccataaaacagacctggaacgagtgttagaagcaaatgatggctcaggaatgttagacgaagatgaggaggatttgcagagggctctggcactaagtcgccaagaaattgacatggaagatgaggaagcagatctccgcagggctattcagctaagtatgcaaggtagttccagaaacatatctcaagatatgacacagacatcaggtacaaatcttacttcagaagagcttcggaagagacgagaagcctactttgaaaagtttgggaggccaaggcgggcagattgcctgagacagcagcaaaagcagcaacagcagcagcagcagcagcagcagggggacctatcaggacagagttcacatccatgtgaaaggccagccaccagttcaggagcacttgggagtgatctaggtgatgctatgagtgaagaagacatgcttcaggcagctgtgaccatgtctttagaaactgtcagaaatgatttgaaaacagaaggaaaaaaataatacctttaaaaaataatttagatattcatactttccaacattatcctgtgtgattacagcatagggtccactttggtaatgtgtcaaagagatgaggaaataagacttttagcggtttgcaaacaaaatgatgggaaagtggaacaatgcgtcggttgtaggactaaataatgatcttccaaatattagccaaagaggcattcagcaattaaagacatttaaaatagttttctaaatgtttctttttcttttttgagtgtgcaatatgtaacatgtctaaagttagggcatttttcttggatctttttgcagactagctaattagctctcgcctcaggctttttccatatagtttgttttctttttctgtcttgtaggtaagttggctcacatcatgtaatagtggctttcatttcttattaaccaaattaacctttcaggaaagtatctctactttcctgatgttgataatagtaatggttctagaaggatgaacagttctcccttcaactgtataccgtgtgctccagtgttttcttgtgttgttttctctgatcacaacttttctgctacctggttttcattattttcccacaattcttttgaaagatggtaatcttttctgaggtttagcgttttaagccctacgatgggatcattatttcatgactggtgcgttcctaaactctgaaatcagccttgcacaagtacttgagaataaatgagcattttttaaaatgtgtgagcatgtgctttcccagatgctttatgaatgtcttttcacttatatcaaaaccttacagctttgttgcaaccccttcttcctgcgccttattttttcctttcttctccaattgagaaaactaggagaagcatagtatgcaggcaagtctccttctgttagaagactaaacatacgtacccaccatgaatgtatgatacatgaaatttggccttcaattttaatagcagttttattttattttttctcctatgactggagctttgtgttctctttacagttgagtcatggaatgtaggtgtctgcttcacatcttttagtaggtatagcttgtcaaagatggtgatctggaacatgaaaataatttactaatgaaaatatgtttaaatttatactgtgatttgacacttgcatcatgtttagatagcttaagaacaatggaagtcacagtacttagtggatctataaataagaaagtccatagttttgataaatattctctttaattgagatgtacagagagtttcttgctgggtcaataggatagtatcattttggtgaaaaccatgtctctgaaattgatgttttagtttcagtgttccctatccctcattctccatctccttttgaagctcttttgaatgttgaattgttcataagctaaaatccaagaaatttcagctgacaacttcgaaaattataatatggtatattgccctcctggtgtgtggctgcacacattttatcagggaaagttttttgatctaggatttattgctaactaactgaaaagagaagaaaaaatatcttttatttatgattataaaatagctttttcttcgatataacagattttttaagtcattattttgtgccaatcagttttctgaagtttcccttacacaaaaggatagctttattttaaaatctaaagtttcttttaatagttaaaaatgtttcagaagaattataaaactttaaaactgcaagggatgttggagtttagtactactccctcaagatttaaaaagctaaatattttaagactgaacatttatgttaattattaccagtgtgtttgtcatattttccatggatatttgttcattacctttttccattgaaaagttacattaaacttttcatacacttgaattgatgagctacctaatataaaaatgagaaaaccaatatgcattttaaagttttaactttagagtttataaagttcatatataccctagttaaagcacttaagaaaatatggcatgtttgacttttagttcctagagagtttttgtttttgtttttgtttttttttgagacggagtcttgctatgtctcccaggctggagggcagtggcatgatctcggctcactacaacttccacctcccgggttcaagcaattctcctgcctcagcctccagagtagctgggattacaggcgcccaccaccacacccggcagatttttgtatttttggtagagacgcggtttcatcatgtttggccaggctggtctcgaactcctgacctcaggtgatccgcctgccttggcctcccaaagtgttgggattacaggcatgagccactgcgcctggccagctagagagtttttaaagcagagctgagcacacactggatgcgtttgaatgtgtttgtgtagtttgttgtgaaattgttacatttagcaggcagatccagaagcactagtgaactgtcatcttggtggggttggcttaaatttaattgactgtttagattccatttcttaattgattggccagtatgaaaagatgccagtgcaagtaaccatagtatcaaaaaagttaaaaattattcaaagctatagtttatacatcaggtactgccatttactgtaaaccacctgcaagaaagtcaggaacaactaaattcacaagaactgtcctgctaagaagtgtattaaagatttccattttgttttactaattgggaacatcttaatgtttaatatttaaactattggtatcatttttctaatgtataatttgtattactgggatcaagtatgtacagtggtgatgctagtagaagtttaagccttggaaataccactttcatattttcagatgtcatggatttaatgagtaatttatgtttttaaaattcagaatagttaatctctgatctaaaaccatcaatctatgttttttacggtaatcatgtaaatatttcagtaatataaactgtttgaaaaggctgctgcaggtaaactctatactaggatcttggccaaataatttacaattcacagaatattttatttaaggtggtgctttttttttttgtccttaaaacttgatttttcttaactttattcatgatgccaaagtaaatgaggaaaaaaactcaaaaccagttgagtatcattgcagacaaaactaccagtagtccatattgtttaatattaagttgaataaaataaattttatttcagtcagagcctaaatcacattttgattgtctgaatttttgatactatttttaaaatcatgctagtggcggctgggcgtggtagctcacgcctgtaatcccagcattttgggaggccgaagtgggtggatcacgaggtcgggagttcgagaccagcttggccaaaatggtgaaaccccatctgtactaaaaactacaaaaattagctgggcgcggtggcaggtgcctgtaatcccagctacctgggagtctgaggcaggagaattgcttgaaccctggcgacagaggatgcagtgagccaagatggtgccactgtactccagactgggcgacagagtgagactctgtctcaaaaaaaaaaaaaaaatcatgctagtgccaagagctactaaattcttaaaaccggcccattggacctgtacagataaaaaatagattcagtgcataatcaaaatatgataattttaaaatcttaagtagaaaaataaatcttgatgttttaaattcttacgaggattcaatagttaatattgatgatctcccggctgggtgcagtggctcacgcctgtaatcccagcagttctggaggctgaggtgggcgaatcacttcaggccaggagttcaagaccagtctgggcaacatggtgaaacctcgtttctactaaaaatacaaaaattagccgggcgtggttgcacacacttgtaatcccagctactcaggaggctaagaatcgcatgagcctaggaggcagaggttgcagagtgccaagggctcaccactgcattccagcctgcccaacagagtgagacactgtttctgaaaaaaaaaaatatatatatatatatatatatgtgtgtatatatatatgtatatatatatgacttcctattaaaaactttatcccagtcgggggcagtggctcacgcctgtaatcccaacactttgggaggctgaggcaggtggatcacctgaagtccggagtttgagaccagcctggccaacatggtgaaaccccatctctactaaaaatacaaaacttaagccaggtatggtggcgggcacctgtaatcccagttacttgggaggctgaggcaggagaatcgtttaaacccaggaggtggaggttgcagtgagctgagatcgtgccattgcactctagcctgggcaacaagagtaaaactccatcttaaaggtttgtttgtttttttttaatccggaaacgaagaggcgttgggccgctattttctttttctttctttctttctttctttttttttttttctgagacggagtctagctctgctgcccaggctggagtacaatgacacgatgttggctcactgcaacctccacctcctgggttcaagcgattctcctgcctcagcctcccaagtacctgggattacaggcacctgccactacacctggcgaatatttgttttttttagtagagacgggcttttaccatgttaggctggtctcaaactcctgacctcaggtgatctgcctgccttggcctcccaaagtgctgggattacaggtgcaggccaccacacccggccttgggccactgttttcaaagtgaattgtttgttgtatcgagtccttaagtatggatatatatgtgaccctaattaagaactaccagattggatcaactaatcatgtcagcaatgtaaataactttatttttcatattcaaaataaaaactttcttttatttctggcccctttataaccagcatctttttgctttaaaaaatgacctggctttgtatttttttagtcttaaacataataaaaatatttttgttctaatttgctttcatgagtgaagattattgacatcgttggtaaattctagaattttgattttgttttttaatttgaagaaaatctttgctattattattttttccaagtggtctggcattttaagaattagtgctaataacgtaacttctaaatttgtcgtaattggcatgtttaatagcatatcaaaaaacattttaagcctgtggattcatagacaaagcaatgagaaacattagtaaaatataaatggatattcctgatgcatttaggaagctctcaattgtctcttgcatagttcaaggaatgttttctgaatttttttaatgctttttttttttttgaaagaggaaaacatacatttttaaatgtgattatctaatttttacaacactgggctattaggaataactttttaaaaattactgttctgtataaatatttgaaattcaagtacagaaaatatctgaaacaaaaagcattgttgtttggccatgatacaagtgcactgtggcagtgccgcttgctcaggacccagccctgcagcccttctgtgtgtgctccctcgttaagttcatttgctgttattacacacacaggccttcctgtctggtcgttagaaaagccgggcttccaaagcactgttgaacacaggattctgttgttagtgtggatgttcaatgagttgtattttaaatatcaaagattattaaataaagataatgtttgcttttcta

SEQ ID NO: 382 - DNA, 6896 bp, Homo sapiens
  source 1..6896: mol_type = genomic DNA
gactccgtctcaaaaaaaaaacaagaaggctcactttgtgctcaacattgcctgaataacttattgcaaggagaatattttagccctgtggaattatcctcaattgcacatcagctggatgaggaggagaggatgagaatggcagaaggaggagttactagtgaagattatcgcacgtttttacagcagccttctggaaatatggatgacagtggttttttctctattcaggttataagcaatgccttgaaagtttggggtttagaactaatcctgttcaacagtccagagtatcagaggctcaggatcgatcctataaatgaaagatcatttatatgcaattataaggaacactggtttacagttagaaaattaggaaaacagtggtttaacttgaattctctcttgacgggtccagaattaatatcagatacatatcttgcacttttcttggctcaattacaacaggaaggttattctatatttgtcgttaagggtgatctgccagattgcgaagctgaccaactcctgcagatgattagggtccaacagatgcatcgaccaaaacttattggagaagaattagcacaactaaaagagcaaagagtccataaaacagacctggaacgagtgttagaagcaaatgatggctcaggaatgttagacgaagatgaggaggatttgcagagggctctggcactaagtcgccaagaaattgacatggaagatgaggaagcagatctccgcagggctattcagctaagtatgcaaggtagttccagaaacatatctcaagatatgacacagacatcaggtacaaatcttacttcagaagagcttcggaagagacgagaagcctactttgaaaagaaatttacagcaaataggacggatcagcacttccatattttaaaacagcagcaaaagcagcaacagcagcagcagcagcagcagcagggggacctatcaggacagagttcacatccatgtgaaaggccagccaccagttcaggagcacttgggagtgatctaggtgatgctatgagtgaagaagacatgcttcaggcagctgtgaccatgtctttagaaactgtcagaaatgatttgaaaacagaaggaaaaaaataatacctttaaaaaataatttagatattcatactttccaacattatcctgtgtgattacagcatagggtccactttggtaatgtgtcaaagagatgaggaaataagacttttagcggtttgcaaacaaaatgatgggaaagtggaacaatgcgtcggttgtaggactaaataatgatcttccaaatattagccaaagaggcattcagcaattaaagacatttaaaatagttttctaaatgtttctttttcttttttgagtgtgcaatatgtaacatgtctaaagttagggcatttttcttggatctttttgcagactagctaattagctctcgcctcaggctttttccatatagtttgttttctttttctgtcttgtaggtaagttggctcacatcatgtaatagtggctttcatttcttattaaccaaattaacctttcaggaaagtatctctactttcctgatgttgataatagtaatggttctagaaggatgaacagttctcccttcaactgtataccgtgtgctccagtgttttcttgtgttgttttctctgatcacaacttttctgctacctggttttcattattttcccacaattcttttgaaagatggtaatcttttctgaggtttagcgttttaagccctacgatgggatcattatttcatgactggtgcgttcctaaactctgaaatcagccttgcacaagtacttgagaataaatgagcattttttaaaatgtgtgagcatgtgctttcccagatgctttatgaatgtcttttcacttatatcaaaaccttacagctttgttgcaaccccttcttcctgcgccttattttttcctttcttctccaattgagaaaactaggagaagcatagtatgcaggcaagtctccttctgttagaagactaaacatacgtacccaccatgaatgtatgatacatgaaatttggccttcaattttaatagcagttttattttattttttctcctatgactggagctttgtgttctctttacagttgagtcatggaatgtaggtgtctgcttcacatcttttagtaggtatagcttgtcaaagatggtgatctggaacatgaaaataatttactaatgaaaatatgtttaaatttatactgtgatttgacacttgcatcatgtttagatagcttaagaacaatggaagtcacagtacttagtggatctataaataagaaagtccatagttttgataaatattctctttaattgagatgtacagagagtttcttgctgggtcaataggatagtatcattttggtgaaaaccatgtctctgaaattgatgttttagtttcagtgttccctatccctcattctccatctccttttgaagctcttttgaatgttgaattgttcataagctaaaatccaagaaatttcagctgacaacttcgaaaattataatatggtatattgccctcctggtgtgtggctgcacacattttatcagggaaagttttttgatctaggatttattgctaactaactgaaaagagaagaaaaaatatcttttatttatgattataaaatagctttttcttcgatataacagattttttaagtcattattttgtgccaatcagttttctgaagtttcccttacacaaaaggatagctttattttaaaatctaaagtttcttttaatagttaaaaatgtttcagaagaattataaaactttaaaactgcaagggatgttggagtttagtactactccctcaagatttaaaaagctaaatattttaagactgaacatttatgttaattattaccagtgtgtttgtcatattttccatggatatttgttcattacctttttccattgaaaagttacattaaacttttcatacacttgaattgatgagctacctaatataaaaatgagaaaaccaatatgcattttaaagttttaactttagagtttataaagttcatatataccctagttaaagcacttaagaaaatatggcatgtttgacttttagttcctagagagtttttgtttttgtttttgtttttttttgagacggagtcttgctatgtctcccaggctggagggcagtggcatgatctcggctcactacaacttccacctcccgggttcaagcaattctcctgcctcagcctccagagtagctgggattacaggcgcccaccaccacacccggcagatttttgtatttttggtagagacgcggtttcatcatgtttggccaggctggtctcgaactcctgacctcaggtgatccgcctgccttggcctcccaaagtgttgggattacaggcatgagccactgcgcctggccagctagagagtttttaaagcagagctgagcacacactggatgcgtttgaatgtgtttgtgtagtttgttgtgaaattgttacatttagcaggcagatccagaagcactagtgaactgtcatcttggtggggttggcttaaatttaattgactgtttagattccatttcttaattgattggccagtatgaaaagatgccagtgcaagtaaccatagtatcaaaaaagttaaaaattattcaaagctatagtttatacatcaggtactgccatttactgtaaaccacctgcaagaaagtcaggaacaactaaattcacaagaactgtcctgctaagaagtgtattaaagatttccattttgttttactaattgggaacatcttaatgtttaatatttaaactattggtatcatttttctaatgtataatttgtattactgggatcaagtatgtacagtggtgatgctagtagaagtttaagccttggaaataccactttcatattttcagatgtcatggatttaatgagtaatttatgtttttaaaattcagaatagttaatctctgatctaaaaccatcaatctatgttttttacggtaatcatgtaaatatttcagtaatataaactgtttgaaaaggctgctgcaggtaaactctatactaggatcttggccaaataatttacaattcacagaatattttatttaaggtggtgctttttttttttgtccttaaaacttgatttttcttaactttattcatgatgccaaagtaaatgaggaaaaaaactcaaaaccagttgagtatcattgcagacaaaactaccagtagtccatattgtttaatattaagttgaataaaataaattttatttcagtcagagcctaaatcacattttgattgtctgaatttttgatactatttttaaaatcatgctagtggcggctgggcgtggtagctcacgcctgtaatcccagcattttgggaggccgaagtgggtggatcacgaggtcgggagttcgagaccagcttggccaaaatggtgaaaccccatctgtactaaaaactacaaaaattagctgggcgcggtggcaggtgcctgtaatcccagctacctgggagtctgaggcaggagaattgcttgaaccctggcgacagaggatgcagtgagccaagatggtgccactgtactccagactgggcgacagagtgagactctgtctcaaaaaaaaaaaaaaaatcatgctagtgccaagagctactaaattcttaaaaccggcccattggacctgtacagataaaaaatagattcagtgcataatcaaaatatgataattttaaaatcttaagtagaaaaataaatcttgatgttttaaattcttacgaggattcaatagttaatattgatgatctcccggctgggtgcagtggctcacgcctgtaatcccagcagttctggaggctgaggtgggcgaatcacttcaggccaggagttcaagaccagtctgggcaacatggtgaaacctcgtttctactaaaaatacaaaaattagccgggcgtggttgcacacacttgtaatcccagctactcaggaggctaagaatcgcatgagcctaggaggcagaggttgcagagtgccaagggctcaccactgcattccagcctgcccaacagagtgagacactgtttctgaaaaaaaaaaatatatatatatatatatatatgtgtgtatatatatatgtatatatatatgacttcctattaaaaactttatcccagtcgggggcagtggctcacgcctgtaatcccaacactttgggaggctgaggcaggtggatcacctgaagtccggagtttgagaccagcctggccaacatggtgaaaccccatctctactaaaaatacaaaacttaagccaggtatggtggcgggcacctgtaatcccagttacttgggaggctgaggcaggagaatcgtttaaacccaggaggtggaggttgcagtgagctgagatcgtgccattgcactctagcctgggcaacaagagtaaaactccatcttaaaggtttgtttgtttttttttaatccggaaacgaagaggcgttgggccgctattttctttttctttctttctttctttctttttttttttttctgagacggagtctagctctgctgcccaggctggagtacaatgacacgatgttggctcactgcaacctccacctcctgggttcaagcgattctcctgcctcagcctcccaagtacctgggattacaggcacctgccactacacctggcgaatatttgttttttttagtagagacgggcttttaccatgttaggctggtctcaaactcctgacctcaggtgatctgcctgccttggcctcccaaagtgctgggattacaggtgcaggccaccacacccggccttgggccactgttttcaaagtgaattgtttgttgtatcgagtccttaagtatggatatatatgtgaccctaattaagaactaccagattggatcaactaatcatgtcagcaatgtaaataactttatttttcatattcaaaataaaaactttcttttatttctggcccctttataaccagcatctttttgctttaaaaaatgacctggctttgtatttttttagtcttaaacataataaaaatatttttgttctaatttgctttcatgagtgaagattattgacatcgttggtaaattctagaattttgattttgttttttaatttgaagaaaatctttgctattattattttttccaagtggtctggcattttaagaattagtgctaataacgtaacttctaaatttgtcgtaattggcatgtttaatagcatatcaaaaaacattttaagcctgtggattcatagacaaagcaatgagaaacattagtaaaatataaatggatattcctgatgcatttaggaagctctcaattgtctcttgcatagttcaaggaatgttttctgaatttttttaatgctttttttttttttgaaagaggaaaacatacatttttaaatgtgattatctaatttttacaacactgggctattaggaataactttttaaaaattactgttctgtataaatatttgaaattcaagtacagaaaatatctgaaacaaaaagcattgttgtttggccatgatacaagtgcactgtggcagtgccgcttgctcaggacccagccctgcagcccttctgtgtgtgctccctcgttaagttcatttgctgttattacacacacaggccttcctgtctggtcgttagaaaagccgggcttccaaagcactgttgaacacaggattctgttgttagtgtggatgttcaatgagttgtattttaaatatcaaagattattaaataaagataatgtttgcttttcta

SEQ ID NO: 383 - DNA, 6962 bp, Homo sapiens
  source 1..6962: mol_type = genomic DNA
gagaggggcagggggcggagctggagggggtggttcggcgtgggggccgttggctccagacaaataaacatggagtccatcttccacgagaaacaagaaggctcactttgtgctcaacattgcctgaataacttattgcaaggagaatattttagccctgtggaattatcctcaattgcacatcagctggatgaggaggagaggatgagaatggcagaaggaggagttactagtgaagattatcgcacgtttttacagcagccttctggaaatatggatgacagtggttttttctctattcaggttataagcaatgccttgaaagtttggggtttagaactaatcctgttcaacagtccagagtatcagaggctcaggatcgatcctataaatgaaagatcatttatatgcaattataaggaacactggtttacagttagaaaattaggaaaacagtggtttaacttgaattctctcttgacgggtccagaattaatatcagatacatatcttgcacttttcttggctcaattacaacaggaaggttattctatatttgtcgttaagggtgatctgccagattgcgaagctgaccaactcctgcagatgattagggtccaacagatgcatcgaccaaaacttattggagaagaattagcacaactaaaagagcaaagagtccataaaacagacctggaacgagtgttagaagcaaatgatggctcaggaatgttagacgaagatgaggaggatttgcagagggctctggcactaagtcgccaagaaattgacatggaagatgaggaagcagatctccgcagggctattcagctaagtatgcaaggtagttccagaaacatatctcaagatatgacacagacatcaggtacaaatcttacttcagaagagcttcggaagagacgagaagcctactttgaaaaggtattttttaaaaatttacagcaaataggacgggcacgacagcagcaaaagcagcaacagcagcagcagcagcagcagcagggggacctatcaggacagagttcacatccatgtgaaaggccagccaccagttcaggagcacttgggagtgatctaggtgatgctatgagtgaagaagacatgcttcaggcagctgtgaccatgtctttagaaactgtcagaaatgatttgaaaacagaaggaaaaaaataatacctttaaaaaataatttagatattcatactttccaacattatcctgtgtgattacagcatagggtccactttggtaatgtgtcaaagagatgaggaaataagacttttagcggtttgcaaacaaaatgatgggaaagtggaacaatgcgtcggttgtaggactaaataatgatcttccaaatattagccaaagaggcattcagcaattaaagacatttaaaatagttttctaaatgtttctttttcttttttgagtgtgcaatatgtaacatgtctaaagttagggcatttttcttggatctttttgcagactagctaattagctctcgcctcaggctttttccatatagtttgttttctttttctgtcttgtaggtaagttggctcacatcatgtaatagtggctttcatttcttattaaccaaattaacctttcaggaaagtatctctactttcctgatgttgataatagtaatggttctagaaggatgaacagttctcccttcaactgtataccgtgtgctccagtgttttcttgtgttgttttctctgatcacaacttttctgctacctggttttcattattttcccacaattcttttgaaagatggtaatcttttctgaggtttagcgttttaagccctacgatgggatcattatttcatgactggtgcgttcctaaactctgaaatcagccttgcacaagtacttgagaataaatgagcattttttaaaatgtgtgagcatgtgctttcccagatgctttatgaatgtcttttcacttatatcaaaaccttacagctttgttgcaaccccttcttcctgcgccttattttttcctttcttctccaattgagaaaactaggagaagcatagtatgcaggcaagtctccttctgttagaagactaaacatacgtacccaccatgaatgtatgatacatgaaatttggccttcaattttaatagcagttttattttattttttctcctatgactggagctttgtgttctctttacagttgagtcatggaatgtaggtgtctgcttcacatcttttagtaggtatagcttgtcaaagatggtgatctggaacatgaaaataatttactaatgaaaatatgtttaaatttatactgtgatttgacacttgcatcatgtttagatagcttaagaacaatggaagtcacagtacttagtggatctataaataagaaagtccatagttttgataaatattctctttaattgagatgtacagagagtttcttgctgggtcaataggatagtatcattttggtgaaaaccatgtctctgaaattgatgttttagtttcagtgttccctatccctcattctccatctccttttgaagctcttttgaatgttgaattgttcataagctaaaatccaagaaatttcagctgacaacttcgaaaattataatatggtatattgccctcctggtgtgtggctgcacacattttatcagggaaagttttttgatctaggatttattgctaactaactgaaaagagaagaaaaaatatcttttatttatgattataaaatagctttttcttcgatataacagattttttaagtcattattttgtgccaatcagttttctgaagtttcccttacacaaaaggatagctttattttaaaatctaaagtttcttttaatagttaaaaatgtttcagaagaattataaaactttaaaactgcaagggatgttggagtttagtactactccctcaagatttaaaaagctaaatattttaagactgaacatttatgttaattattaccagtgtgtttgtcatattttccatggatatttgttcattacctttttccattgaaaagttacattaaacttttcatacacttgaattgatgagctacctaatataaaaatgagaaaaccaatatgcattttaaagttttaactttagagtttataaagttcatatataccctagttaaagcacttaagaaaatatggcatgtttgacttttagttcctagagagtttttgtttttgtttttgtttttttttgagacggagtcttgctatgtctcccaggctggagggcagtggcatgatctcggctcactacaacttccacctcccgggttcaagcaattctcctgcctcagcctccagagtagctgggattacaggcgcccaccaccacacccggcagatttttgtatttttggtagagacgcggtttcatcatgtttggccaggctggtctcgaactcctgacctcaggtgatccgcctgccttggcctcccaaagtgttgggattacaggcatgagccactgcgcctggccagctagagagtttttaaagcagagctgagcacacactggatgcgtttgaatgtgtttgtgtagtttgttgtgaaattgttacatttagcaggcagatccagaagcactagtgaactgtcatcttggtggggttggcttaaatttaattgactgtttagattccatttcttaattgattggccagtatgaaaagatgccagtgcaagtaaccatagtatcaaaaaagttaaaaattattcaaagctatagtttatacatcaggtactgccatttactgtaaaccacctgcaagaaagtcaggaacaactaaattcacaagaactgtcctgctaagaagtgtattaaagatttccattttgttttactaattgggaacatcttaatgtttaatatttaaactattggtatcatttttctaatgtataatttgtattactgggatcaagtatgtacagtggtgatgctagtagaagtttaagccttggaaataccactttcatattttcagatgtcatggatttaatgagtaatttatgtttttaaaattcagaatagttaatctctgatctaaaaccatcaatctatgttttttacggtaatcatgtaaatatttcagtaatataaactgtttgaaaaggctgctgcaggtaaactctatactaggatcttggccaaataatttacaattcacagaatattttatttaaggtggtgctttttttttttgtccttaaaacttgatttttcttaactttattcatgatgccaaagtaaatgaggaaaaaaactcaaaaccagttgagtatcattgcagacaaaactaccagtagtccatattgtttaatattaagttgaataaaataaattttatttcagtcagagcctaaatcacattttgattgtctgaatttttgatactatttttaaaatcatgctagtggcggctgggcgtggtagctcacgcctgtaatcccagcattttgggaggccgaagtgggtggatcacgaggtcgggagttcgagaccagcttggccaaaatggtgaaaccccatctgtactaaaaactacaaaaattagctgggcgcggtggcaggtgcctgtaatcccagctacctgggagtctgaggcaggagaattgcttgaaccctggcgacagaggatgcagtgagccaagatggtgccactgtactccagactgggcgacagagtgagactctgtctcaaaaaaaaaaaaaaaatcatgctagtgccaagagctactaaattcttaaaaccggcccattggacctgtacagataaaaaatagattcagtgcataatcaaaatatgataattttaaaatcttaagtagaaaaataaatcttgatgttttaaattcttacgaggattcaatagttaatattgatgatctcccggctgggtgcagtggctcacgcctgtaatcccagcagttctggaggctgaggtgggcgaatcacttcaggccaggagttcaagaccagtctgggcaacatggtgaaacctcgtttctactaaaaatacaaaaattagccgggcgtggttgcacacacttgtaatcccagctactcaggaggctaagaatcgcatgagcctaggaggcagaggttgcagagtgccaagggctcaccactgcattccagcctgcccaacagagtgagacactgtttctgaaaaaaaaaaatatatatatatatatatatatgtgtgtatatatatatgtatatatatatgacttcctattaaaaactttatcccagtcgggggcagtggctcacgcctgtaatcccaacactttgggaggctgaggcaggtggatcacctgaagtccggagtttgagaccagcctggccaacatggtgaaaccccatctctactaaaaatacaaaacttaagccaggtatggtggcgggcacctgtaatcccagttacttgggaggctgaggcaggagaatcgtttaaacccaggaggtggaggttgcagtgagctgagatcgtgccattgcactctagcctgggcaacaagagtaaaactccatcttaaaggtttgtttgtttttttttaatccggaaacgaagaggcgttgggccgctattttctttttctttctttctttctttctttttttttttttctgagacggagtctagctctgctgcccaggctggagtacaatgacacgatgttggctcactgcaacctccacctcctgggttcaagcgattctcctgcctcagcctcccaagtacctgggattacaggcacctgccactacacctggcgaatatttgttttttttagtagagacgggcttttaccatgttaggctggtctcaaactcctgacctcaggtgatctgcctgccttggcctcccaaagtgctgggattacaggtgcaggccaccacacccggccttgggccactgttttcaaagtgaattgtttgttgtatcgagtccttaagtatggatatatatgtgaccctaattaagaactaccagattggatcaactaatcatgtcagcaatgtaaataactttatttttcatattcaaaataaaaactttcttttatttctggcccctttataaccagcatctttttgctttaaaaaatgacctggctttgtatttttttagtcttaaacataataaaaatatttttgttctaatttgctttcatgagtgaagattattgacatcgttggtaaattctagaattttgattttgttttttaatttgaagaaaatctttgctattattattttttccaagtggtctggcattttaagaattagtgctaataacgtaacttctaaatttgtcgtaattggcatgtttaatagcatatcaaaaaacattttaagcctgtggattcatagacaaagcaatgagaaacattagtaaaatataaatggatattcctgatgcatttaggaagctctcaattgtctcttgcatagttcaaggaatgttttctgaatttttttaatgctttttttttttttgaaagaggaaaacatacatttttaaatgtgattatctaatttttacaacactgggctattaggaataactttttaaaaattactgttctgtataaatatttgaaattcaagtacagaaaatatctgaaacaaaaagcattgttgtttggccatgatacaagtgcactgtggcagtgccgcttgctcaggacccagccctgcagcccttctgtgtgtgctccctcgttaagttcatttgctgttattacacacacaggccttcctgtctggtcgttagaaaagccgggcttccaaagcactgttgaacacaggattctgttgttagtgtggatgttcaatgagttgtattttaaatatcaaagattattaaataaagataatgtttgcttttcta

SEQ ID NO: 384 - DNA, 6950 bp, Homo sapiens
  source 1..6950: mol_type = genomic DNA
gagaggggcagggggcggagctggagggggtggttcggcgtgggggccgttggctccagacaaataaacatggagtccatcttccacgagaaacaagaaggctcactttgtgctcaacattgcctgaataacttattgcaaggagaatattttagccctgtggaattatcctcaattgcacatcagctggatgaggaggagaggatgagaatggcagaaggaggagttactagtgaagattatcgcacgtttttacagcagccttctggaaatatggatgacagtggttttttctctattcaggttataagcaatgccttgaaagtttggggtttagaactaatcctgttcaacagtccagagtatcagaggctcaggatcgatcctataaatgaaagatcatttatatgcaattataaggaacactggtttacagttagaaaattaggaaaacagtggtttaacttgaattctctcttgacgggtccagaattaatatcagatacatatcttgcacttttcttggctcaattacaacaggaaggttattctatatttgtcgttaagggtgatctgccagattgcgaagctgaccaactcctgcagatgattagggtccaacagatgcatcgaccaaaacttattggagaagaattagcacaactaaaagagcaaagagtccataaaacagacctggaacgagtgttagaagcaaatgatggctcaggaatgttagacgaagatgaggaggatttgcagagggctctggcactaagtcgccaagaaattgacatggaagatgaggaagcagatctccgcagggctattcagctaagtatgcaaggtagttccagaaacatatctcaagatatgacacagacatcaggtacaaatcttacttcagaagagcttcggaagagacgagaagcctactttgaaaagatatacttcacttttgaatgtttcagacagcagcaaaagcagcaacagcagcagcagcagcagcagcagggggacctatcaggacagagttcacatccatgtgaaaggccagccaccagttcaggagcacttgggagtgatctaggtgatgctatgagtgaagaagacatgcttcaggcagctgtgaccatgtctttagaaactgtcagaaatgatttgaaaacagaaggaaaaaaataatacctttaaaaaataatttagatattcatactttccaacattatcctgtgtgattacagcatagggtccactttggtaatgtgtcaaagagatgaggaaataagacttttagcggtttgcaaacaaaatgatgggaaagtggaacaatgcgtcggttgtaggactaaataatgatcttccaaatattagccaaagaggcattcagcaattaaagacatttaaaatagttttctaaatgtttctttttcttttttgagtgtgcaatatgtaacatgtctaaagttagggcatttttcttggatctttttgcagactagctaattagctctcgcctcaggctttttccatatagtttgttttctttttctgtcttgtaggtaagttggctcacatcatgtaatagtggctttcatttcttattaaccaaattaacctttcaggaaagtatctctactttcctgatgttgataatagtaatggttctagaaggatgaacagttctcccttcaactgtataccgtgtgctccagtgttttcttgtgttgttttctctgatcacaacttttctgctacctggttttcattattttcccacaattcttttgaaagatggtaatcttttctgaggtttagcgttttaagccctacgatgggatcattatttcatgactggtgcgttcctaaactctgaaatcagccttgcacaagtacttgagaataaatgagcattttttaaaatgtgtgagcatgtgctttcccagatgctttatgaatgtcttttcacttatatcaaaaccttacagctttgttgcaaccccttcttcctgcgccttattttttcctttcttctccaattgagaaaactaggagaagcatagtatgcaggcaagtctccttctgttagaagactaaacatacgtacccaccatgaatgtatgatacatgaaatttggccttcaattttaatagcagttttattttattttttctcctatgactggagctttgtgttctctttacagttgagtcatggaatgtaggtgtctgcttcacatcttttagtaggtatagcttgtcaaagatggtgatctggaacatgaaaataatttactaatgaaaatatgtttaaatttatactgtgatttgacacttgcatcatgtttagatagcttaagaacaatggaagtcacagtacttagtggatctataaataagaaagtccatagttttgataaatattctctttaattgagatgtacagagagtttcttgctgggtcaataggatagtatcattttggtgaaaaccatgtctctgaaattgatgttttagtttcagtgttccctatccctcattctccatctccttttgaagctcttttgaatgttgaattgttcataagctaaaatccaagaaatttcagctgacaacttcgaaaattataatatggtatattgccctcctggtgtgtggctgcacacattttatcagggaaagttttttgatctaggatttattgctaactaactgaaaagagaagaaaaaatatcttttatttatgattataaaatagctttttcttcgatataacagattttttaagtcattattttgtgccaatcagttttctgaagtttcccttacacaaaaggatagctttattttaaaatctaaagtttcttttaatagttaaaaatgtttcagaagaattataaaactttaaaactgcaagggatgttggagtttagtactactccctcaagatttaaaaagctaaatattttaagactgaacatttatgttaattattaccagtgtgtttgtcatattttccatggatatttgttcattacctttttccattgaaaagttacattaaacttttcatacacttgaattgatgagctacctaatataaaaatgagaaaaccaatatgcattttaaagttttaactttagagtttataaagttcatatataccctagttaaagcacttaagaaaatatggcatgtttgacttttagttcctagagagtttttgtttttgtttttgtttttttttgagacggagtcttgctatgtctcccaggctggagggcagtggcatgatctcggctcactacaacttccacctcccgggttcaagcaattctcctgcctcagcctccagagtagctgggattacaggcgcccaccaccacacccggcagatttttgtatttttggtagagacgcggtttcatcatgtttggccaggctggtctcgaactcctgacctcaggtgatccgcctgccttggcctcccaaagtgttgggattacaggcatgagccactgcgcctggccagctagagagtttttaaagcagagctgagcacacactggatgcgtttgaatgtgtttgtgtagtttgttgtgaaattgttacatttagcaggcagatccagaagcactagtgaactgtcatcttggtggggttggcttaaatttaattgactgtttagattccatttcttaattgattggccagtatgaaaagatgccagtgcaagtaaccatagtatcaaaaaagttaaaaattattcaaagctatagtttatacatcaggtactgccatttactgtaaaccacctgcaagaaagtcaggaacaactaaattcacaagaactgtcctgctaagaagtgtattaaagatttccattttgttttactaattgggaacatcttaatgtttaatatttaaactattggtatcatttttctaatgtataatttgtattactgggatcaagtatgtacagtggtgatgctagtagaagtttaagccttggaaataccactttcatattttcagatgtcatggatttaatgagtaatttatgtttttaaaattcagaatagttaatctctgatctaaaaccatcaatctatgttttttacggtaatcatgtaaatatttcagtaatataaactgtttgaaaaggctgctgcaggtaaactctatactaggatcttggccaaataatttacaattcacagaatattttatttaaggtggtgctttttttttttgtccttaaaacttgatttttcttaactttattcatgatgccaaagtaaatgaggaaaaaaactcaaaaccagttgagtatcattgcagacaaaactaccagtagtccatattgtttaatattaagttgaataaaataaattttatttcagtcagagcctaaatcacattttgattgtctgaatttttgatactatttttaaaatcatgctagtggcggctgggcgtggtagctcacgcctgtaatcccagcattttgggaggccgaagtgggtggatcacgaggtcgggagttcgagaccagcttggccaaaatggtgaaaccccatctgtactaaaaactacaaaaattagctgggcgcggtggcaggtgcctgtaatcccagctacctgggagtctgaggcaggagaattgcttgaaccctggcgacagaggatgcagtgagccaagatggtgccactgtactccagactgggcgacagagtgagactctgtctcaaaaaaaaaaaaaaaatcatgctagtgccaagagctactaaattcttaaaaccggcccattggacctgtacagataaaaaatagattcagtgcataatcaaaatatgataattttaaaatcttaagtagaaaaataaatcttgatgttttaaattcttacgaggattcaatagttaatattgatgatctcccggctgggtgcagtggctcacgcctgtaatcccagcagttctggaggctgaggtgggcgaatcacttcaggccaggagttcaagaccagtctgggcaacatggtgaaacctcgtttctactaaaaatacaaaaattagccgggcgtggttgcacacacttgtaatcccagctactcaggaggctaagaatcgcatgagcctaggaggcagaggttgcagagtgccaagggctcaccactgcattccagcctgcccaacagagtgagacactgtttctgaaaaaaaaaaatatatatatatatatatatatgtgtgtatatatatatgtatatatatatgacttcctattaaaaactttatcccagtcgggggcagtggctcacgcctgtaatcccaacactttgggaggctgaggcaggtggatcacctgaagtccggagtttgagaccagcctggccaacatggtgaaaccccatctctactaaaaatacaaaacttaagccaggtatggtggcgggcacctgtaatcccagttacttgggaggctgaggcaggagaatcgtttaaacccaggaggtggaggttgcagtgagctgagatcgtgccattgcactctagcctgggcaacaagagtaaaactccatcttaaaggtttgtttgtttttttttaatccggaaacgaagaggcgttgggccgctattttctttttctttctttctttctttctttttttttttttctgagacggagtctagctctgctgcccaggctggagtacaatgacacgatgttggctcactgcaacctccacctcctgggttcaagcgattctcctgcctcagcctcccaagtacctgggattacaggcacctgccactacacctggcgaatatttgttttttttagtagagacgggcttttaccatgttaggctggtctcaaactcctgacctcaggtgatctgcctgccttggcctcccaaagtgctgggattacaggtgcaggccaccacacccggccttgggccactgttttcaaagtgaattgtttgttgtatcgagtccttaagtatggatatatatgtgaccctaattaagaactaccagattggatcaactaatcatgtcagcaatgtaaataactttatttttcatattcaaaataaaaactttcttttatttctggcccctttataaccagcatctttttgctttaaaaaatgacctggctttgtatttttttagtcttaaacataataaaaatatttttgttctaatttgctttcatgagtgaagattattgacatcgttggtaaattctagaattttgattttgttttttaatttgaagaaaatctttgctattattattttttccaagtggtctggcattttaagaattagtgctaataacgtaacttctaaatttgtcgtaattggcatgtttaatagcatatcaaaaaacattttaagcctgtggattcatagacaaagcaatgagaaacattagtaaaatataaatggatattcctgatgcatttaggaagctctcaattgtctcttgcatagttcaaggaatgttttctgaatttttttaatgctttttttttttttgaaagaggaaaacatacatttttaaatgtgattatctaatttttacaacactgggctattaggaataactttttaaaaattactgttctgtataaatatttgaaattcaagtacagaaaatatctgaaacaaaaagcattgttgtttggccatgatacaagtgcactgtggcagtgccgcttgctcaggacccagccctgcagcccttctgtgtgtgctccctcgttaagttcatttgctgttattacacacacaggccttcctgtctggtcgttagaaaagccgggcttccaaagcactgttgaacacaggattctgttgttagtgtggatgttcaatgagttgtattttaaatatcaaagattattaaataaagataatgtttgcttttcta

SEQ ID NO: 385 - DNA, 6971 bp, Homo sapiens
  source 1..6971: mol_type = genomic DNA
gagaggggcagggggcggagctggagggggtggttcggcgtgggggccgttggctccagacaaataaacatggagtccatcttccacgagaaacaagaaggctcactttgtgctcaacattgcctgaataacttattgcaaggagaatattttagccctgtggaattatcctcaattgcacatcagctggatgaggaggagaggatgagaatggcagaaggaggagttactagtgaagattatcgcacgtttttacagcagccttctggaaatatggatgacagtggttttttctctattcaggttataagcaatgccttgaaagtttggggtttagaactaatcctgttcaacagtccagagtatcagaggctcaggatcgatcctataaatgaaagatcatttatatgcaattataaggaacactggtttacagttagaaaattaggaaaacagtggtttaacttgaattctctcttgacgggtccagaattaatatcagatacatatcttgcacttttcttggctcaattacaacaggaaggttattctatatttgtcgttaagggtgatctgccagattgcgaagctgaccaactcctgcagatgattagggtccaacagatgcatcgaccaaaacttattggagaagaattagcacaactaaaagagcaaagagtccataaaacagacctggaacgagtgttagaagcaaatgatggctcaggaatgttagacgaagatgaggaggatttgcagagggctctggcactaagtcgccaagaaattgacatggaagatgaggaagcagatctccgcagggctattcagctaagtatgcaaggtagttccagaaacatatctcaagatatgacacagacatcaggtacaaatcttacttcagaagagcttcggaagagacgagaagcctactttgaaaaggtattttttaaaaatttacagcaaaatcagcacttccatattttaaaacagcagcaaaagcagcaacagcagcagcagcagcagcagcagggggacctatcaggacagagttcacatccatgtgaaaggccagccaccagttcaggagcacttgggagtgatctaggtgatgctatgagtgaagaagacatgcttcaggcagctgtgaccatgtctttagaaactgtcagaaatgatttgaaaacagaaggaaaaaaataatacctttaaaaaataatttagatattcatactttccaacattatcctgtgtgattacagcatagggtccactttggtaatgtgtcaaagagatgaggaaataagacttttagcggtttgcaaacaaaatgatgggaaagtggaacaatgcgtcggttgtaggactaaataatgatcttccaaatattagccaaagaggcattcagcaattaaagacatttaaaatagttttctaaatgtttctttttcttttttgagtgtgcaatatgtaacatgtctaaagttagggcatttttcttggatctttttgcagactagctaattagctctcgcctcaggctttttccatatagtttgttttctttttctgtcttgtaggtaagttggctcacatcatgtaatagtggctttcatttcttattaaccaaattaacctttcaggaaagtatctctactttcctgatgttgataatagtaatggttctagaaggatgaacagttctcccttcaactgtataccgtgtgctccagtgttttcttgtgttgttttctctgatcacaacttttctgctacctggttttcattattttcccacaattcttttgaaagatggtaatcttttctgaggtttagcgttttaagccctacgatgggatcattatttcatgactggtgcgttcctaaactctgaaatcagccttgcacaagtacttgagaataaatgagcattttttaaaatgtgtgagcatgtgctttcccagatgctttatgaatgtcttttcacttatatcaaaaccttacagctttgttgcaaccccttcttcctgcgccttattttttcctttcttctccaattgagaaaactaggagaagcatagtatgcaggcaagtctccttctgttagaagactaaacatacgtacccaccatgaatgtatgatacatgaaatttggccttcaattttaatagcagttttattttattttttctcctatgactggagctttgtgttctctttacagttgagtcatggaatgtaggtgtctgcttcacatcttttagtaggtatagcttgtcaaagatggtgatctggaacatgaaaataatttactaatgaaaatatgtttaaatttatactgtgatttgacacttgcatcatgtttagatagcttaagaacaatggaagtcacagtacttagtggatctataaataagaaagtccatagttttgataaatattctctttaattgagatgtacagagagtttcttgctgggtcaataggatagtatcattttggtgaaaaccatgtctctgaaattgatgttttagtttcagtgttccctatccctcattctccatctccttttgaagctcttttgaatgttgaattgttcataagctaaaatccaagaaatttcagctgacaacttcgaaaattataatatggtatattgccctcctggtgtgtggctgcacacattttatcagggaaagttttttgatctaggatttattgctaactaactgaaaagagaagaaaaaatatcttttatttatgattataaaatagctttttcttcgatataacagattttttaagtcattattttgtgccaatcagttttctgaagtttcccttacacaaaaggatagctttattttaaaatctaaagtttcttttaatagttaaaaatgtttcagaagaattataaaactttaaaactgcaagggatgttggagtttagtactactccctcaagatttaaaaagctaaatattttaagactgaacatttatgttaattattaccagtgtgtttgtcatattttccatggatatttgttcattacctttttccattgaaaagttacattaaacttttcatacacttgaattgatgagctacctaatataaaaatgagaaaaccaatatgcattttaaagttttaactttagagtttataaagttcatatataccctagttaaagcacttaagaaaatatggcatgtttgacttttagttcctagagagtttttgtttttgtttttgtttttttttgagacggagtcttgctatgtctcccaggctggagggcagtggcatgatctcggctcactacaacttccacctcccgggttcaagcaattctcctgcctcagcctccagagtagctgggattacaggcgcccaccaccacacccggcagatttttgtatttttggtagagacgcggtttcatcatgtttggccaggctggtctcgaactcctgacctcaggtgatccgcctgccttggcctcccaaagtgttgggattacaggcatgagccactgcgcctggccagctagagagtttttaaagcagagctgagcacacactggatgcgtttgaatgtgtttgtgtagtttgttgtgaaattgttacatttagcaggcagatccagaagcactagtgaactgtcatcttggtggggttggcttaaatttaattgactgtttagattccatttcttaattgattggccagtatgaaaagatgccagtgcaagtaaccatagtatcaaaaaagttaaaaattattcaaagctatagtttatacatcaggtactgccatttactgtaaaccacctgcaagaaagtcaggaacaactaaattcacaagaactgtcctgctaagaagtgtattaaagatttccattttgttttactaattgggaacatcttaatgtttaatatttaaactattggtatcatttttctaatgtataatttgtattactgggatcaagtatgtacagtggtgatgctagtagaagtttaagccttggaaataccactttcatattttcagatgtcatggatttaatgagtaatttatgtttttaaaattcagaatagttaatctctgatctaaaaccatcaatctatgttttttacggtaatcatgtaaatatttcagtaatataaactgtttgaaaaggctgctgcaggtaaactctatactaggatcttggccaaataatttacaattcacagaatattttatttaaggtggtgctttttttttttgtccttaaaacttgatttttcttaactttattcatgatgccaaagtaaatgaggaaaaaaactcaaaaccagttgagtatcattgcagacaaaactaccagtagtccatattgtttaatattaagttgaataaaataaattttatttcagtcagagcctaaatcacattttgattgtctgaatttttgatactatttttaaaatcatgctagtggcggctgggcgtggtagctcacgcctgtaatcccagcattttgggaggccgaagtgggtggatcacgaggtcgggagttcgagaccagcttggccaaaatggtgaaaccccatctgtactaaaaactacaaaaattagctgggcgcggtggcaggtgcctgtaatcccagctacctgggagtctgaggcaggagaattgcttgaaccctggcgacagaggatgcagtgagccaagatggtgccactgtactccagactgggcgacagagtgagactctgtctcaaaaaaaaaaaaaaaatcatgctagtgccaagagctactaaattcttaaaaccggcccattggacctgtacagataaaaaatagattcagtgcataatcaaaatatgataattttaaaatcttaagtagaaaaataaatcttgatgttttaaattcttacgaggattcaatagttaatattgatgatctcccggctgggtgcagtggctcacgcctgtaatcccagcagttctggaggctgaggtgggcgaatcacttcaggccaggagttcaagaccagtctgggcaacatggtgaaacctcgtttctactaaaaatacaaaaattagccgggcgtggttgcacacacttgtaatcccagctactcaggaggctaagaatcgcatgagcctaggaggcagaggttgcagagtgccaagggctcaccactgcattccagcctgcccaacagagtgagacactgtttctgaaaaaaaaaaatatatatatatatatatatatgtgtgtatatatatatgtatatatatatgacttcctattaaaaactttatcccagtcgggggcagtggctcacgcctgtaatcccaacactttgggaggctgaggcaggtggatcacctgaagtccggagtttgagaccagcctggccaacatggtgaaaccccatctctactaaaaatacaaaacttaagccaggtatggtggcgggcacctgtaatcccagttacttgggaggctgaggcaggagaatcgtttaaacccaggaggtggaggttgcagtgagctgagatcgtgccattgcactctagcctgggcaacaagagtaaaactccatcttaaaggtttgtttgtttttttttaatccggaaacgaagaggcgttgggccgctattttctttttctttctttctttctttctttttttttttttctgagacggagtctagctctgctgcccaggctggagtacaatgacacgatgttggctcactgcaacctccacctcctgggttcaagcgattctcctgcctcagcctcccaagtacctgggattacaggcacctgccactacacctggcgaatatttgttttttttagtagagacgggcttttaccatgttaggctggtctcaaactcctgacctcaggtgatctgcctgccttggcctcccaaagtgctgggattacaggtgcaggccaccacacccggccttgggccactgttttcaaagtgaattgtttgttgtatcgagtccttaagtatggatatatatgtgaccctaattaagaactaccagattggatcaactaatcatgtcagcaatgtaaataactttatttttcatattcaaaataaaaactttcttttatttctggcccctttataaccagcatctttttgctttaaaaaatgacctggctttgtatttttttagtcttaaacataataaaaatatttttgttctaatttgctttcatgagtgaagattattgacatcgttggtaaattctagaattttgattttgttttttaatttgaagaaaatctttgctattattattttttccaagtggtctggcattttaagaattagtgctaataacgtaacttctaaatttgtcgtaattggcatgtttaatagcatatcaaaaaacattttaagcctgtggattcatagacaaagcaatgagaaacattagtaaaatataaatggatattcctgatgcatttaggaagctctcaattgtctcttgcatagttcaaggaatgttttctgaatttttttaatgctttttttttttttgaaagaggaaaacatacatttttaaatgtgattatctaatttttacaacactgggctattaggaataactttttaaaaattactgttctgtataaatatttgaaattcaagtacagaaaatatctgaaacaaaaagcattgttgtttggccatgatacaagtgcactgtggcagtgccgcttgctcaggacccagccctgcagcccttctgtgtgtgctccctcgttaagttcatttgctgttattacacacacaggccttcctgtctggtcgttagaaaagccgggcttccaaagcactgttgaacacaggattctgttgttagtgtggatgttcaatgagttgtattttaaatatcaaagattattaaataaagataatgtttgcttttcta

SEQ ID NO: 386 - DNA, 1259 bp, Homo sapiens
  source 1..1259: mol_type = genomic DNA
gtgggggccgttggctccagacaaataaacatggagtccatcttccacgagaaaaaatgaaagatcatttatatgcaattataaggaacactggtttacagttagaaaattaggaaaacagtggtttaacttgaattctctcttgacgggtccagaattaatatcagatacatatcttgcacttttcttggctcaattacaacaggaaggttattctatatttgtcgttaagggtgatctgccagattgcgaagctgaccaactcctgcagatgattagggtccaacagatgcatcgaccaaaacttattggagaagaattagcacaactaaaagagcaaagagtccataaaacagacctggaacgagtgttagaagcaaatgatggctcaggaatgttagacgaagatgaggaggatttgcagagggctctggcactaagtcgccaagaaattgacatggaagatgaggaagcagatctccgcagggctattcagctaagtatgcaaggtagttccagaaacatatctcaagatatgacacagacatcaggtacaaatcttacttcagaagagcttcggaagagacgagaagcctactttgaaaaacagcagcaaaagcagcaacagcagcagcagcagcagcagcagggggacctatcaggacagagttcacatccatgtgaaaggccagccaccagttcaggagcacttgggagtgatctaggtgatgctatgagtgaagaagacatgcttcaggcagctgtgaccatgtctttagaaactgtcagaaatgatttgaaaacagaaggaaaaaaataatacctttaaaaaataatttagatattcatactttccaacattatcctgtgtgattacagcatagggtccactttggtaatgtgtcaaagagatgaggaaataagacttttagcggtttgcaaacaaaatgatgggaaagtggaacaatgcgtcggttgtaggactaaataatgatcttccaaatattagccaaagaggcattcagcaattaaagacatttaaaatagttttctaaatgtttctttttcttttttgagtgtgcaatatgtaacatgtctaaagttagggcatttttcttggatctttttgcagactagctaattagctctcgcctcaggctttttccatatagtttgttttctttttctgtcttgtaggtaagttggctcacatcatgtaatagtggctttcatttcttattaaccaaattaacctttca

SEQ ID NO: 387 - DNA, 4339 bp, Homo sapiens
  source 1..4339: mol_type = genomic DNA
ccgggacaaaagccggatcccgggaagctaccggctgctggggtgctccggattttgcggggttcgtcgggcctgtggaagaagcgccgcgcacggacttcggcagaggtagagcaggtctctctgcagccatgtcggccaaggcaatttcagagcagacgggcaaagaactcctttacaagttcatctgtaccacctcagccatccagaatcggttcaagtatgctcgggtcactcctgacacagactgggcccgcttgctgcaggaccacccctggctgctcagccagaacttggtagtcaagccagaccagctgatcaaacgtcgtggaaaacttggtctcgttggggtcaacctcactctggatggggtcaagtcctggctgaagccacggctgggacaggaagccacagttggcaaggccacaggcttcctcaagaactttctgatcgagcccttcgtcccccacagtcaggctgaggagttctatgtctgcatctatgccacccgagaaggggactacgtcctgttccaccacgaggggggtgtggacgtgggtgatgtggacgccaaggcccagaagctgcttgttggcgtggatgagaaactgaatcctgaggacatcaaaaaacacctgttggtccacgcccctgaagacaagaaagaaattctggccagttttatctccggcctcttcaatttctacgaggacttgtacttcacctacctcgagatcaatccccttgtagtgaccaaagatggagtctatgtccttgacttggcggccaaggtggacgccactgccgactacatctgcaaagtgaagtggggtgacatcgagttccctccccccttcgggcgggaggcatatccagaggaagcctacattgcagacctcgatgccaaaagtggggcaagcctgaagctgaccttgctgaaccccaaagggaggatctggaccatggtggccgggggtggcgcctctgtcgtgtacagcgataccatctgtgatctagggggtgtcaacgagctggcaaactatggggagtactcaggcgcccccagcgagcagcagacctatgactatgccaagactatcctctccctcatgacccgagagaagcacccagatggcaagatcctcatcattggaggcagcatcgcaaacttcaccaacgtggctgccacgttcaagggcatcgtgagagcaattcgagattaccagggccccctgaaggagcacgaagtcacaatctttgtccgaagaggtggccccaactatcaggagggcttacgggtgatgggagaagtcgggaagaccactgggatccccatccatgtctttggcacagagactcacatgacggccattgtgggcatggccctgggccaccggcccatccccaaccagccacccacagcggcccacactgcaaacttcctcctcaacgccagcgggagcacatcgacgccagcccccagcaggacagcatctttttctgagtccagggccgatgaggtggcgcctgcaaagaaggccaagcctgccatgccacaagattcagtcccaagtccaagatccctgcaaggaaagagcaccaccctcttcagccgccacaccaaggccattgtgtggggcatgcagacccgggccgtgcaaggcatgctggactttgactatgtctgctcccgagacgagccctcagtggctgccatggtctaccctttcactggggaccacaagcagaagttttactgggggcacaaagagatcctgatccctgtcttcaagaacatggctgatgccatgaggaagcatccggaggtagatgtgctcatcaactttgcctctctccgctctgcctatgacagcaccatggagaccatgaactatgcccagatccggaccatcgccatcatagctgaaggcatccctgaggccctcacgagaaagctgatcaagaaggcggaccagaagggagtgaccatcatcggacctgccactgttggaggcatcaagcctgggtgctttaagattggcaacacaggtgggatgctggacaacatcctggcctccaaactgtaccgcccaggcagcgtggcctatgtctcacgttccggaggcatgtccaacgagctcaacaatatcatctctcggaccacggatggcgtctatgagggcgtggccattggtggggacaggtacccgggctccacattcatggatcatgtgttacgctatcaggacactccaggagtcaaaatgattgtggttcttggagagattgggggcactgaggaatataagatttgccggggcatcaaggagggccgcctcactaagcccatcgtctgctggtgcatcgggacgtgtgccaccatgttctcctctgaggtccagtttggccatgctggagcttgtgccaaccaggcttctgaaactgcagtagccaagaaccaggctttgaaggaagcaggagtgtttgtgccccggagctttgatgagcttggagagatcatccagtctgtatacgaagatctcgtggccaatggagtcattgtacctgcccaggaggtgccgcccccaaccgtgcccatggactactcctgggccagggagcttggtttgatccgcaaacctgcctcgttcatgaccagcatctgcgatgagcgaggacaggagctcatctacgcgggcatgcccatcactgaggtcttcaaggaagagatgggcattggcggggtcctcggcctcctctggttccagaaaaggttgcctaagtactcttgccagttcattgagatgtgtctgatggtgacagctgatcacgggccagccgtctctggagcccacaacaccatcatttgtgcgcgagctgggaaagacctggtctccagcctcacctcggggctgctcaccatcggggatcggtttgggggtgccttggatgcagcagccaagatgttcagtaaagcctttgacagtggcattatccccatggagtttgtgaacaagatgaagaaggaagggaagctgatcatgggcattggtcaccgagtgaagtcgataaacaacccagacatgcgagtgcagatcctcaaagattacgtcaggcagcacttccctgccactcctctgctcgattatgcactggaagtagagaagattaccacctcgaagaagccaaatcttatcctgaatgtagatggtctcatcggagtcgcatttgtagacatgcttagaaactgtgggtcctttactcgggaggaagctgatgaatatattgacattggagccctcaatggcatctttgtgctgggaaggagtatggggttcattggacactatcttgatcagaagaggctgaagcaggggctgtatcgtcatccgtgggatgatatttcatatgttcttccggaacacatgagcatgtaacagagccaggaaccctactgcagtaaactgaagacaagatctcttcccccaagaaaaagtgtacagacagctggcagtggagcctgctttatttagcaggggcctggaatgtaaacagccactggggtacaggcaccgaagaccaacatccacaggctaacaccccttcagtccacacaaagaagcttcatattttttttataagcatagaaataaaaaccaagccaatatttgtgactttgctctgctacctgctgtatttattatatggaagcatctaagtactgtcaggatggggtcttcctcattgtagggcgttaggatgttgctttctttttccattagttaaacatttttttctcctttggaggaagggaatgaaacatttatggcctcaagatactatacatttaaagcaccccaatgtctctctttttttttttttacttccctttcttcttccttatataacatgaagaacattgtattaatctgatttttaaagatctttttgtatgttacgtgttaagggcttgtttggtatcccactgaaatgttctgtgttgcagaccagagtctgtttatgtcagggggatggggccattgcatccttagccattgtcacaaaatatgtggagtagtaacttaatatgtaaagttgtaacatacatacatttaaaatggaaatgcagaaagctgtgaaatgtcttgtgtcttatgttctctgtatttatgcagctgatttgtctgtctgtaactgaagtgtgggtccaaggactcctaactactttgcatctgtaatccacaaagattctgggcagctgccacctcagtctcttctctgtattatcatagtctggtttaaataaactatatagtaacaatgaaggcatactgctggc

SEQ ID NO: 388 - DNA, 4318 bp, Homo sapiens
  source 1..4318: mol_type = genomic DNA
agccgatgggggcggggaaaagtccggctgggccgggacaaaagccggatcccgggaagctaccggctgctggggtgctccggattttgcggggttcgtcgggcctgtggaagaagcgccgcgcacggacttcggcagaggtagagcaggtctctctgcagccatgtcggccaaggcaatttcagagcagacgggcaaagaactcctttacaagttcatctgtaccacctcagccatccagaatcggttcaagtatgctcgggtcactcctgacacagactgggcccgcttgctgcaggaccacccctggctgctcagccagaacttggtagtcaagccagaccagctgatcaaacgtcgtggaaaacttggtctcgttggggtcaacctcactctggatggggtcaagtcctggctgaagccacggctgggacaggaagccacagttggcaaggccacaggcttcctcaagaactttctgatcgagcccttcgtcccccacagtcaggctgaggagttctatgtctgcatctatgccacccgagaaggggactacgtcctgttccaccacgaggggggtgtggacgtgggtgatgtggacgccaaggcccagaagctgcttgttggcgtggatgagaaactgaatcctgaggacatcaaaaaacacctgttggtccacgcccctgaagacaagaaagaaattctggccagttttatctccggcctcttcaatttctacgaggacttgtacttcacctacctcgagatcaatccccttgtagtgaccaaagatggagtctatgtccttgacttggcggccaaggtggacgccactgccgactacatctgcaaagtgaagtggggtgacatcgagttccctccccccttcgggcgggaggcatatccagaggaagcctacattgcagacctcgatgccaaaagtggggcaagcctgaagctgaccttgctgaaccccaaagggaggatctggaccatggtggccgggggtggcgcctctgtcgtgtacagcgataccatctgtgatctagggggtgtcaacgagctggcaaactatggggagtactcaggcgcccccagcgagcagcagacctatgactatgccaagactatcctctccctcatgacccgagagaagcacccagatggcaagatcctcatcattggaggcagcatcgcaaacttcaccaacgtggctgccacgttcaagggcatcgtgagagcaattcgagattaccagggccccctgaaggagcacgaagtcacaatctttgtccgaagaggtggccccaactatcaggagggcttacgggtgatgggagaagtcgggaagaccactgggatccccatccatgtctttggcacagagactcacatgacggccattgtgggcatggccctgggccaccggcccatccccaaccagccacccacagcggcccacactgcaaacttcctcctcaacgccagcgggagcacatcgacgccagcccccagcaggacagcatctttttctgagtccagggccgatgaggtggcgcctgcaaagaaggccaagcctgccatgccacaaggaaagagcaccaccctcttcagccgccacaccaaggccattgtgtggggcatgcagacccgggccgtgcaaggcatgctggactttgactatgtctgctcccgagacgagccctcagtggctgccatggtctaccctttcactggggaccacaagcagaagttttactgggggcacaaagagatcctgatccctgtcttcaagaacatggctgatgccatgaggaagcatccggaggtagatgtgctcatcaactttgcctctctccgctctgcctatgacagcaccatggagaccatgaactatgcccagatccggaccatcgccatcatagctgaaggcatccctgaggccctcacgagaaagctgatcaagaaggcggaccagaagggagtgaccatcatcggacctgccactgttggaggcatcaagcctgggtgctttaagattggcaacacaggtgggatgctggacaacatcctggcctccaaactgtaccgcccaggcagcgtggcctatgtctcacgttccggaggcatgtccaacgagctcaacaatatcatctctcggaccacggatggcgtctatgagggcgtggccattggtggggacaggtacccgggctccacattcatggatcatgtgttacgctatcaggacactccaggagtcaaaatgattgtggttcttggagagattgggggcactgaggaatataagatttgccggggcatcaaggagggccgcctcactaagcccatcgtctgctggtgcatcgggacgtgtgccaccatgttctcctctgaggtccagtttggccatgctggagcttgtgccaaccaggcttctgaaactgcagtagccaagaaccaggctttgaaggaagcaggagtgtttgtgccccggagctttgatgagcttggagagatcatccagtctgtatacgaagatctcgtggccaatggagtcattgtacctgcccaggaggtgccgcccccaaccgtgcccatggactactcctgggccagggagcttggtttgatccgcaaacctgcctcgttcatgaccagcatctgcgatgagcgaggacaggagctcatctacgcgggcatgcccatcactgaggtcttcaaggaagagatgggcattggcggggtcctcggcctcctctggttccagaaaaggttgcctaagtactcttgccagttcattgagatgtgtctgatggtgacagctgatcacgggccagccgtctctggagcccacaacaccatcatttgtgcgcgagctgggaaagacctggtctccagcctcacctcggggctgctcaccatcggggatcggtttgggggtgccttggatgcagcagccaagatgttcagtaaagcctttgacagtggcattatccccatggagtttgtgaacaagatgaagaaggaagggaagctgatcatgggcattggtcaccgagtgaagtcgataaacaacccagacatgcgagtgcagatcctcaaagattacgtcaggcagcacttccctgccactcctctgctcgattatgcactggaagtagagaagattaccacctcgaagaagccaaatcttatcctgaatgtagatggtctcatcggagtcgcatttgtagacatgcttagaaactgtgggtcctttactcgggaggaagctgatgaatatattgacattggagccctcaatggcatctttgtgctgggaaggagtatggggttcattggacactatcttgatcagaagaggctgaagcaggggctgtatcgtcatccgtgggatgatatttcatatgttcttccggaacacatgagcatgtaacagagccaggaaccctactgcagtaaactgaagacaagatctcttcccccaagaaaaagtgtacagacagctggcagtggagcctgctttatttagcaggggcctggaatgtaaacagccactggggtacaggcaccgaagaccaacatccacaggctaacaccccttcagtccacacaaagaagcttcatattttttttataagcatagaaataaaaaccaagccaatatttgtgactttgctctgctacctgctgtatttattatatggaagcatctaagtactgtcaggatggggtcttcctcattgtagggcgttaggatgttgctttctttttccattagttaaacatttttttctcctttggaggaagggaatgaaacatttatggcctcaagatactatacatttaaagcaccccaatgtctctctttttttttttttacttccctttcttcttccttatataacatgaagaacattgtattaatctgatttttaaagatctttttgtatgttacgtgttaagggcttgtttggtatcccactgaaatgttctgtgttgcagaccagagtctgtttatgtcagggggatggggccattgcatccttagccattgtcacaaaatatgtggagtagtaacttaatatgtaaagttgtaacatacatacatttaaaatggaaatgcagaaagctgtgaaatgtcttgtgtcttatgttctctgtatttatgcagctgatttgtctgtctgtaactgaagtgtgggtccaaggactcctaactactttgcatctgtaatccacaaagattctgggcagctgccacctcagtctcttctctgtattatcatagtctggtttaaataaactatatagt

SEQ ID NO: 389 - DNA, 3535 bp, Homo sapiens
  source 1..3535: mol_type = genomic DNA
gtagagcaggtctctctgcagccatgtcggccaaggcaatttcagagcagacgggcaaagaactcctttacaagttcatctgtaccacctcagccatccagaatcggttcaagtatgctcgggtcactcctgacacagactgggcccgcttgctgcaggaccacccctggctgctcagccagaacttggtagtcaagccagaccagctgatcaaacgtcgtggaaaacttggtctcgttggggtcaacctcactctggatggggtcaagtcctggctgaagccacggctgggacaggaagccacagttggcaaggccacaggcttcctcaagaactttctgatcgagcccttcgtcccccacagtcaggctgaggagttctatgtctgcatctatgccacccgagaaggggactacgtcctgttccaccacgaggggggtgtggacgtgggtgatgtggacgccaaggcccagaagctgcttgttggcgtggatgagaaactgaatcctgaggacatcaaaaaacacctgttggtccacgcccctgaagacaagaaagaaattctggccagttttatctccggcctcttcaatttctacgaggacttgtacttcacctacctcgagatcaatccccttgtagtgaccaaagatggagtctatgtccttgacttggcggccaaggtggacgccactgccgactacatctgcaaagtgaagtggggtgacatcgagttccctccccccttcgggcgggaggcatatccagaggaagcctacattgcagacctcgatgccaaaagtggggcaagcctgaagctgaccttgctgaaccccaaagggaggatctggaccatggtggccgggggtggcgcctctgtcgtgtacagcgataccatctgtgatctagggggtgtcaacgagctggcaaactatggggagtactcaggcgcccccagcgagcagcagacctatgactatgccaagactatcctctccctcatgacccgagagaagcacccagatggcaagatcctcatcattggaggcagcatcgcaaacttcaccaacgtggctgccacgttcaagggcatcgtgagagcaattcgagattaccagggccccctgaaggagcacgaagtcacaatctttgtccgaagaggtggccccaactatcaggagggcttacgggtgatgggagaagtcgggaagaccactgggatccccatccatgtctttggcacagagactcacatgacggccattgtgggcatggccctgggccaccggcccatccccaaccagccacccacagcggcccacactgcaaacttcctcctcaacgccagcgggagcacatcgacgccagcccccagcaggacagcatctttttctgagtccagggccgatgaggtggcgcctgcaaagaaggccaagcctgccatgccacaaggaaagagcaccaccctcttcagccgccacaccaaggccattgtgtggggcatgcagacccgggccgtgcaaggcatgctggactttgactatgtctgctcccgagacgagccctcagtggctgccatggtctaccctttcactggggaccacaagcagaagttttactgggggcacaaagagatcctgatccctgtcttcaagaacatggctgatgccatgaggaagcatccggaggtagatgtgctcatcaactttgcctctctccgctctgcctatgacagcaccatggagaccatgaactatgcccagatccggaccatcgccatcatagctgaaggcatccctgaggccctcacgagaaagctgatcaagaaggcggaccagaagggagtgaccatcatcggacctgccactgttggaggcatcaagcctgggtgctttaagattggcaacacaggtgggatgctggacaacatcctggcctccaaactgtaccgcccaggcagcgtggcctatgtctcacgttccggaggcatgtccaacgagctcaacaatatcatctctcggaccacggatggcgtctatgagggcgtggccattggtggggacaggtacccgggctccacattcatggatcatgtgttacgctatcaggacactccaggagtcaaaatgattgtggttcttggagagattgggggcactgaggaatataagatttgccggggcatcaaggagggccgcctcactaagcccatcgtctgctggtgcatcgggacgtgtgccaccatgttctcctctgaggtccagtttggccatgctggagcttgtgccaaccaggcttctgaaactgcagtagccaagaaccaggctttgaaggaagcaggagtgtttgtgccccggagctttgatgagcttggagagatcatccagtctgtatacgaagatctcgtggccaatggagtcattgtacctgcccaggaggtgccgcccccaaccgtgcccatggactactcctgggccagggagcttggtttgatccgcaaacctgcctcgttcatgaccagcatctgcgatgagcgaggacaggagctcatctacgcgggcatgcccatcactgaggtcttcaaggaagagatgggcattggcggggtcctcggcctcctctggttccagaaaaggttgcctaagtactcttgccagttcattgagatgtgtctgatggtgacagctgatcacgggccagccgtctctggagcccacaacaccatcatttgtgcgcgagctgggaaagacctggtctccagcctcacctcggggctgctcaccatcggggatcggtttgggggtgccttggatgcagcagccaagatgttcagtaaagcctttgacagtggcattatccccatggagtttgtgaacaagatgaagaaggaagggaagctgatcatgggcattggtcaccgagtgaagtcgataaacaacccagacatgcgagtgcagatcctcaaagattacgtcaggcagcacttccctgccactcctctgctcgattatgcactggaagtagagaagattaccacctcgaagaagccaaatcttatcctgaatgtagatggtctcatcggagtcgcatttgtagacatgcttagaaactgtgggtcctttactcgggaggaagctgatgaatatattgacattggagccctcaatggcatctttgtgctgggaaggagtatggggttcattggacactatcttgatcagaagaggctgaagcaggggctgtatcgtcatccgtgggatgatatttcatatgttcttccggaacacatgagcatgtaacagagccaggaaccctactgcagtaaactgaagacaagatctcttcccccaagaaaaagtgtacagacagctggcagtggagcctgctttatttagcaggggcctggaatgtaaacagccactggggtacaggcaccgaagaccaacatccacaggctaacaccccttcagtccacacaaagaagcttcatattttttttataagcatagaaataaaaaccaagccaatatttgtg

SEQ ID NO: 390 - DNA, 4352 bp, Homo sapiens
  source 1..4352: mol_type = genomic DNA
agccgatgggggcggggaaaagtccggctgggccgggacaaaagccggatcccgggaagctaccggctgctggggtgctccggattttgcggggttcgtcgggcctgtggaagaagcgccgcgcacggacttcggcagagacaggtagagcaggtctctctgcagccatgtcggccaaggcaatttcagagcagacgggcaaagaactcctttacaagttcatctgtaccacctcagccatccagaatcggttcaagtatgctcgggtcactcctgacacagactgggcccgcttgctgcaggaccacccctggctgctcagccagaacttggtagtcaagccagaccagctgatcaaacgtcgtggaaaacttggtctcgttggggtcaacctcactctggatggggtcaagtcctggctgaagccacggctgggacaggaagccacagttggcaaggccacaggcttcctcaagaactttctgatcgagcccttcgtcccccacagtcaggctgaggagttctatgtctgcatctatgccacccgagaaggggactacgtcctgttccaccacgaggggggtgtggacgtgggtgatgtggacgccaaggcccagaagctgcttgttggcgtggatgagaaactgaatcctgaggacatcaaaaaacacctgttggtccacgcccctgaagacaagaaagaaattctggccagttttatctccggcctcttcaatttctacgaggacttgtacttcacctacctcgagatcaatccccttgtagtgaccaaagatggagtctatgtccttgacttggcggccaaggtggacgccactgccgactacatctgcaaagtgaagtggggtgacatcgagttccctccccccttcgggcgggaggcatatccagaggaagcctacattgcagacctcgatgccaaaagtggggcaagcctgaagctgaccttgctgaaccccaaagggaggatctggaccatggtggccgggggtggcgcctctgtcgtgtacagcgataccatctgtgatctagggggtgtcaacgagctggcaaactatggggagtactcaggcgcccccagcgagcagcagacctatgactatgccaagactatcctctccctcatgacccgagagaagcacccagatggcaagatcctcatcattggaggcagcatcgcaaacttcaccaacgtggctgccacgttcaagggcatcgtgagagcaattcgagattaccagggccccctgaaggagcacgaagtcacaatctttgtccgaagaggtggccccaactatcaggagggcttacgggtgatgggagaagtcgggaagaccactgggatccccatccatgtctttggcacagagactcacatgacggccattgtgggcatggccctgggccaccggcccatccccaaccagccacccacagcggcccacactgcaaacttcctcctcaacgccagcgggagcacatcgacgccagcccccagcaggacagcatctttttctgagtccagggccgatgaggtggcgcctgcaaagaaggccaagcctgccatgccacaagattcagtcccaagtccaagatccctgcaaggaaagagcaccaccctcttcagccgccacaccaaggccattgtgtggggcatgcagacccgggccgtgcaaggcatgctggactttgactatgtctgctcccgagacgagccctcagtggctgccatggtctaccctttcactggggaccacaagcagaagttttactgggggcacaaagagatcctgatccctgtcttcaagaacatggctgatgccatgaggaagcatccggaggtagatgtgctcatcaactttgcctctctccgctctgcctatgacagcaccatggagaccatgaactatgcccagatccggaccatcgccatcatagctgaaggcatccctgaggccctcacgagaaagctgatcaagaaggcggaccagaagggagtgaccatcatcggacctgccactgttggaggcatcaagcctgggtgctttaagattggcaacacaggtgggatgctggacaacatcctggcctccaaactgtaccgcccaggcagcgtggcctatgtctcacgttccggaggcatgtccaacgagctcaacaatatcatctctcggaccacggatggcgtctatgagggcgtggccattggtggggacaggtacccgggctccacattcatggatcatgtgttacgctatcaggacactccaggagtcaaaatgattgtggttcttggagagattgggggcactgaggaatataagatttgccggggcatcaaggagggccgcctcactaagcccatcgtctgctggtgcatcgggacgtgtgccaccatgttctcctctgaggtccagtttggccatgctggagcttgtgccaaccaggcttctgaaactgcagtagccaagaaccaggctttgaaggaagcaggagtgtttgtgccccggagctttgatgagcttggagagatcatccagtctgtatacgaagatctcgtggccaatggagtcattgtacctgcccaggaggtgccgcccccaaccgtgcccatggactactcctgggccagggagcttggtttgatccgcaaacctgcctcgttcatgaccagcatctgcgatgagcgaggacaggagctcatctacgcgggcatgcccatcactgaggtcttcaaggaagagatgggcattggcggggtcctcggcctcctctggttccagaaaaggttgcctaagtactcttgccagttcattgagatgtgtctgatggtgacagctgatcacgggccagccgtctctggagcccacaacaccatcatttgtgcgcgagctgggaaagacctggtctccagcctcacctcggggctgctcaccatcggggatcggtttgggggtgccttggatgcagcagccaagatgttcagtaaagcctttgacagtggcattatccccatggagtttgtgaacaagatgaagaaggaagggaagctgatcatgggcattggtcaccgagtgaagtcgataaacaacccagacatgcgagtgcagatcctcaaagattacgtcaggcagcacttccctgccactcctctgctcgattatgcactggaagtagagaagattaccacctcgaagaagccaaatcttatcctgaatgtagatggtctcatcggagtcgcatttgtagacatgcttagaaactgtgggtcctttactcgggaggaagctgatgaatatattgacattggagccctcaatggcatctttgtgctgggaaggagtatggggttcattggacactatcttgatcagaagaggctgaagcaggggctgtatcgtcatccgtgggatgatatttcatatgttcttccggaacacatgagcatgtaacagagccaggaaccctactgcagtaaactgaagacaagatctcttcccccaagaaaaagtgtacagacagctggcagtggagcctgctttatttagcaggggcctggaatgtaaacagccactggggtacaggcaccgaagaccaacatccacaggctaacaccccttcagtccacacaaagaagcttcatattttttttataagcatagaaataaaaaccaagccaatatttgtgactttgctctgctacctgctgtatttattatatggaagcatctaagtactgtcaggatggggtcttcctcattgtagggcgttaggatgttgctttctttttccattagttaaacatttttttctcctttggaggaagggaatgaaacatttatggcctcaagatactatacatttaaagcaccccaatgtctctctttttttttttttacttccctttcttcttccttatataacatgaagaacattgtattaatctgatttttaaagatctttttgtatgttacgtgttaagggcttgtttggtatcccactgaaatgttctgtgttgcagaccagagtctgtttatgtcagggggatggggccattgcatccttagccattgtcacaaaatatgtggagtagtaacttaatatgtaaagttgtaacatacatacatttaaaatggaaatgcagaaagctgtgaaatgtcttgtgtcttatgttctctgtatttatgcagctgatttgtctgtctgtaactgaagtgtgggtccaaggactcctaactactttgcatctgtaatccacaaagattctgggcagctgccacctcagtctcttctctgtattatcatagtctggtttaaataaactatatagt

SEQ ID NO: 391 - DNA, 2974 bp, Homo sapiens
  source 1..2974: mol_type = genomic DNA
gacaaaagccggatcccgggaagctaccggctgctggggtgctccggattttgcggggttcgtcgggcctgtggaagaagcgccgcgcacggacttcggcagaggtagagcaggtctctctgcagccatgtcggccaaggcaatttcagagcagacgggcaaagaactcctttacaagttcatctgtaccacctcagccatccagaatcggttcaagtatgctcgggtcactcctgacacagactgggcccgcttgctgcaggaccacccctggctgctcagccagaacttggtagtcaagccagaccagctgatcaaacgtcgtggaaaacttggtctcgttggggtcaacctcactctggatggggtcaagtcctggctgaagccacggctgggacaggaagccacaggcatcgtgagagcaattcgagattaccagggccccctgaaggagcacgaagtcacaatctttgtccgaagaggtggccccaactatcaggagggcttacgggtgatgggagaagtcgggaagaccactgggatccccatccatgtctttggcacagagactcacatgacggccattgtgggcatggccctgggccaccggcccatccccaaccagccacccacagcggcccacactgcaaacttcctcctcaacgccagcgggagcacatcgacgccagcccccagcaggacagcatctttttctgagtccagggccgatgaggtggcgcctgcaaagaaggccaagcctgccatgccacaaggaaagagcaccaccctcttcagccgccacaccaaggccattgtgtggggcatgcagacccgggccgtgcaaggcatgctggactttgactatgtctgctcccgagacgagccctcagtggctgccatggtctaccctttcactggggaccacaagcagaagttttactgggggcacaaagagatcctgatccctgtcttcaagaacatggctgatgccatgaggaagcatccggaggtagatgtgctcatcaactttgcctctctccgctctgcctatgacagcaccatggagaccatgaactatgcccagatccggaccatcgccatcatagctgaaggcatccctgaggccctcacgagaaagctgatcaagaaggcggaccagaagggagtgaccatcatcggacctgccactgttggaggcatcaagcctgggtgctttaagattggcaacacaggtgggatgctggacaacatcctggcctccaaactgtaccgcccaggcagcgtggcctatgtctcacgttccggaggcatgtccaacgagctcaacaatatcatctctcggaccacggatggcgtctatgagggcgtggccattggtggggacaggtacccgggctccacattcatggatcatgtgttacgctatcaggacactccaggagtcaaaatgattgtggttcttggagagattgggggcactgaggaatataagatttgccggggcatcaaggagggccgcctcactaagcccatcgtctgctggtgcatcgggacgtgtgccaccatgttctcctctgaggtccagtttggccatgctggagcttgtgccaaccaggcttctgaaactgcagtagccaagaaccaggctttgaaggaagcaggagtgtttgtgccccggagctttgatgagcttggagagatcatccagtctgtatacgaagatctcgtggccaatggagtcattgtacctgcccaggaggtgccgcccccaaccgtgcccatggactactcctgggccagggagcttggtttgatccgcaaacctgcctcgttcatgaccagcatctgcgatgagcgaggacaggagctcatctacgcgggcatgcccatcactgaggtcttcaaggaagagatgggcattggcggggtcctcggcctcctctggttccagaaaaggttgcctaagtactcttgccagttcattgagatgtgtctgatggtgacagctgatcacgggccagccgtctctggagcccacaacaccatcatttgtgcgcgagctgggaaagacctggtctccagcctcacctcggggctgctcaccatcggggatcggtttgggggtgccttggatgcagcagccaagatgttcagtaaagcctttgacagtggcattatccccatggagtttgtgaacaagatgaagaaggaagggaagctgatcatgggcattggtcaccgagtgaagtcgataaacaacccagacatgcgagtgcagatcctcaaagattacgtcaggcagcacttccctgccactcctctgctcgattatgcactggaagtagagaagattaccacctcgaagaagccaaatcttatcctgaatgtagatggtctcatcggagtcgcatttgtagacatgcttagaaactgtgggtcctttactcgggaggaagctgatgaatatattgacattggagccctcaatggcatctttgtgctgggaaggagtatggggttcattggacactatcttgatcagaagaggctgaagcaggggctgtatcgtcatccgtgggatgatatttcatatgttcttccggaacacatgagcatgtaacagagccaggaaccctactgcagtaaactgaagacaagatctcttcccccaagaaaaagtgtacagacagctggcagtggagcctgctttatttagcaggggcctggaatgtaaacagccactggggtacaggcaccgaagaccaacatccacaggctaacaccccttcagtccacacaaagaagcttcatattttttttataagcatagaaataaaaaccaagccaatatttgtgactttgctctgctacctgctgtatttattatatggaagcatctaagtactgtcaggatggggtcttcctcattgtagggcgttaggatgttgctttctttttccattagttaaacatt

SEQ ID NO: 392 - DNA, 2214 bp, Homo sapiens
  source 1..2214: mol_type = genomic DNA
accttctttgcggctcggccattttgtcccagtcagtccggaggctgcggctgcagaagtaccgcctgcggagtaactgcaaagatgctgtccgtgcgcgttgctgcggccgtggtccgcgcccttcctcggcgggccggactggtgagcaccgaaggccggcatgatgcaggcggccgggtggggctgcagggtggtggtgcgccggctcgggcgctctctgcaggagggcgaggggctgtggcgaatgccgccatcttgcacccgtggcttctccggctggacagagcaggcgacacaggtgcccttttgctcgtcacctgcgcagaggcagaatggtacagggcagacagttaactcgatggtgtccagagacagggcctcaagattcctgtcttcggctgacagcggccctagaagggggatcttgggtgaaggtcagggcttgggcgctagctctccgaggcctgttctgaatcggtctccagaaatgctttgggttcatctttcattgctgcaaggaacttccatgcctctaacactcatcttcaaaagactgggactgctgagatgtcctctattcttgaagagcgtattcttggagctgatacctctgttgatcttgaagaaactgggcgtgtcttaagtattggtgatggtattgcccgcgtacatgggctgaggaatgttcaagcagaagaaatggtagagttttcttcaggcttaaagggtatgtccttgaacttggaacctgacaatgttggtgttgtcgtgtttggaaatgataaactaattaaggaaggagatatagtgaagaggacaggagccattgtggacgttccagttggtgaggagctgttgggtcgtgtagttgatgcccttggtaatgctattgatggaaagggtccaattggttccaagacgcgtaggcgagttggtctgaaagcccccggtatcattcctcgaatttcagtgcgggaaccaatgcagactggcattaaggctgtggatagcttggtgccaattggtcgtggtcagcgtgaactgattattggtgaccgacagactgggaaaacctcaattgctattgacacaatcattaaccagaaacgtttcaatgatggatctgatgaaaagaagaagctgtactgtatttatgttgctattggtcaaaagagatccactgttgcccagttggtgaagagacttacagatgcagatgccatgaagtacaccattgtggtgtcggctacggcctcggatgctgccccacttcagtacctggctccttactctggctgttccatgggagagtattttagagacaatggcaaacatgctttgatcatctatgacgacttatccaaacaggctgttgcttaccgtcagatgtctctgttgctccgccgaccccctggtcgtgaggcctatcctggtgatgtgttctacctacactcccggttgctggagagagcagccaaaatgaacgatgcttttggtggtggctccttgactgctttgccagtcatagaaacacaggctggtgatgtgtctgcttacattccaacaaatgtcatttccatcactgacggacagatcttcttggaaacagaattgttctacaaaggtatccgccctgcaattaacgttggtctgtctgtatctcgtgtcggatccgctgcccaaaccagggctatgaagcaggtagcaggtaccatgaagctggaattggctcagtatcgtgaggttgctgcttttgcccagttcggttctgacctcgatgctgccactcaacaacttttgagtcgtggcgtgcgtctaactgagttgctgaagcaaggacagtattctcccatggctattgaagaacaagtggctgttatctatgcgggtgtaaggggatatcttgataaactggagcccagcaagattacaaagtttgagaatgctttcttgtctcatgtcgtcagccagcaccaagccttgttgggcactatcagggctgatggaaagatctcagaacaatcagatgcaaagctgaaagagattgtaacaaatttcttggctggatttgaagcttaaactcctgtggattcacatcaaataccagttcagttttgtcattgttctagtaaattagttccatttgtaaaagggttactctcatactccttatgtacagaaatcacatgaaaaataaaggttccataatgc

SEQ ID NO: 393 - DNA, 1931 bp, Homo sapiens
  source 1..1931: mol_type = genomic DNA
attttgtcccagtcagtccggaggctgcggctgcagaagtaccgcctgcggagtaactgcaaagatgctgtccgtgcgcgttgctgcggccgtggtccgcgcccttcctcggcgggccggactggtctccagaaatgctttgggttcatctttcattgctgcaaggaacttccatgcctctaacactcatcttcaaaagactggtaagttattatttctcagtctacgccgcacttactagatgaagatataaattacatacatcgtataactgtgggactgctgagatgtcctctattcttgaagagcgtattcttggagctgatacctctgttgatcttgaagaaactgggcgtgtcttaagtattggtgatggtattgcccgcgtacatgggctgaggaatgttcaagcagaagaaatggtagagttttcttcaggcttaaagggtatgtccttgaacttggaacctgacaatgttggtgttgtcgtgtttggaaatgataaactaattaaggaaggagatatagtgaagaggacaggagccattgtggacgttccagttggtgaggagctgttgggtcgtgtagttgatgcccttggtaatgctattgatggaaagggtccaattggttccaagacgcgtaggcgagttggtctgaaagcccccggtatcattcctcgaatttcagtgcgggaaccaatgcagactggcattaaggctgtggatagcttggtgccaattggtcgtggtcagcgtgaactgattattggtgaccgacagactgggaaaacctcaattgctattgacacaatcattaaccagaaacgtttcaatgatggatctgatgaaaagaagaagctgtactgtatttatgttgctattggtcaaaagagatccactgttgcccagttggtgaagagacttacagatgcagatgccatgaagtacaccattgtggtgtcggctacggcctcggatgctgccccacttcagtacctggctccttactctggctgttccatgggagagtattttagagacaatggcaaacatgctttgatcatctatgacgacttatccaaacaggctgttgcttaccgtcagatgtctctgttgctccgccgaccccctggtcgtgaggcctatcctggtgatgtgttctacctacactcccggttgctggagagagcagccaaaatgaacgatgcttttggtggtggctccttgactgctttgccagtcatagaaacacaggctggtgatgtgtctgcttacattccaacaaatgtcatttccatcactgacggacagatcttcttggaaacagaattgttctacaaaggtatccgccctgcaattaacgttggtctgtctgtatctcgtgtcggatccgctgcccaaaccagggctatgaagcaggtagcaggtaccatgaagctggaattggctcagtatcgtgaggttgctgcttttgcccagttcggttctgacctcgatgctgccactcaacaacttttgagtcgtggcgtgcgtctaactgagttgctgaagcaaggacagtattctcccatggctattgaagaacaagtggctgttatctatgcgggtgtaaggggatatcttgataaactggagcccagcaagattacaaagtttgagaatgctttcttgtctcatgtcgtcagccagcaccaagccttgttgggcactatcagggctgatggaaagatctcagaacaatcagatgcaaagctgaaagagattgtaacaaatttcttggctggatttgaagcttaaactcctgtggattcacatcaaataccagttcagttttgtcattgttctagtaaattagttccatttgtaaaagggttactctcatactccttatgtacagaaatcacatgaaaaataaaggttccataatgc

SEQ ID NO: 394 - DNA, 1793 bp, Homo sapiens
  source 1..1793: mol_type = genomic DNA
cattttgtcccagtcagtccggaggctgcggctgcagaagtaccgcctgcggagtaactgcaaagatgctgtccgtgcgcgttgctgcggccgtggtccgcgcccttcctcggcgggccggactggtctccagaaatgctttgggttcatctttcattgctgcaaggaacttccatgcctctaacactcatcttcaaaagactgggactgctgagatgtcctctattcttgaagagcgtattcttggagctgatacctctgttgatcttgaagaaactgggcgtgtcttaagtattggtgatggtattgcccgcgtacatgggctgaggaatgttcaagcagaagaaatggtagagttttcttcaggcttaaagggtatgtccttgaacttggaacctgacaatgttggtgttgtcgtgtttggaaatgataaactaattaaggaaggagatatagtgaagaggacaggagccattgtggacggtccaattggttccaagacgcgtaggcgagttggtctgaaagcccccggtatcattcctcgaatttcagtgcgggaaccaatgcagactggcattaaggctgtggatagcttggtgccaattggtcgtggtcagcgtgaactgattattggtgaccgacagactgggaaaacctcaattgctattgacacaatcattaaccagaaacgtttcaatgatggatctgatgaaaagaagaagctgtactgtatttatgttgctattggtcaaaagagatccactgttgcccagttggtgaagagacttacagatgcagatgccatgaagtacaccattgtggtgtcggctacggcctcggatgctgccccacttcagtacctggctccttactctggctgttccatgggagagtattttagagacaatggcaaacatgctttgatcatctatgacgacttatccaaacaggctgttgcttaccgtcagatgtctctgttgctccgccgaccccctggtcgtgaggcctatcctggtgatgtgttctacctacactcccggttgctggagagagcagccaaaatgaacgatgcttttggtggtggctccttgactgctttgccagtcatagaaacacaggctggtgatgtgtctgcttacattccaacaaatgtcatttccatcactgacggacagatcttcttggaaacagaattgttctacaaaggtatccgccctgcaattaacgttggtctgtctgtatctcgtgtcggatccgctgcccaaaccagggctatgaagcaggtagcaggtaccatgaagctggaattggctcagtatcgtgaggttgctgcttttgcccagttcggttctgacctcgatgctgccactcaacaacttttgagtcgtggcgtgcgtctaactgagttgctgaagcaaggacagtattctcccatggctattgaagaacaagtggctgttatctatgcgggtgtaaggggatatcttgataaactggagcccagcaagattacaaagtttgagaatgctttcttgtctcatgtcgtcagccagcaccaagccttgttgggcactatcagggctgatggaaagatctcagaacaatcagatgcaaagctgaaagagattgtaacaaatttcttggctggatttgaagcttaaactcctgtggattcacatcaaataccagttcagttttgtcattgttctagtaaattagttccatttgtaaaagggttactctcatactccttatgtacagaaatcacatgaaaaataaaggttccataatgc

SEQ ID NO: 395 - DNA, 1945 bp, Homo sapiens
  source 1..1945: mol_type = genomic DNA
tctggcattgcaagcctcgcttcgttgccacttcccagctcttcccgccttccgcggtataatcaacactacgagagatagagccgcctagaaccagtccggaggctgcggctgcagaagtaccgcctgcggagtaactgcaaagatgctgtccgtgcgcgttgctgcggccgtggtccgcgcccttcctcggcgggccggactggtctccagaaatgctttgggttcatctttcattgctgcaaggaacttccatgcctctaacactcatcttcaaaagactgggactgctgagatgtcctctattcttgaagagcgtattcttggagctgatacctctgttgatcttgaagaaactgggcgtgtcttaagtattggtgatggtattgcccgcgtacatgggctgaggaatgttcaagcagaagaaatggtagagttttcttcaggcttaaagggtatgtccttgaacttggaacctgacaatgttggtgttgtcgtgtttggaaatgataaactaattaaggaaggagatatagtgaagaggacaggagccattgtggacgttccagttggtgaggagctgttgggtcgtgtagttgatgcccttggtaatgctattgatggaaagggtccaattggttccaagacgcgtaggcgagttggtctgaaagcccccggtatcattcctcgaatttcagtgcgggaaccaatgcagactggcattaaggctgtggatagcttggtgccaattggtcgtggtcagcgtgaactgattattggtgaccgacagactgggaaaacctcaattgctattgacacaatcattaaccagaaacgtttcaatgatggatctgatgaaaagaagaagctgtactgtatttatgttgctattggtcaaaagagatccactgttgcccagttggtgaagagacttacagatgcagatgccatgaagtacaccattgtggtgtcggctacggcctcggatgctgccccacttcagtacctggctccttactctggctgttccatgggagagtattttagagacaatggcaaacatgctttgatcatctatgacgacttatccaaacaggctgttgcttaccgtcagatgtctctgttgctccgccgaccccctggtcgtgaggcctatcctggtgatgtgttctacctacactcccggttgctggagagagcagccaaaatgaacgatgcttttggtggtggctccttgactgctttgccagtcatagaaacacaggctggtgatgtgtctgcttacattccaacaaatgtcatttccatcactgacggacagatcttcttggaaacagaattgttctacaaaggtatccgccctgcaattaacgttggtctgtctgtatctcgtgtcggatccgctgcccaaaccagggctatgaagcaggtagcaggtaccatgaagctggaattggctcagtatcgtgaggttgctgcttttgcccagttcggttctgacctcgatgctgccactcaacaacttttgagtcgtggcgtgcgtctaactgagttgctgaagcaaggacagtattctcccatggctattgaagaacaagtggctgttatctatgcgggtgtaaggggatatcttgataaactggagcccagcaagattacaaagtttgagaatgctttcttgtctcatgtcgtcagccagcaccaagccttgttgggcactatcagggctgatggaaagatctcagaacaatcagatgcaaagctgaaagagattgtaacaaatttcttggctggatttgaagcttaaactcctgtggattcacatcaaataccagttcagttttgtcattgttctagtaaattagttccatttgtaaaagggttactctcatactccttatgtacagaaatcacatgaaaaataaaggttccataatgcatagtt

SEQ ID NO: 396 - DNA, 1916 bp, Homo sapiens
  source 1..1916: mol_type = genomic DNA
ggggcagtacttccgggtcaggtgggccggctgtcttgaccttctttgcggctcggccattttgtcccagtcagtccggaggctgcggctgcagaagtaccgcctgcggagtaactgcaaagatgctgtccgtgcgcgttgctgcggccgtggtccgcgcccttcctcggcgggccggactggtctccagaaatgctttgggttcatctttcattgctgcaaggaacttccatgcctctaacactcatcttcaaaagactgggactgctgagatgtcctctattcttgaagagcgtattcttggagctgatacctctgttgatcttgaagaaactgggcgtgtcttaagtattggtgatggtattgcccgcgtacatgggctgaggaatgttcaagcagaagaaatggtagagttttcttcaggcttaaagggtatgtccttgaacttggaacctgacaatgttggtgttgtcgtgtttggaaatgataaactaattaaggaaggagatatagtgaagaggacaggagccattgtggacgttccagttggtgaggagctgttgggtcgtgtagttgatgcccttggtaatgctattgatggaaagggtccaattggttccaagacgcgtaggcgagttggtctgaaagcccccggtatcattcctcgaatttcagtgcgggaaccaatgcagactggcattaaggctgtggatagcttggtgccaattggtcgtggtcagcgtgaactgattattggtgaccgacagactgggaaaacctcaattgctattgacacaatcattaaccagaaacgtttcaatgatggatctgatgaaaagaagaagctgtactgtatttatgttgctattggtcaaaagagatccactgttgcccagttggtgaagagacttacagatgcagatgccatgaagtacaccattgtggtgtcggctacggcctcggatgctgccccacttcagtacctggctccttactctggctgttccatgggagagtattttagagacaatggcaaacatgctttgatcatctatgacgacttatccaaacaggctgttgcttaccgtcagatgtctctgttgctccgccgaccccctggtcgtgaggcctatcctggtgatgtgttctacctacactcccggttgctggagagagcagccaaaatgaacgatgcttttggtggtggctccttgactgctttgccagtcatagaaacacaggctggtgatgtgtctgcttacattccaacaaatgtcatttccatcactgacggacagatcttcttggaaacagaattgttctacaaaggtatccgccctgcaattaacgttggtctgtctgtatctcgtgtcggatccgctgcccaaaccagggctatgaagcaggtagcaggtaccatgaagctggaattggctcagtatcgtgaggttgctgcttttgcccagttcggttctgacctcgatgctgccactcaacaacttttgagtcgtggcgtgcgtctaactgagttgctgaagcaaggacagtattctcccatggctattgaagaacaagtggctgttatctatgcgggtgtaaggggatatcttgataaactggagcccagcaagattacaaagtttgagaatgctttcttgtctcatgtcgtcagccagcaccaagccttgttgggcactatcagggctgatggaaagatctcagaacaatcagatgcaaagctgaaagagattgtaacaaatttcttggctggatttgaagcttaaactcctgtggattcacatcaaataccagttcagttttgtcattgttctagtaaattagttccatttgtaaaagggttactctcatactccttatgtacagaaatcacatgaaaaataaaggttccataatgc

SEQ ID NO: 397 - DNA, 2184 bp, Homo sapiens
  source 1..2184: mol_type = genomic DNA
agtcagtccggaggctgcggctgcagaagtaccgcctgcggagtaactgcaaagatgctgtccgtgcgcgttgctgcggccgtggtccgcgcccttcctcggcgggccggactggtgagcaccgaaggccggcatgatgcaggcggccgggtggggctgcagggtggtggtgcgccggctcgggcgctctctgcaggagggcgaggggctgtggcgaatgccgccatcttgcacccgtggcttctccggctggacagagcaggcgacacaggtgcccttttgctcgtcacctgcgcagaggcagaatggtacagggcagacagttaactcgatggtgtccagagacagggcctcaagattcctgtcttcggctgacagcggccctagaagggggatcttgggtgaaggtcagggcttgggcgctagctctccgaggcctgttctgaatcggtctccagaaatgctttgggttcatctttcattgctgcaaggaacttccatgcctctaacactcatcttcaaaagactgggactgctgagatgtcctctattcttgaagagcgtattcttggagctgatacctctgttgatcttgaagaaactgggcgtgtcttaagtattggtgatggtattgcccgcgtacatgggctgaggaatgttcaagcagaagaaatggtagagttttcttcaggcttaaagggtatgtccttgaacttggaacctgacaatgttggtgttgtcgtgtttggaaatgataaactaattaaggaaggagatatagtgaagaggacaggagccattgtggacgttccagttggtgaggagctgttgggtcgtgtagttgatgcccttggtaatgctattgatggaaagggtccaattggttccaagacgcgtaggcgagttggtctgaaagcccccggtatcattcctcgaatttcagtgcgggaaccaatgcagactggcattaaggctgtggatagcttggtgccaattggtcgtggtcagcgtgaactgattattggtgaccgacagactgggaaaacctcaattgctattgacacaatcattaaccagaaacgtttcaatgatggatctgatgaaaagaagaagctgtactgtatttatgttgctattggtcaaaagagatccactgttgcccagttggtgaagagacttacagatgcagatgccatgaagtacaccattgtggtgtcggctacggcctcggatgctgccccacttcagtacctggctccttactctggctgttccatgggagagtattttagagacaatggcaaacatgctttgatcatctatgacgacttatccaaacaggctgttgcttaccgtcagatgtctctgttgctccgccgaccccctggtcgtgaggcctatcctggtgatgtgttctacctacactcccggttgctggagagagcagccaaaatgaacgatgcttttggtggtggctccttgactgctttgccagtcatagaaacacaggctggtgatgtgtctgcttacattccaacaaatgtcatttccatcactgacggacagatcttcttggaaacagaattgttctacaaaggtatccgccctgcaattaacgttggtctgtctgtatctcgtgtcggatccgctgcccaaaccagggctatgaagcaggtagcaggtaccatgaagctggaattggctcagtatcgtgaggttgctgcttttgcccagttcggttctgacctcgatgctgccactcaacaacttttgagtcgtggcgtgcgtctaactgagttgctgaagcaaggacagtattctcccatggctattgaagaacaagtggctgttatctatgcgggtgtaaggggatatcttgataaactggagcccagcaagattacaaagtttgagaatgctttcttgtctcatgtcgtcagccagcaccaagccttgttgggcactatcagggctgatggaaagatctcagaacaatcagatgcaaagctgaaagagattgtaacaaatttcttggctggatttgaagcttaaactcctgtggattcacatcaaataccagttcagttttgtcattgttctagtaaattagttccatttgtaaaagggttactctcatactccttatgtacagaaatcacatgaaaaataaaggttccataatgc

SEQ ID NO: 398 - DNA, 4645 bp, Homo sapiens
  source 1..4645: mol_type = genomic DNA
tattcagatattctccagattcctaaagattagagatcatttctcattctcctaggagtactcacttcaggaagcaaccagataaaagagaggtgcaacggaagccagaacattcctcctggaaattcaacctgtttcgcagtttctcgaggaatcagcattcagtcaatccgggccgggagcagtcatctgtggtgaggctgattggctgggcaggaacagcgccggggcgtgggctgagcacagccgcttcgctctctttgccacaggaagcctgagctcattcgagtagcggctcttccaagctcaaagaagcagaggccgctgttcgtttcctttaggtctttccactaaagtcggagtatcttcttccaaaatttcacgtcttggtggccgttccaaggagcgcgaggtcggaatggatcttgaaggggaccgcaatggaggagcaaagaagaagaacttttttaaactgaacaataaaagtgaaaaagataagaaggaaaagaaaccaactgtcagtgtattttcaatgtttcgctattcaaattggcttgacaagttgtatatggtggtgggaactttggctgccatcatccatggggctggacttcctctcatgatgctggtgtttggagaaatgacagatatctttgcaaatgcaggaaatttagaagatctgatgtcaaacatcactaatagaagtgatatcaatgatacagggttcttcatgaatctggaggaagacatgaccaggtatgcctattattacagtggaattggtgctggggtgctggttgctgcttacattcaggtttcattttggtgcctggcagctggaagacaaatacacaaaattagaaaacagttttttcatgctataatgcgacaggagataggctggtttgatgtgcacgatgttggggagcttaacacccgacttacagatgatgtctccaagattaatgaaggaattggtgacaaaattggaatgttctttcagtcaatggcaacatttttcactgggtttatagtaggatttacacgtggttggaagctaacccttgtgattttggccatcagtcctgttcttggactgtcagctgctgtctgggcaaagatactatcttcatttactgataaagaactcttagcgtatgcaaaagctggagcagtagctgaagaggtcttggcagcaattagaactgtgattgcatttggaggacaaaagaaagaacttgaaaggtacaacaaaaatttagaagaagctaaaagaattgggataaagaaagctattacagccaatatttctataggtgctgctttcctgctgatctatgcatcttatgctctggccttctggtatgggaccaccttggtcctctcaggggaatattctattggacaagtactcactgtattcttttctgtattaattggggcttttagtgttggacaggcatctccaagcattgaagcatttgcaaatgcaagaggagcagcttatgaaatcttcaagataattgataataagccaagtattgacagctattcgaagagtgggcacaaaccagataatattaagggaaatttggaattcagaaatgttcacttcagttacccatctcgaaaagaagttaagatcttgaagggtctgaacctgaaggtgcagagtgggcagacggtggccctggttggaaacagtggctgtgggaagagcacaacagtccagctgatgcagaggctctatgaccccacagaggggatggtcagtgttgatggacaggatattaggaccataaatgtaaggtttctacgggaaatcattggtgtggtgagtcaggaacctgtattgtttgccaccacgatagctgaaaacattcgctatggccgtgaaaatgtcaccatggatgagattgagaaagctgtcaaggaagccaatgcctatgactttatcatgaaactgcctcataaatttgacaccctggttggagagagaggggcccagttgagtggtgggcagaagcagaggatcgccattgcacgtgccctggttcgcaaccccaagatcctcctgctggatgaggccacgtcagccttggacacagaaagcgaagcagtggttcaggtggctctggataaggccagaaaaggtcggaccaccattgtgatagctcatcgtttgtctacagttcgtaatgctgacgtcatcgctggtttcgatgatggagtcattgtggagaaaggaaatcatgatgaactcatgaaagagaaaggcatttacttcaaacttgtcacaatgcagacagcaggaaatgaagttgaattagaaaatgcagctgatgaatccaaaagtgaaattgatgccttggaaatgtcttcaaatgattcaagatccagtctaataagaaaaagatcaactcgtaggagtgtccgtggatcacaagcccaagacagaaagcttagtaccaaagaggctctggatgaaagtatacctccagtttccttttggaggattatgaagctaaatttaactgaatggccttattttgttgttggtgtattttgtgccattataaatggaggcctgcaaccagcatttgcaataatattttcaaagattataggggtttttacaagaattgatgatcctgaaacaaaacgacagaatagtaacttgttttcactattgtttctagcccttggaattatttcttttattacatttttccttcagggtttcacatttggcaaagctggagagatcctcaccaagcggctccgatacatggttttccgatccatgctcagacaggatgtgagttggtttgatgaccctaaaaacaccactggagcattgactaccaggctcgccaatgatgctgctcaagttaaaggggctataggttccaggcttgctgtaattacccagaatatagcaaatcttgggacaggaataattatatccttcatctatggttggcaactaacactgttactcttagcaattgtacccatcattgcaatagcaggagttgttgaaatgaaaatgttgtctggacaagcactgaaagataagaaagaactagaaggttctgggaagatcgctactgaagcaatagaaaacttccgaaccgttgtttctttgactcaggagcagaagtttgaacatatgtatgctcagagtttgcaggtaccatacagaaactctttgaggaaagcacacatctttggaattacattttccttcacccaggcaatgatgtatttttcctatgctggatgtttccggtttggagcctacttggtggcacataaactcatgagctttgaggatgttctgttagtattttcagctgttgtctttggtgccatggccgtggggcaagtcagttcatttgctcctgactatgccaaagccaaaatatcagcagcccacatcatcatgatcattgaaaaaacccctttgattgacagctacagcacggaaggcctaatgccgaacacattggaaggaaatgtcacatttggtgaagttgtattcaactatcccacccgaccggacatcccagtgcttcagggactgagcctggaggtgaagaagggccagacgctggctctggtgggcagcagtggctgtgggaagagcacagtggtccagctcctggagcggttctacgaccccttggcagggaaagtgctgcttgatggcaaagaaataaagcgactgaatgttcagtggctccgagcacacctgggcatcgtgtcccaggagcccatcctgtttgactgcagcattgctgagaacattgcctatggagacaacagccgggtggtgtcacaggaagagattgtgagggcagcaaaggaggccaacatacatgccttcatcgagtcactgcctaataaatatagcactaaagtaggagacaaaggaactcagctctctggtggccagaaacaacgcattgccatagctcgtgcccttgttagacagcctcatattttgcttttggatgaagccacgtcagctctggatacagaaagtgaaaaggttgtccaagaagccctggacaaagccagagaaggccgcacctgcattgtgattgctcaccgcctgtccaccatccagaatgcagacttaatagtggtgtttcagaatggcagagtcaaggagcatggcacgcatcagcagctgctggcacagaaaggcatctatttttcaatggtcagtgtccaggctggaacaaagcgccagtgaactctgactgtatgagatgttaaatactttttaatatttgtttagatatgacatttattcaaagttaaaagcaaacacttacagaattatgaagaggtatctgtttaacatttcctcagtcaagttcagagtcttcagagacttcgtaattaaaggaacagagtgagagacatcatcaagtggagagaaatcatagtttaaactgcattataaattttataacagaattaaagtagattttaaaagataaaatgtgtaattttgtttatattttcccatttggactgtaactgactgccttgctaaaagattatagaagtagcaaaaagtattgaaatgtttgcataaagtgtctataataaaactaaactttcatgtgactgg

SEQ ID NO: 399 - DNA, 345 bp, Homo sapiens
  source 1..345: mol_type = genomic DNA
ctactttattcagatattctccagattcctaaagattagagatcatttctcattctcctaggagtactcacttcaggaagcaaccagataaaagagaggtgcaacggaagccagaacattcctcctggaaattcaacctgtttcgcagtttctcgaggaatcagcattcagtcaatccgggccgggagcagtcatctgtggtctttccactaaagtcggagtatcttcttccaaaatttcacgtcttggtggccgttccaaggagcgcgaggtcggaatggatcttgaaggggaccgcaatggaggagcaaagaagaagaacttttttaaactgaacaataaaag

SEQ ID NO: 400 - DNA, 461 bp, Homo sapiens
  source 1..461: mol_type = genomic DNA
tcattactctttacctgtgaagagtagaacatgaagaaatctactttattcagatattctccagattcctaaagattagagatcatttctcattctcctaggagtactcacttcaggaagcaaccagataaaagagaggtgcaacggaagccagaacattcctcctggaaattcaacctgtttcgcagtttctcgaggaatcagcattcagtcaatccgggccgggagcagtcatctgtggtctttccactaaagtcggagtatcttcttccaaaatttcacgtcttggtggccgttccaaggagcgcgaggtcggaatggatcttgaaggggaccgcaatggaggagcaaagaagaagaacttttttaaactgaacaataaaagtgaaaaagataagaaggaaaagaaaccaactgtcagtgtattttcaatgtttcgctattcaaattggcttgacaag

SEQ ID NO: 401 - DNA, 3797 bp, Homo sapiens
  source 1..3797: mol_type = genomic DNA
gctctctctcctgtcatgggtgtaagtgcaggatactggcccaaaatactatcttcatttactgataaagaactcttagcgtatgcaaaagctggagcagtagctgaagaggtcttggcagcaattagaactgtgattgcatttggaggacaaaagaaagaacttgaaaggtacaacaaaaatttagaagaagctaaaagaattgggataaagaaagctattacagccaatatttctataggtgctgctttcctgctgatctatgcatcttatgctctggccttctggtatgggaccaccttggtcctctcaggggaatattctattggacaagtactcactgtattcttttctgtattaattggggcttttagtgttggacaggcatctccaagcattgaagcatttgcaaatgcaagaggagcagcttatgaaatcttcaagataattgataataagccaagtattgacagctattcgaagagtgggcacaaaccagataatattaagggaaatttggaattcagaaatgttcacttcagttacccatctcgaaaagaagttaagatcttgaagggtctgaacctgaaggtgcagagtgggcagacggtggccctggttggaaacagtggctgtgggaagagcacaacagtccagctgatgcagaggctctatgaccccacagaggggatggtcagtgttgatggacaggatattaggaccataaatgtaaggtttctacgggaaatcattggtgtggtgagtcaggaacctgtattgtttgccaccacgatagctgaaaacattcgctatggccgtgaaaatgtcaccatggatgagattgagaaagctgtcaaggaagccaatgcctatgactttatcatgaaactgcctcataaatttgacaccctggttggagagagaggggcccagttgagtggtgggcagaagcagaggatcgccattgcacgtgccctggttcgcaaccccaagatcctcctgctggatgaggccacgtcagccttggacacagaaagcgaagcagtggttcaggtggctctggataaggccagaaaaggtcggaccaccattgtgatagctcatcgtttgtctacagttcgtaatgctgacgtcatcgctggtttcgatgatggagtcattgtggagaaaggaaatcatgatgaactcatgaaagagaaaggcatttacttcaaacttgtcacaatgcagacagcaggaaatgaagttgaattagaaaatgcagctgatgaatccaaaagtgaaattgatgccttggaaatgtcttcaaatgattcaagatccagtctaataagaaaaagatcaactcgtaggagtgtccgtggatcacaagcccaagacagaaagcttagtaccaaagaggctctggatgaaagtatacctccagtttccttttggaggattatgaagctaaatttaactgaatggccttattttgttgttggtgtattttgtgccattataaatggaggcctgcaaccagcatttgcaataatattttcaaagattataggggtttttacaagaattgatgatcctgaaacaaaacgacagaatagtaacttgttttcactattgtttctagcccttggaattatttcttttattacatttttccttcagggtttcacatttggcaaagctggagagatcctcaccaagcggctccgatacatggttttccgatccatgctcagacaggatgtgagttggtttgatgaccctaaaaacaccactggagcattgactaccaggctcgccaatgatgctgctcaagttaaaggggctataggttccaggcttgctgtaattacccagaatatagcaaatcttgggacaggaataattatatccttcatctatggttggcaactaacactgttactcttagcaattgtacccatcattgcaatagcaggagttgttgaaatgaaaatgttgtctggacaagcactgaaagataagaaagaactagaaggttctgggaagatcgctactgaagcaatagaaaacttccgaaccgttgtttctttgactcaggagcagaagtttgaacatatgtatgctcagagtttgcaggtaccatacagaaactctttgaggaaagcacacatctttggaattacattttccttcacccaggcaatgatgtatttttcctatgctggatgtttccggtttggagcctacttggtggcacataaactcatgagctttgaggatgttctgttagtattttcagctgttgtctttggtgccatggccgtggggcaagtcagttcatttgctcctgactatgccaaagccaaaatatcagcagcccacatcatcatgatcattgaaaaaacccctttgattgacagctacagcacggaaggcctaatgccgaacacattggaaggaaatgtcacatttggtgaagttgtattcaactatcccacccgaccggacatcccagtgcttcagggactgagcctggaggtgaagaagggccagacgctggctctggtgggcagcagtggctgtgggaagagcacagtggtccagctcctggagcggttctacgaccccttggcagggaaagtgctgcttgatggcaaagaaataaagcgactgaatgttcagtggctccgagcacacctgggcatcgtgtcccaggagcccatcctgtttgactgcagcattgctgagaacattgcctatggagacaacagccgggtggtgtcacaggaagagattgtgagggcagcaaaggaggccaacatacatgccttcatcgagtcactgcctaataaatatagcactaaagtaggagacaaaggaactcagctctctggtggccagaaacaacgcattgccatagctcgtgcccttgttagacagcctcatattttgcttttggatgaagccacgtcagctctggatacagaaagtgaaaaggttgtccaagaagccctggacaaagccagagaaggccgcacctgcattgtgattgctcaccgcctgtccaccatccagaatgcagacttaatagtggtgtttcagaatggcagagtcaaggagcatggcacgcatcagcagctgctggcacagaaaggcatctatttttcaatggtcagtgtccaggctggaacaaagcgccagtgaactctgactgtatgagatgttaaatactttttaatatttgtttagatatgacatttattcaaagttaaaagcaaacacttacagaattatgaagaggtatctgtttaacatttcctcagtcaagttcagagtcttcagagacttcgtaattaaaggaacagagtgagagacatcatcaagtggagagaaatcatagtttaaactgcattataaattttataacagaattaaagtagattttaaaagataaaatgtgtaattttgtttatattttcccatttggactgtaactgactgccttgctaaaagattatagaagtagcaaaaagtattgaaatgtttgcataaagtgtctataataaaactaaactttcatgtgactggagtcatcttgtccaaactgcctgtgaatatatcttctctcaattggaatattgtagataacttctgctttaaaaaagttttctttaaatatacctactcatttttgtgggaatggttaagcagtttaaataattcctgttgtatatgtctattcacattgggtcttacagaaccatctggcttcattcttcttggacttgatcctgctgattcttgcatttccacat

SEQ ID NO: 402 - DNA, 3651 bp, Homo sapiens
  source 1..3651: mol_type = genomic DNA
atggatcttgaaggggaccgcaatggaggagcaaagaagaagaacttttttaaactgaacaataaaagtgaaaaagataagaaggaaaagaaaccaactgtcagtgtattttcaatgtttcgctattcaaattggcttgacaagttgtatatggtggtgggaactttggctgccatcatccatggggctggacttcctctcatgatgctggtgtttggagaaatgacagatatctttgcaaatgcaggaaatttagaagatctgatgtcaaacatcactaatagaagtgatatcaatgatacagggttcttcatgaatctggaggaagacatgaccagtgatgtctccaagattaatgaaggaattggtgacaaaattggaatgttctttcagtcaatggcaacatttttcactgggtttatagtaggatttacacgtggttggaagctaacccttgtgattttggccatcagtcctgttcttggactgtcagctgctgtctgggcaaagatactatcttcatttactgataaagaactcttagcgtatgcaaaagctggagcagtagctgaagaggtcttggcagcaattagaactgtgattgcatttggaggacaaaagaaagaacttgaaaggtacaacaaaaatttagaagaagctaaaagaattgggataaagaaagctattacagccaatatttctataggtgctgctttcctgctgatctatgcatcttatgctctggccttctggtatgggaccaccttggtcctctcaggggaatattctattggacaagtactcactgtattcttttctgtattaattggggcttttagtgttggacaggcatctccaagcattgaagcatttgcaaatgcaagaggagcagcttatgaaatcttcaagataattgataataagccaagtattgacagctattcgaagagtgggcacaaaccagataatattaagggaaatttggaattcagaaatgttcacttcagttacccatctcgaaaagaagttaagatcttgaagggtctgaacctgaaggtgcagagtgggcagacggtggccctggttggaaacagtggctgtgggaagagcacaacagtccagctgatgcagaggctctatgaccccacagaggggatggtcagtgttgatggacaggatattaggaccataaatgtaaggtttctacgggaaatcattggtgtggtgagtcaggaacctgtattgtttgccaccacgatagctgaaaacattcgctatggccgtgaaaatgtcaccatggatgagattgagaaagctgtcaaggaagccaatgcctatgactttatcatgaaactgcctcataaatttgacaccctggttggagagagaggggcccagttgagtggtgggcagaagcagaggatcgccattgcacgtgccctggttcgcaaccccaagatcctcctgctggatgaggccacgtcagccttggacacagaaagcgaagcagtggttcaggtggctctggataaggccagaaaaggtcggaccaccattgtgatagctcatcgtttgtctacagttcgtaatgctgacgtcatcgctggtttcgatgatggagtcattgtggagaaaggaaatcatgatgaactcatgaaagagaaaggcatttacttcaaacttgtcacaatgcagacagcaggaaatgaagttgaattagaaaatgcagctgatgaatccaaaagtgaaattgatgccttggaaatgtcttcaaatgattcaagatccagtctaataagaaaaagatcaactcgtaggagtgtccgtggatcacaagcccaagacagaaagcttagtaccaaagaggctctggatgaaagtatacctccagtttccttttggaggattatgaagctaaatttaactgaatggccttattttgttgttggtgtattttgtgccattataaatggaggcctgcaaccagcatttgcaataatattttcaaagattataggggtttttacaagaattgatgatcctgaaacaaaacgacagaatagtaacttgttttcactattgtttctagcccttggaattatttcttttattacatttttccttcagggtttcacatttggcaaagctggagagatcctcaccaagcggctccgatacatggttttccgatccatgctcagacaggatgtgagttggtttgatgaccctaaaaacaccactggagcattgactaccaggctcgccaatgatgctgctcaagttaaaggggctataggttccaggcttgctgtaattacccagaatatagcaaatcttgggacaggaataattatatccttcatctatggttggcaactaacactgttactcttagcaattgtacccatcattgcaatagcaggagttgttgaaatgaaaatgttgtctggacaagcactgaaagataagaaagaactagaaggttctgggaagatcgctactgaagcaatagaaaacttccgaaccgttgtttctttgactcaggagcagaagtttgaacatatgtatgctcagagtttgcaggtaccatacagaaactctttgaggaaagcacacatctttggaattacattttccttcacccaggcaatgatgtatttttcctatgctggatgtttccggtttggagcctacttggtggcacataaactcatgagctttgaggatgttctgttagtattttcagctgttgtctttggtgccatggccgtggggcaagtcagttcatttgctcctgactatgccaaagccaaaatatcagcagcccacatcatcatgatcattgaaaaaacccctttgattgacagctacagcacggaaggcctaatgccgaacacattggaaggaaatgtcacatttggtgaagttgtattcaactatcccacccgaccggacatcccagtgcttcagggactgagcctggaggtgaagaagggccagacgctggctctggtgggcagcagtggctgtgggaagagcacagtggtccagctcctggagcggttctacgaccccttggcagggaaagtgctgcttgatggcaaagaaataaagcgactgaatgttcagtggctccgagcacacctgggcatcgtgtcccaggagcccatcctgtttgactgcagcattgctgagaacattgcctatggagacaacagccgggtggtgtcacaggaagagattgtgagggcagcaaaggaggccaacatacatgccttcatcgagtcactgcctaataaatatagcactaaagtaggagacaaaggaactcagctctctggtggccagaaacaacgcattgccatagctcgtgcccttgttagacagcctcatattttgcttttggatgaagccacgtcagctctggatacagaaagtgaaaaggttgtccaagaagccctggacaaagccagagaaggccgcacctgcattgtgattgctcaccgcctgtccaccatccagaatgcagacttaatagtggtgtttcagaatggcagagtcaaggagcatggcacgcatcagcagctgctggcacagaaaggcatctatttttcaatggtcagtgtccaggctggaacaaagcgccagtga

SEQ ID NO: 403 - DNA, 6369 bp, Homo sapiens
  source 1..6369: mol_type = genomic DNA
ccaggcggcgttgcggccccggccccggctccctgcgccgccgccgccgccgccgccagcgctagcgccagcagccgggcccgatcacccgccgcccggtgcccgccgccgcccgcgccagcaaccgggcccgatcacccgccgcccggtgcccgccgccgcccgcgccaccggcatggcgctccggggcttctgcagcgccgatggctccgacccgctctgggactggaatgtcacgtggaataccagcaaccccgacttcaccaagtgctttcagaacacggtcctcgtgtgggtgccttgtttttacctctgggcctgtttccccttctacttcctctatctctcccgacatgaccgaggctacattcagatgacacctctcaacaaaaccaaaactgccttgggatttttgctgtggatcgtctgctgggcagacctcttctactctttctgggaaagaagtcggggcatattcctggccccagtgtttctggtcagcccaactctcttgggcatcaccatgctgcttgctacctttttaattcagctggagaggaggaagggagttcagtcttcagggatcatgctcactttctggctggtagccctagtgtgtgccctagccatcctgagatccaaaattatgacagccttaaaagaggatgcccaggtggacctgtttcgtgacatcactttctacgtctacttttccctcttactcattcagctcgtcttgtcctgtttctcagatcgctcacccctgttctcggaaaccatccacgaccctaatccctgcccagagtccagcgcttccttcctgtcgaggatcaccttctggtggatcacagggttgattgtccggggctaccgccagcccctggagggcagtgacctctggtccttaaacaaggaggacacgtcggaacaagtcgtgcctgttttggtaaagaactggaagaaggaatgcgccaagactaggaagcagccggtgaaggttgtgtactcctccaaggatcctgcccagccgaaagagagttccaaggtggatgcgaatgaggaggtggaggctttgatcgtcaagtccccacagaaggagtggaacccctctctgtttaaggtgttatacaagacctttgggccctacttcctcatgagcttcttcttcaaggccatccacgacctgatgatgttttccgggccgcagatcttaaagttgctcatcaagttcgtgaatgacacgaaggccccagactggcagggctacttctacaccgtgctgctgtttgtcactgcctgcctgcagaccctcgtgctgcaccagtacttccacatctgcttcgtcagtggcatgaggatcaagaccgctgtcattggggctgtctatcggaaggccctggtgatcaccaattcagccagaaaatcctccacggtcggggagattgtcaacctcatgtctgtggacgctcagaggttcatggacttggccacgtacattaacatgatctggtcagcccccctgcaagtcatccttgctctctacctcctgtggctgaatctgggcccttccgtcctggctggagtggcggtgatggtcctcatggtgcccgtcaatgctgtgatggcgatgaagaccaagacgtatcaggtggcccacatgaagagcaaagacaatcggatcaagctgatgaacgaaattctcaatgggatcaaagtgctaaagctttatgcctgggagctggcattcaaggacaaggtgctggccatcaggcaggaggagctgaaggtgctgaagaagtctgcctacctgtcagccgtgggcaccttcacctgggtctgcacgccctttctggtggccttgtgcacatttgccgtctacgtgaccattgacgagaacaacatcctggatgcccagacagccttcgtgtctttggccttgttcaacatcctccggtttcccctgaacattctccccatggtcatcagcagcatcgtgcaggcgagtgtctccctcaaacgcctgaggatctttctctcccatgaggagctggaacctgacagcatcgagcgacggcctgtcaaagacggcgggggcacgaacagcatcaccgtgaggaatgccacattcacctgggccaggagcgaccctcccacactgaatggcatcaccttctccatccccgaaggtgctttggtggccgtggtgggccaggtgggctgcggaaagtcgtccctgctctcagccctcttggctgagatggacaaagtggaggggcacgtggctatcaagggctccgtggcctatgtgccacagcaggcctggattcagaatgattctctccgagaaaacatcctttttggatgtcagctggaggaaccatattacaggtccgtgatacaggcctgtgccctcctcccagacctggaaatcctgcccagtggggatcggacagagattggcgagaagggcgtgaacctgtctgggggccagaagcagcgcgtgagcctggcccgggccgtgtactccaacgctgacatttacctcttcgatgatcccctctcagcagtggatgcccatgtgggaaaacacatctttgaaaatgtgattggccccaaggggatgctgaagaacaagacgcggatcttggtcacgcacagcatgagctacttgccgcaggtggacgtcatcatcgtcatgagtggcggcaagatctctgagatgggctcctaccaggagctgctggctcgagacggcgccttcgctgagttcctgcgtacctatgccagcacagagcaggagcaggatgcagaggagaacggggtcacgggcgtcagcggtccagggaaggaagcaaagcaaatggagaatggcatgctggtgacggacagtgcagggaagcaactgcagagacagctcagcagctcctcctcctatagtggggacatcagcaggcaccacaacagcaccgcagaactgcagaaagctgaggccaagaaggaggagacctggaagctgatggaggctgacaaggcgcagacagggcaggtcaagctttccgtgtactgggactacatgaaggccatcggactcttcatctccttcctcagcatcttccttttcatgtgtaaccatgtgtccgcgctggcttccaactattggctcagcctctggactgatgaccccatcgtcaacgggactcaggagcacacgaaagtccggctgagcgtctatggagccctgggcatttcacaagggatcgccgtgtttggctactccatggccgtgtccatcggggggatcttggcttcccgctgtctgcacgtggacctgctgcacagcatcctgcggtcacccatgagcttctttgagcggacccccagtgggaacctggtgaaccgcttctccaaggagctggacacagtggactccatgatcccggaggtcatcaagatgttcatgggctccctgttcaacgtcattggtgcctgcatcgttatcctgctggccacgcccatcgccgccatcatcatcccgccccttggcctcatctacttcttcgtccagaggttctacgtggcttcctcccggcagctgaagcgcctcgagtcggtcagccgctccccggtctattcccatttcaacgagaccttgctgggggtcagcgtcattcgagccttcgaggagcaggagcgcttcatccaccagagtgacctgaaggtggacgagaaccagaaggcctattaccccagcatcgtggccaacaggtggctggccgtgcggctggagtgtgtgggcaactgcatcgttctgtttgctgccctgtttgcggtgatctccaggcacagcctcagtgctggcttggtgggcctctcagtgtcttactcattgcaggtcaccacgtacttgaactggctggttcggatgtcatctgaaatggaaaccaacatcgtggccgtggagaggctcaaggagtattcagagactgagaaggaggcgccctggcaaatccaggagacagctccgcccagcagctggccccaggtgggccgagtggaattccggaactactgcctgcgctaccgagaggacctggacttcgttctcaggcacatcaatgtcacgatcaatgggggagaaaaggtcggcatcgtggggcggacgggagctgggaagtcgtccctgaccctgggcttatttcggatcaacgagtctgccgaaggagagatcatcatcgatggcatcaacatcgccaagatcggcctgcacgacctccgcttcaagatcaccatcatcccccaggaccctgttttgttttcgggttccctccgaatgaacctggacccattcagccagtactcggatgaagaagtctggacgtccctggagctggcccacctgaaggacttcgtgtcagcccttcctgacaagctagaccatgaatgtgcagaaggcggggagaacctcagggtgatcgtcttggacaaaggagaaatccaggagtacggcgccccatcggacctcctgcagcagagaggtcttttctacagcatggccaaagacgccggcttggtgtgagccccagagctggcatatctggtcagaactgcagggcctatatgccagcgcccagggaggagtcagtacccctggtaaaccaagcctcccacactgaaaccaaaacataaaaaccaaacccagacaaccaaaacatattcaaagcagcagccaccgccatccggtcccctgcctggaactggctgtgaagacccaggagagacagagatgcgaaccacccaaaacacgcacaccctgcccctggtgccctgagacagacacacagcctcacgcccccaggaatgcaagtggtttcctggtgcttcccacggaggagttttggcagccagacttctggaggaattggttgtatagaagatcctagtgaccaaattcagcctactgcctcggatctctccagccgaagtctgtggactgcaagtctttgagatgcttctggctcccatcacctctaacatccttgtctgggtctaccaggaacgcttcatttccttggggctgcagttttgtggttgaggggcctggagaaaatcattttctccccttggcagtgtcccagggccctggatggtcctcttaccaacatctggtcttccaggcactcaaaagctgggaaccagcatctcagcgccagctctaccagttctcgttttgggccagaggcagcctctgcactcccacgcctgtcctcctggaagggacctggttggactaacggctaacctggacctggaactgtagggccaggggattgtctcagggccgacgttccacctggggcttccctccccacccaccccgactccaggctttcccttttttcttttgttcaacattgtaagaacaatcaatgctgttattactgttcccaccatgattgatgtggggtaaatattaaggagatggcctcatgggaatttgaccttgactagaaatagagactgagagtgagcaaccagctggaaggtactatgccagtcctagcagaaaaatgtgttaggggcctggcccaaagcagtgttggttgcttacagtgttgattgattttgttcttttttcttaccacctcttttctttccctctcatggtacctgctcatggttatgaagctttcaaagtaaagaacacgaaatacctcccaagtattaccagtgggtaccaaaaaaatgtccccttgagtcttttccttgtttttagatgttaattctctcccttggcatccggttagccccccagggggggcagcattgtggagaacttgatatttagttactgatgctcttccaggacacgaaaagaacccatctttgaatatcaatgattttttttttttaagtactgttccggggagaaaaacagtctcaaaacttgaacttcttgggaatagaagtgttgggctgagaagtaacattcccaggaaatagtgagaagctcgccctgtgtttgaaaccgtgttggtctctgtgttcctggaagaaaacagggaagcagcatcttttaaagcctgttctttaaggtgtctcgttagagcccaaagtggaatccggaaggcagccagagctgaggctgccccaagactcagacttgctaagaattacgccgccgacttcaaacccagagagcatctttcttttaggcgaaaacgcatatatttattttttgtaagttataccattctttcacattagataaactaagttttgggggatccttttgtaatgacttacactggaaatgcgaacatttgcagtaaaaaaatatatatatatctatatattttatttctttctaaa

SEQ ID NO: 404 - DNA, 6396 bp, Homo sapiens
  source 1..6396: mol_type = genomic DNA
ccaggcggcgttgcggccccggccccggctccctgcgccgccgccgccgccgccgccagcgctagcgccagcagccgggcccgatcacccgccgcccggtgcccgccgccgcccgcgccagcaaccgggcccgatcacccgccgcccggtgcccgccgccgcccgcgccaccggcatggcgctccggggcttctgcagcgccgatggctccgacccgctctgggactggaatgtcacgtggaataccagcaaccccgacttcaccaagtgctttcagaacacggtcctcgtgtgggtgccttgtttttacctctgggcctgtttccccttctacttcctctatctctcccgacatgaccgaggctacattcagatgacacctctcaacaaaaccaaaactgccttgggatttttgctgtggatcgtctgctgggcagacctcttctactctttctgggaaagaagtcggggcatattcctggccccagtgtttctggtcagcccaactctcttgggcatcaccatgctgcttgctacctttttaattcagctggagaggaggaagggagttcagtcttcagggatcatgctcactttctggctggtagccctagtgtgtgccctagccatcctgagatccaaaattatgacagccttaaaagaggatgcccaggtggacctgtttcgtgacatcactttctacgtctacttttccctcttactcattcagctcgtcttgtcctgtttctcagatcgctcacccctgttctcggaaaccatccacgaccctaatccctgcccagagtccagcgcttccttcctgtcgaggatcaccttctggtggatcacagggttgattgtccggggctaccgccagcccctggagggcagtgacctctggtccttaaacaaggaggacacgtcggaacaagtcgtgcctgttttggtaaagaactggaagaaggaatgcgccaagactaggaagcagccggtgaaggttgtgtactcctccaaggatcctgcccagccgaaagagagttccaaggtggatgcgaatgaggaggtggaggctttgatcgtcaagtccccacagaaggagtggaacccctctctgtttaaggtgttatacaagacctttgggccctacttcctcatgagcttcttcttcaaggccatccacgacctgatgatgttttccgggccgcagatcttaaagttgctcatcaagttcgtgaatgacacgaaggccccagactggcagggctacttctacaccgtgctgctgtttgtcactgcctgcctgcagaccctcgtgctgcaccagtacttccacatctgcttcgtcagtggcatgaggatcaagaccgctgtcattggggctgtctatcggaaggccctggtgatcaccaattcagccagaaaatcctccacggtcggggagattgtcaacctcatgtctgtggacgctcagaggttcatggacttggccacgtacattaacatgatctggtcagcccccctgcaagtcatccttgctctctacctcctgtggctgaatctgggcccttccgtcctggctggagtggcggtgatggtcctcatggtgcccgtcaatgctgtgatggcgatgaagaccaagacgtatcaggtggcccacatgaagagcaaagacaatcggatcaagctgatgaacgaaattctcaatgggatcaaagtgctaaagctttatgcctgggagctggcattcaaggacaaggtgctggccatcaggcaggaggagctgaaggtgctgaagaagtctgcctacctgtcagccgtgggcaccttcacctgggtctgcacgccctttctggtggccttgtgcacatttgccgtctacgtgaccattgacgagaacaacatcctggatgcccagacagccttcgtgtctttggccttgttcaacatcctccggtttcccctgaacattctccccatggtcatcagcagcatcgtgcaggcgagtgtctccctcaaacgcctgaggatctttctctcccatgaggagctggaacctgacagcatcgagcgacggcctgtcaaagacggcgggggcacgaacagcatcaccgtgaggaatgccacattcacctgggccaggagcgaccctcccacactgaatggcatcaccttctccatccccgaaggtgctttggtggccgtggtgggccaggtgggctgcggaaagtcgtccctgctctcagccctcttggctgagatggacaaagtggaggggcacgtggctatcaagggctccgtggcctatgtgccacagcaggcctggattcagaatgattctctccgagaaaacatcctttttggatgtcagctggaggaaccatattacaggtccgtgatacaggcctgtgccctcctcccagacctggaaatcctgcccagtggggatcggacagagattggcgagaagacgcggatcttggtcacgcacagcatgagctacttgccgcaggtggacgtcatcatcgtcatgagtggcggcaagatctctgagatgggctcctaccaggagctgctggctcgagacggcgccttcgctgagttcctgcgtacctatgccagcacagagcaggagcaggatgcagaggagaacggggtcacgggcgtcagcggtccagggaaggaagcaaagcaaatggagaatggcatgctggtgacggacagtgcagggaagcaactgcagagacagctcagcagctcctcctcctatagtggggacatcagcaggcaccacaacagcaccgcagaactgcagaaagctgaggccaagaaggaggagacctggaagctgatggaggctgacaaggcgcagacagggcaggtcaagctttccgtgtactgggactacatgaaggccatcggactcttcatctccttcctcagcatcttccttttcatgtgtaaccatgtgtccgcgctggcttccaactattggctcagcctctggactgatgaccccatcgtcaacgggactcaggagcacacgaaagtccggctgagcgtctatggagccctgggcatttcacaagggatcgccgtgtttggctactccatggccgtgtccatcggggggatcttggcttcccgctgtctgcacgtggacctgctgcacagcatcctgcggtcacccatgagcttctttgagcggacccccagtgggaacctggtgaaccgcttctccaaggagctggacacagtggactccatgatcccggaggtcatcaagatgttcatgggctccctgttcaacgtcattggtgcctgcatcgttatcctgctggccacgcccatcgccgccatcatcatcccgccccttggcctcatctacttcttcgtccagaggttctacgtggcttcctcccggcagctgaagcgcctcgagtcggtcagccgctccccggtctattcccatttcaacgagaccttgctgggggtcagcgtcattcgagccttcgaggagcaggagcgcttcatccaccagagtgacctgaaggtggacgagaaccagaaggcctattaccccagcatcgtggccaacaggtggctggccgtgcggctggagtgtgtgggcaactgcatcgttctgtttgctgccctgtttgcggtgatctccaggcacagcctcagtgctggcttggtgggcctctcagtgtcttactcattgcaggtcaccacgtacttgaactggctggttcggatgtcatctgaaatggaaaccaacatcgtggccgtggagaggctcaaggagtattcagagactgagaaggaggcgccctggcaaatccaggagacagctccgcccagcagctggccccaggtgggccgagtggaattccggaactactgcctgcgctaccgagaggacctggacttcgttctcaggcacatcaatgtcacgatcaatgggggagaaaaggtcggcatcgtggggcggacgggagctgggaagtcgtccctgaccctgggcttatttcggatcaacgagtctgccgaaggagagatcatcatcgatggcatcaacatcgccaagatcggcctgcacgacctccgcttcaagatcaccatcatcccccaggaccctgttttgttttcgggttccctccgaatgaacctggacccattcagccagtactcggatgaagaagtctggacgtccctggagctggcccacctgaaggacttcgtgtcagcccttcctgacaagctagaccatgaatgtgcagaaggcggggagaacctcagtgtcgggcagcgccagcttgtgtgcctagcccgggccctgctgaggaagacgaagatccttgtgttggatgaggccacggcagccgtggacctggaaacggacgacctcatccagtccaccatccggacacagttcgaggactgcaccgtcctcaccatcgcccaccggctcaacaccatcatggactacacaagggtgatcgtcttggacaaaggagaaatccaggagtacggcgccccatcggacctcctgcagcagagaggtcttttctacagcatggccaaagacgccggcttggtgtgagccccagagctggcatatctggtcagaactgcagggcctatatgccagcgcccagggaggagtcagtacccctggtaaaccaagcctcccacactgaaaccaaaacataaaaaccaaacccagacaaccaaaacatattcaaagcagcagccaccgccatccggtcccctgcctggaactggctgtgaagacccaggagagacagagatgcgaaccacccaaaacacgcacaccctgcccctggtgccctgagacagacacacagcctcacgcccccaggaatgcaagtggtttcctggtgcttcccacggaggagttttggcagccagacttctggaggaattggttgtatagaagatcctagtgaccaaattcagcctactgcctcggatctctccagccgaagtctgtggactgcaagtctttgagatgcttctggctcccatcacctctaacatccttgtctgggtctaccaggaacgcttcatttccttggggctgcagttttgtggttgaggggcctggagaaaatcattttctccccttggcagtgtcccagggccctggatggtcctcttaccaacatctggtcttccaggcactcaaaagctgggaaccagcatctcagcgccagctctaccagttctcgttttgggccagaggcagcctctgcactcccacgcctgtcctcctggaagggacctggttggactaacggctaacctggacctggaactgtagggccaggggattgtctcagggccgacgttccacctggggcttccctccccacccaccccgactccaggctttcccttttttcttttgttcaacattgtaagaacaatcaatgctgttattactgttcccaccatgattgatgtggggtaaatattaaggagatggcctcatgggaatttgaccttgactagaaatagagactgagagtgagcaaccagctggaaggtactatgccagtcctagcagaaaaatgtgttaggggcctggcccaaagcagtgttggttgcttacagtgttgattgattttgttcttttttcttaccacctcttttctttccctctcatggtacctgctcatggttatgaagctttcaaagtaaagaacacgaaatacctcccaagtattaccagtgggtaccaaaaaaatgtccccttgagtcttttccttgtttttagatgttaattctctcccttggcatccggttagccccccagggggggcagcattgtggagaacttgatatttagttactgatgctcttccaggacacgaaaagaacccatctttgaatatcaatgattttttttttttaagtactgttccggggagaaaaacagtctcaaaacttgaacttcttgggaatagaagtgttgggctgagaagtaacattcccaggaaatagtgagaagctcgccctgtgtttgaaaccgtgttggtctctgtgttcctggaagaaaacagggaagcagcatcttttaaagcctgttctttaaggtgtctcgttagagcccaaagtggaatccggaaggcagccagagctgaggctgccccaagactcagacttgctaagaattacgccgccgacttcaaacccagagagcatctttcttttaggcgaaaacgcatatatttattttttgtaagttataccattctttcacattagataaactaagttttgggggatccttttgtaatgacttacactggaaatgcgaacatttgcagtaaaaaaatatatatatatctatatattttatttctttctaaa

SEQ ID NO: 405 - DNA, 6219 bp, Homo sapiens
  source 1..6219: mol_type = genomic DNA
ccaggcggcgttgcggccccggccccggctccctgcgccgccgccgccgccgccgccagcgctagcgccagcagccgggcccgatcacccgccgcccggtgcccgccgccgcccgcgccagcaaccgggcccgatcacccgccgcccggtgcccgccgccgcccgcgccaccggcatggcgctccggggcttctgcagcgccgatggctccgacccgctctgggactggaatgtcacgtggaataccagcaaccccgacttcaccaagtgctttcagaacacggtcctcgtgtgggtgccttgtttttacctctgggcctgtttccccttctacttcctctatctctcccgacatgaccgaggctacattcagatgacacctctcaacaaaaccaaaactgccttgggatttttgctgtggatcgtctgctgggcagacctcttctactctttctgggaaagaagtcggggcatattcctggccccagtgtttctggtcagcccaactctcttgggcatcaccatgctgcttgctacctttttaattcagctggagaggaggaagggagttcagtcttcagggatcatgctcactttctggctggtagccctagtgtgtgccctagccatcctgagatccaaaattatgacagccttaaaagaggatgcccaggtggacctgtttcgtgacatcactttctacgtctacttttccctcttactcattcagctcgtcttgtcctgtttctcagatcgctcacccctgttctcggaaaccatccacgaccctaatccctgcccagagtccagcgcttccttcctgtcgaggatcaccttctggtggatcacagggttgattgtccggggctaccgccagcccctggagggcagtgacctctggtccttaaacaaggaggacacgtcggaacaagtcgtgcctgttttggtaaagaactggaagaaggaatgcgccaagactaggaagcagccggtgaaggttgtgtactcctccaaggatcctgcccagccgaaagagagttccaaggtggatgcgaatgaggaggtggaggctttgatcgtcaagtccccacagaaggagtggaacccctctctgtttaaggtgttatacaagacctttgggccctacttcctcatgagcttcttcttcaaggccatccacgacctgatgatgttttccgggccgcagatcttaaagttgctcatcaagttcgtgaatgacacgaaggccccagactggcagggctacttctacaccgtgctgctgtttgtcactgcctgcctgcagaccctcgtgctgcaccagtacttccacatctgcttcgtcagtggcatgaggatcaagaccgctgtcattggggctgtctatcggaaggccctggtgatcaccaattcagccagaaaatcctccacggtcggggagattgtcaacctcatgtctgtggacgctcagaggttcatggacttggccacgtacattaacatgatctggtcagcccccctgcaagtcatccttgctctctacctcctgtggctgaatctgggcccttccgtcctggctggagtggcggtgatggtcctcatggtgcccgtcaatgctgtgatggcgatgaagaccaagacgtatcaggtggcccacatgaagagcaaagacaatcggatcaagctgatgaacgaaattctcaatgggatcaaagtgctaaagctttatgcctgggagctggcattcaaggacaaggtgctggccatcaggcaggaggagctgaaggtgctgaagaagtctgcctacctgtcagccgtgggcaccttcacctgggtctgcacgccctttctggtggccttgtgcacatttgccgtctacgtgaccattgacgagaacaacatcctggatgcccagacagccttcgtgtctttggccttgttcaacatcctccggtttcccctgaacattctccccatggtcatcagcagcatcgtgcaggcgagtgtctccctcaaacgcctgaggatctttctctcccatgaggagctggaacctgacagcatcgagcgacggcctgtcaaagacggcgggggcacgaacagcatcaccgtgaggaatgccacattcacctgggccaggagcgaccctcccacactgaatggcatcaccttctccatccccgaaggtgctttggtggccgtggtgggccaggtgggctgcggaaagtcgtccctgctctcagccctcttggctgagatggacaaagtggaggggcacgtggctatcaagacgcggatcttggtcacgcacagcatgagctacttgccgcaggtggacgtcatcatcgtcatgagtggcggcaagatctctgagatgggctcctaccaggagctgctggctcgagacggcgccttcgctgagttcctgcgtacctatgccagcacagagcaggagcaggatgcagaggagaacggggtcacgggcgtcagcggtccagggaaggaagcaaagcaaatggagaatggcatgctggtgacggacagtgcagggaagcaactgcagagacagctcagcagctcctcctcctatagtggggacatcagcaggcaccacaacagcaccgcagaactgcagaaagctgaggccaagaaggaggagacctggaagctgatggaggctgacaaggcgcagacagggcaggtcaagctttccgtgtactgggactacatgaaggccatcggactcttcatctccttcctcagcatcttccttttcatgtgtaaccatgtgtccgcgctggcttccaactattggctcagcctctggactgatgaccccatcgtcaacgggactcaggagcacacgaaagtccggctgagcgtctatggagccctgggcatttcacaagggatcgccgtgtttggctactccatggccgtgtccatcggggggatcttggcttcccgctgtctgcacgtggacctgctgcacagcatcctgcggtcacccatgagcttctttgagcggacccccagtgggaacctggtgaaccgcttctccaaggagctggacacagtggactccatgatcccggaggtcatcaagatgttcatgggctccctgttcaacgtcattggtgcctgcatcgttatcctgctggccacgcccatcgccgccatcatcatcccgccccttggcctcatctacttcttcgtccagaggttctacgtggcttcctcccggcagctgaagcgcctcgagtcggtcagccgctccccggtctattcccatttcaacgagaccttgctgggggtcagcgtcattcgagccttcgaggagcaggagcgcttcatccaccagagtgacctgaaggtggacgagaaccagaaggcctattaccccagcatcgtggccaacaggtggctggccgtgcggctggagtgtgtgggcaactgcatcgttctgtttgctgccctgtttgcggtgatctccaggcacagcctcagtgctggcttggtgggcctctcagtgtcttactcattgcaggtcaccacgtacttgaactggctggttcggatgtcatctgaaatggaaaccaacatcgtggccgtggagaggctcaaggagtattcagagactgagaaggaggcgccctggcaaatccaggagacagctccgcccagcagctggccccaggtgggccgagtggaattccggaactactgcctgcgctaccgagaggacctggacttcgttctcaggcacatcaatgtcacgatcaatgggggagaaaaggtcggcatcgtggggcggacgggagctgggaagtcgtccctgaccctgggcttatttcggatcaacgagtctgccgaaggagagatcatcatcgatggcatcaacatcgccaagatcggcctgcacgacctccgcttcaagatcaccatcatcccccaggaccctgttttgttttcgggttccctccgaatgaacctggacccattcagccagtactcggatgaagaagtctggacgtccctggagctggcccacctgaaggacttcgtgtcagcccttcctgacaagctagaccatgaatgtgcagaaggcggggagaacctcagtgtcgggcagcgccagcttgtgtgcctagcccgggccctgctgaggaagacgaagatccttgtgttggatgaggccacggcagccgtggacctggaaacggacgacctcatccagtccaccatccggacacagttcgaggactgcaccgtcctcaccatcgcccaccggctcaacaccatcatggactacacaagggtgatcgtcttggacaaaggagaaatccaggagtacggcgccccatcggacctcctgcagcagagaggtcttttctacagcatggccaaagacgccggcttggtgtgagccccagagctggcatatctggtcagaactgcagggcctatatgccagcgcccagggaggagtcagtacccctggtaaaccaagcctcccacactgaaaccaaaacataaaaaccaaacccagacaaccaaaacatattcaaagcagcagccaccgccatccggtcccctgcctggaactggctgtgaagacccaggagagacagagatgcgaaccacccaaaacacgcacaccctgcccctggtgccctgagacagacacacagcctcacgcccccaggaatgcaagtggtttcctggtgcttcccacggaggagttttggcagccagacttctggaggaattggttgtatagaagatcctagtgaccaaattcagcctactgcctcggatctctccagccgaagtctgtggactgcaagtctttgagatgcttctggctcccatcacctctaacatccttgtctgggtctaccaggaacgcttcatttccttggggctgcagttttgtggttgaggggcctggagaaaatcattttctccccttggcagtgtcccagggccctggatggtcctcttaccaacatctggtcttccaggcactcaaaagctgggaaccagcatctcagcgccagctctaccagttctcgttttgggccagaggcagcctctgcactcccacgcctgtcctcctggaagggacctggttggactaacggctaacctggacctggaactgtagggccaggggattgtctcagggccgacgttccacctggggcttccctccccacccaccccgactccaggctttcccttttttcttttgttcaacattgtaagaacaatcaatgctgttattactgttcccaccatgattgatgtggggtaaatattaaggagatggcctcatgggaatttgaccttgactagaaatagagactgagagtgagcaaccagctggaaggtactatgccagtcctagcagaaaaatgtgttaggggcctggcccaaagcagtgttggttgcttacagtgttgattgattttgttcttttttcttaccacctcttttctttccctctcatggtacctgctcatggttatgaagctttcaaagtaaagaacacgaaatacctcccaagtattaccagtgggtaccaaaaaaatgtccccttgagtcttttccttgtttttagatgttaattctctcccttggcatccggttagccccccagggggggcagcattgtggagaacttgatatttagttactgatgctcttccaggacacgaaaagaacccatctttgaatatcaatgattttttttttttaagtactgttccggggagaaaaacagtctcaaaacttgaacttcttgggaatagaagtgttgggctgagaagtaacattcccaggaaatagtgagaagctcgccctgtgtttgaaaccgtgttggtctctgtgttcctggaagaaaacagggaagcagcatcttttaaagcctgttctttaaggtgtctcgttagagcccaaagtggaatccggaaggcagccagagctgaggctgccccaagactcagacttgctaagaattacgccgccgacttcaaacccagagagcatctttcttttaggcgaaaacgcatatatttattttttgtaagttataccattctttcacattagataaactaagttttgggggatccttttgtaatgacttacactggaaatgcgaacatttgcagtaaaaaaatatatatatatctatatattttatttctttctaaa

SEQ ID NO: 406 - DNA, 6387 bp, Homo sapiens
  source 1..6387: mol_type = genomic DNA
ccaggcggcgttgcggccccggccccggctccctgcgccgccgccgccgccgccgccagcgctagcgccagcagccgggcccgatcacccgccgcccggtgcccgccgccgcccgcgccagcaaccgggcccgatcacccgccgcccggtgcccgccgccgcccgcgccaccggcatggcgctccggggcttctgcagcgccgatggctccgacccgctctgggactggaatgtcacgtggaataccagcaaccccgacttcaccaagtgctttcagaacacggtcctcgtgtgggtgccttgtttttacctctgggcctgtttccccttctacttcctctatctctcccgacatgaccgaggctacattcagatgacacctctcaacaaaaccaaaactgccttgggatttttgctgtggatcgtctgctgggcagacctcttctactctttctgggaaagaagtcggggcatattcctggccccagtgtttctggtcagcccaactctcttgggcatcaccatgctgcttgctacctttttaattcagctggagaggaggaagggagttcagtcttcagggatcatgctcactttctggctggtagccctagtgtgtgccctagccatcctgagatccaaaattatgacagccttaaaagaggatgcccaggtggacctgtttcgtgacatcactttctacgtctacttttccctcttactcattcagctcgtcttgtcctgtttctcagatcgctcacccctgttctcggaaaccatccacgaccctaatccctgcccagagtccagcgcttccttcctgtcgaggatcaccttctggtggatcacagggttgattgtccggggctaccgccagcccctggagggcagtgacctctggtccttaaacaaggaggacacgtcggaacaagtcgtgcctgttttggtaaagaactggaagaaggaatgcgccaagactaggaagcagccggtgaaggttgtgtactcctccaaggatcctgcccagccgaaagagagttccaaggtggatgcgaatgaggaggtggaggctttgatcgtcaagtccccacagaaggagtggaacccctctctgtttaaggtgttatacaagacctttgggccctacttcctcatgagcttcttcttcaaggccatccacgacctgatgatgttttccgggccgcagatcttaaagttgctcatcaagttcgtgaatgacacgaaggccccagactggcagggctacttctacaccgtgctgctgtttgtcactgcctgcctgcagaccctcgtgctgcaccagtacttccacatctgcttcgtcagtggcatgaggatcaagaccgctgtcattggggctgtctatcggaaggccctggtgatcaccaattcagccagaaaatcctccacggtcggggagattgtcaacctcatgtctgtggacgctcagaggttcatggacttggccacgtacattaacatgatctggtcagcccccctgcaagtcatccttgctctctacctcctgtggctgaatctgggcccttccgtcctggctggagtggcggtgatggtcctcatggtgcccgtcaatgctgtgatggcgatgaagaccaagacgtatcaggtggcccacatgaagagcaaagacaatcggatcaagctgatgaacgaaattctcaatgggatcaaagtgctaaagctttatgcctgggagctggcattcaaggacaaggtgctggccatcaggcaggaggagctgaaggtgctgaagaagtctgcctacctgtcagccgtgggcaccttcacctgggtctgcacgccctttctggtggccttgtgcacatttgccgtctacgtgaccattgacgagaacaacatcctggatgcccagacagccttcgtgtctttggccttgttcaacatcctccggtttcccctgaacattctccccatggtcatcagcagcatcgtgcaggcgagtgtctccctcaaacgcctgaggatctttctctcccatgaggagctggaacctgacagcatcgagcgacggcctgtcaaagacggcgggggcacgaacagcatcaccgtgaggaatgccacattcacctgggccaggagcgaccctcccacactgaatggcatcaccttctccatccccgaaggtgctttggtggccgtggtgggccaggtgggctgcggaaagtcgtccctgctctcagccctcttggctgagatggacaaagtggaggggcacgtggctatcaagggcgtgaacctgtctgggggccagaagcagcgcgtgagcctggcccgggccgtgtactccaacgctgacatttacctcttcgatgatcccctctcagcagtggatgcccatgtgggaaaacacatctttgaaaatgtgattggccccaaggggatgctgaagaacaagacgcggatcttggtcacgcacagcatgagctacttgccgcaggtggacgtcatcatcgtcatgagtggcggcaagatctctgagatgggctcctaccaggagctgctggctcgagacggcgccttcgctgagttcctgcgtacctatgccagcacagagcaggagcaggatgcagaggagaacggggtcacgggcgtcagcggtccagggaaggaagcaaagcaaatggagaatggcatgctggtgacggacagtgcagggaagcaactgcagagacagctcagcagctcctcctcctatagtggggacatcagcaggcaccacaacagcaccgcagaactgcagaaagctgaggccaagaaggaggagacctggaagctgatggaggctgacaaggcgcagacagggcaggtcaagctttccgtgtactgggactacatgaaggccatcggactcttcatctccttcctcagcatcttccttttcatgtgtaaccatgtgtccgcgctggcttccaactattggctcagcctctggactgatgaccccatcgtcaacgggactcaggagcacacgaaagtccggctgagcgtctatggagccctgggcatttcacaagggatcgccgtgtttggctactccatggccgtgtccatcggggggatcttggcttcccgctgtctgcacgtggacctgctgcacagcatcctgcggtcacccatgagcttctttgagcggacccccagtgggaacctggtgaaccgcttctccaaggagctggacacagtggactccatgatcccggaggtcatcaagatgttcatgggctccctgttcaacgtcattggtgcctgcatcgttatcctgctggccacgcccatcgccgccatcatcatcccgccccttggcctcatctacttcttcgtccagaggttctacgtggcttcctcccggcagctgaagcgcctcgagtcggtcagccgctccccggtctattcccatttcaacgagaccttgctgggggtcagcgtcattcgagccttcgaggagcaggagcgcttcatccaccagagtgacctgaaggtggacgagaaccagaaggcctattaccccagcatcgtggccaacaggtggctggccgtgcggctggagtgtgtgggcaactgcatcgttctgtttgctgccctgtttgcggtgatctccaggcacagcctcagtgctggcttggtgggcctctcagtgtcttactcattgcaggtcaccacgtacttgaactggctggttcggatgtcatctgaaatggaaaccaacatcgtggccgtggagaggctcaaggagtattcagagactgagaaggaggcgccctggcaaatccaggagacagctccgcccagcagctggccccaggtgggccgagtggaattccggaactactgcctgcgctaccgagaggacctggacttcgttctcaggcacatcaatgtcacgatcaatgggggagaaaaggtcggcatcgtggggcggacgggagctgggaagtcgtccctgaccctgggcttatttcggatcaacgagtctgccgaaggagagatcatcatcgatggcatcaacatcgccaagatcggcctgcacgacctccgcttcaagatcaccatcatcccccaggaccctgttttgttttcgggttccctccgaatgaacctggacccattcagccagtactcggatgaagaagtctggacgtccctggagctggcccacctgaaggacttcgtgtcagcccttcctgacaagctagaccatgaatgtgcagaaggcggggagaacctcagtgtcgggcagcgccagcttgtgtgcctagcccgggccctgctgaggaagacgaagatccttgtgttggatgaggccacggcagccgtggacctggaaacggacgacctcatccagtccaccatccggacacagttcgaggactgcaccgtcctcaccatcgcccaccggctcaacaccatcatggactacacaagggtgatcgtcttggacaaaggagaaatccaggagtacggcgccccatcggacctcctgcagcagagaggtcttttctacagcatggccaaagacgccggcttggtgtgagccccagagctggcatatctggtcagaactgcagggcctatatgccagcgcccagggaggagtcagtacccctggtaaaccaagcctcccacactgaaaccaaaacataaaaaccaaacccagacaaccaaaacatattcaaagcagcagccaccgccatccggtcccctgcctggaactggctgtgaagacccaggagagacagagatgcgaaccacccaaaacacgcacaccctgcccctggtgccctgagacagacacacagcctcacgcccccaggaatgcaagtggtttcctggtgcttcccacggaggagttttggcagccagacttctggaggaattggttgtatagaagatcctagtgaccaaattcagcctactgcctcggatctctccagccgaagtctgtggactgcaagtctttgagatgcttctggctcccatcacctctaacatccttgtctgggtctaccaggaacgcttcatttccttggggctgcagttttgtggttgaggggcctggagaaaatcattttctccccttggcagtgtcccagggccctggatggtcctcttaccaacatctggtcttccaggcactcaaaagctgggaaccagcatctcagcgccagctctaccagttctcgttttgggccagaggcagcctctgcactcccacgcctgtcctcctggaagggacctggttggactaacggctaacctggacctggaactgtagggccaggggattgtctcagggccgacgttccacctggggcttccctccccacccaccccgactccaggctttcccttttttcttttgttcaacattgtaagaacaatcaatgctgttattactgttcccaccatgattgatgtggggtaaatattaaggagatggcctcatgggaatttgaccttgactagaaatagagactgagagtgagcaaccagctggaaggtactatgccagtcctagcagaaaaatgtgttaggggcctggcccaaagcagtgttggttgcttacagtgttgattgattttgttcttttttcttaccacctcttttctttccctctcatggtacctgctcatggttatgaagctttcaaagtaaagaacacgaaatacctcccaagtattaccagtgggtaccaaaaaaatgtccccttgagtcttttccttgtttttagatgttaattctctcccttggcatccggttagccccccagggggggcagcattgtggagaacttgatatttagttactgatgctcttccaggacacgaaaagaacccatctttgaatatcaatgattttttttttttaagtactgttccggggagaaaaacagtctcaaaacttgaacttcttgggaatagaagtgttgggctgagaagtaacattcccaggaaatagtgagaagctcgccctgtgtttgaaaccgtgttggtctctgtgttcctggaagaaaacagggaagcagcatcttttaaagcctgttctttaaggtgtctcgttagagcccaaagtggaatccggaaggcagccagagctgaggctgccccaagactcagacttgctaagaattacgccgccgacttcaaacccagagagcatctttcttttaggcgaaaacgcatatatttattttttgtaagttataccattctttcacattagataaactaagttttgggggatccttttgtaatgacttacactggaaatgcgaacatttgcagtaaaaaaatatatatatatctatatattttatttctttctaaa

SEQ ID NO: 407 - DNA, 6594 bp, Homo sapiens
  source 1..6594: mol_type = genomic DNA
ccaggcggcgttgcggccccggccccggctccctgcgccgccgccgccgccgccgccagcgctagcgccagcagccgggcccgatcacccgccgcccggtgcccgccgccgcccgcgccagcaaccgggcccgatcacccgccgcccggtgcccgccgccgcccgcgccaccggcatggcgctccggggcttctgcagcgccgatggctccgacccgctctgggactggaatgtcacgtggaataccagcaaccccgacttcaccaagtgctttcagaacacggtcctcgtgtgggtgccttgtttttacctctgggcctgtttccccttctacttcctctatctctcccgacatgaccgaggctacattcagatgacacctctcaacaaaaccaaaactgccttgggatttttgctgtggatcgtctgctgggcagacctcttctactctttctgggaaagaagtcggggcatattcctggccccagtgtttctggtcagcccaactctcttgggcatcaccatgctgcttgctacctttttaattcagctggagaggaggaagggagttcagtcttcagggatcatgctcactttctggctggtagccctagtgtgtgccctagccatcctgagatccaaaattatgacagccttaaaagaggatgcccaggtggacctgtttcgtgacatcactttctacgtctacttttccctcttactcattcagctcgtcttgtcctgtttctcagatcgctcacccctgttctcggaaaccatccacgaccctaatccctgcccagagtccagcgcttccttcctgtcgaggatcaccttctggtggatcacagggttgattgtccggggctaccgccagcccctggagggcagtgacctctggtccttaaacaaggaggacacgtcggaacaagtcgtgcctgttttggtaaagaactggaagaaggaatgcgccaagactaggaagcagccggtgaaggttgtgtactcctccaaggatcctgcccagccgaaagagagttccaaggtggatgcgaatgaggaggtggaggctttgatcgtcaagtccccacagaaggagtggaacccctctctgtttaaggtgttatacaagacctttgggccctacttcctcatgagcttcttcttcaaggccatccacgacctgatgatgttttccgggccgcagatcttaaagttgctcatcaagttcgtgaatgacacgaaggccccagactggcagggctacttctacaccgtgctgctgtttgtcactgcctgcctgcagaccctcgtgctgcaccagtacttccacatctgcttcgtcagtggcatgaggatcaagaccgctgtcattggggctgtctatcggaaggccctggtgatcaccaattcagccagaaaatcctccacggtcggggagattgtcaacctcatgtctgtggacgctcagaggttcatggacttggccacgtacattaacatgatctggtcagcccccctgcaagtcatccttgctctctacctcctgtggctgaatctgggcccttccgtcctggctggagtggcggtgatggtcctcatggtgcccgtcaatgctgtgatggcgatgaagaccaagacgtatcaggtggcccacatgaagagcaaagacaatcggatcaagctgatgaacgaaattctcaatgggatcaaagtgctaaagctttatgcctgggagctggcattcaaggacaaggtgctggccatcaggcaggaggagctgaaggtgctgaagaagtctgcctacctgtcagccgtgggcaccttcacctgggtctgcacgccctttctggtggccttgtgcacatttgccgtctacgtgaccattgacgagaacaacatcctggatgcccagacagccttcgtgtctttggccttgttcaacatcctccggtttcccctgaacattctccccatggtcatcagcagcatcgtgcaggcgagtgtctccctcaaacgcctgaggatctttctctcccatgaggagctggaacctgacagcatcgagcgacggcctgtcaaagacggcgggggcacgaacagcatcaccgtgaggaatgccacattcacctgggccaggagcgaccctcccacactgaatggcatcaccttctccatccccgaaggtgctttggtggccgtggtgggccaggtgggctgcggaaagtcgtccctgctctcagccctcttggctgagatggacaaagtggaggggcacgtggctatcaagggctccgtggcctatgtgccacagcaggcctggattcagaatgattctctccgagaaaacatcctttttggatgtcagctggaggaaccatattacaggtccgtgatacaggcctgtgccctcctcccagacctggaaatcctgcccagtggggatcggacagagattggcgagaagggcgtgaacctgtctgggggccagaagcagcgcgtgagcctggcccgggccgtgtactccaacgctgacatttacctcttcgatgatcccctctcagcagtggatgcccatgtgggaaaacacatctttgaaaatgtgattggccccaaggggatgctgaagaacaagacgcggatcttggtcacgcacagcatgagctacttgccgcaggtggacgtcatcatcgtcatgagtggcggcaagatctctgagatgggctcctaccaggagctgctggctcgagacggcgccttcgctgagttcctgcgtacctatgccagcacagagcaggagcaggatgcagaggagaacggcagcacagtgatggacgaggaggaagcaggggtcacgggcgtcagcggtccagggaaggaagcaaagcaaatggagaatggcatgctggtgacggacagtgcagggaagcaactgcagagacagctcagcagctcctcctcctatagtggggacatcagcaggcaccacaacagcaccgcagaactgcagaaagctgaggccaagaaggaggagacctggaagctgatggaggctgacaaggcgcagacagggcaggtcaagctttccgtgtactgggactacatgaaggccatcggactcttcatctccttcctcagcatcttccttttcatgtgtaaccatgtgtccgcgctggcttccaactattggctcagcctctggactgatgaccccatcgtcaacgggactcaggagcacacgaaagtccggctgagcgtctatggagccctgggcatttcacaagggatcgccgtgtttggctactccatggccgtgtccatcggggggatcttggcttcccgctgtctgcacgtggacctgctgcacagcatcctgcggtcacccatgagcttctttgagcggacccccagtgggaacctggtgaaccgcttctccaaggagctggacacagtggactccatgatcccggaggtcatcaagatgttcatgggctccctgttcaacgtcattggtgcctgcatcgttatcctgctggccacgcccatcgccgccatcatcatcccgccccttggcctcatctacttcttcgtccagaggttctacgtggcttcctcccggcagctgaagcgcctcgagtcggtcagccgctccccggtctattcccatttcaacgagaccttgctgggggtcagcgtcattcgagccttcgaggagcaggagcgcttcatccaccagagtgacctgaaggtggacgagaaccagaaggcctattaccccagcatcgtggccaacaggtggctggccgtgcggctggagtgtgtgggcaactgcatcgttctgtttgctgccctgtttgcggtgatctccaggcacagcctcagtgctggcttggtgggcctctcagtgtcttactcattgcaggtcaccacgtacttgaactggctggttcggatgtcatctgaaatggaaaccaacatcgtggccgtggagaggctcaaggagtattcagagactgagaaggaggcgccctggcaaatccaggagacagctccgcccagcagctggccccaggtgggccgagtggaattccggaactactgcctgcgctaccgagaggacctggacttcgttctcaggcacatcaatgtcacgatcaatgggggagaaaaggtcggcatcgtggggcggacgggagctgggaagtcgtccctgaccctgggcttatttcggatcaacgagtctgccgaaggagagatcatcatcgatggcatcaacatcgccaagatcggcctgcacgacctccgcttcaagatcaccatcatcccccaggaccctgttttgttttcgggttccctccgaatgaacctggacccattcagccagtactcggatgaagaagtctggacgtccctggagctggcccacctgaaggacttcgtgtcagcccttcctgacaagctagaccatgaatgtgcagaaggcggggagaacctcagtgtcgggcagcgccagcttgtgtgcctagcccgggccctgctgaggaagacgaagatccttgtgttggatgaggccacggcagccgtggacctggaaacggacgacctcatccagtccaccatccggacacagttcgaggactgcaccgtcctcaccatcgcccaccggctcaacaccatcatggactacacaagggtgatcgtcttggacaaaggagaaatccaggagtacggcgccccatcggacctcctgcagcagagaggtcttttctacagcatggccaaagacgccggcttggtgtgagccccagagctggcatatctggtcagaactgcagggcctatatgccagcgcccagggaggagtcagtacccctggtaaaccaagcctcccacactgaaaccaaaacataaaaaccaaacccagacaaccaaaacatattcaaagcagcagccaccgccatccggtcccctgcctggaactggctgtgaagacccaggagagacagagatgcgaaccacccaaaacacgcacaccctgcccctggtgccctgagacagacacacagcctcacgcccccaggaatgcaagtggtttcctggtgcttcccacggaggagttttggcagccagacttctggaggaattggttgtatagaagatcctagtgaccaaattcagcctactgcctcggatctctccagccgaagtctgtggactgcaagtctttgagatgcttctggctcccatcacctctaacatccttgtctgggtctaccaggaacgcttcatttccttggggctgcagttttgtggttgaggggcctggagaaaatcattttctccccttggcagtgtcccagggccctggatggtcctcttaccaacatctggtcttccaggcactcaaaagctgggaaccagcatctcagcgccagctctaccagttctcgttttgggccagaggcagcctctgcactcccacgcctgtcctcctggaagggacctggttggactaacggctaacctggacctggaactgtagggccaggggattgtctcagggccgacgttccacctggggcttccctccccacccaccccgactccaggctttcccttttttcttttgttcaacattgtaagaacaatcaatgctgttattactgttcccaccatgattgatgtggggtaaatattaaggagatggcctcatgggaatttgaccttgactagaaatagagactgagagtgagcaaccagctggaaggtactatgccagtcctagcagaaaaatgtgttaggggcctggcccaaagcagtgttggttgcttacagtgttgattgattttgttcttttttcttaccacctcttttctttccctctcatggtacctgctcatggttatgaagctttcaaagtaaagaacacgaaatacctcccaagtattaccagtgggtaccaaaaaaatgtccccttgagtcttttccttgtttttagatgttaattctctcccttggcatccggttagccccccagggggggcagcattgtggagaacttgatatttagttactgatgctcttccaggacacgaaaagaacccatctttgaatatcaatgattttttttttttaagtactgttccggggagaaaaacagtctcaaaacttgaacttcttgggaatagaagtgttgggctgagaagtaacattcccaggaaatagtgagaagctcgccctgtgtttgaaaccgtgttggtctctgtgttcctggaagaaaacagggaagcagcatcttttaaagcctgttctttaaggtgtctcgttagagcccaaagtggaatccggaaggcagccagagctgaggctgccccaagactcagacttgctaagaattacgccgccgacttcaaacccagagagcatctttcttttaggcgaaaacgcatatatttattttttgtaagttataccattctttcacattagataaactaagttttgggggatccttttgtaatgacttacactggaaatgcgaacatttgcagtaaaaaaatatatatatatctatatattttatttctttctaaa

SEQ ID NO: 408 - DNA, 6552 bp, Homo sapiens
  source 1..6552: mol_type = genomic DNA
ccaggcggcgttgcggccccggccccggctccctgcgccgccgccgccgccgccgccagcgctagcgccagcagccgggcccgatcacccgccgcccggtgcccgccgccgcccgcgccagcaaccgggcccgatcacccgccgcccggtgcccgccgccgcccgcgccaccggcatggcgctccggggcttctgcagcgccgatggctccgacccgctctgggactggaatgtcacgtggaataccagcaaccccgacttcaccaagtgctttcagaacacggtcctcgtgtgggtgccttgtttttacctctgggcctgtttccccttctacttcctctatctctcccgacatgaccgaggctacattcagatgacacctctcaacaaaaccaaaactgccttgggatttttgctgtggatcgtctgctgggcagacctcttctactctttctgggaaagaagtcggggcatattcctggccccagtgtttctggtcagcccaactctcttgggcatcaccatgctgcttgctacctttttaattcagctggagaggaggaagggagttcagtcttcagggatcatgctcactttctggctggtagccctagtgtgtgccctagccatcctgagatccaaaattatgacagccttaaaagaggatgcccaggtggacctgtttcgtgacatcactttctacgtctacttttccctcttactcattcagctcgtcttgtcctgtttctcagatcgctcacccctgttctcggaaaccatccacgaccctaatccctgcccagagtccagcgcttccttcctgtcgaggatcaccttctggtggatcacagggttgattgtccggggctaccgccagcccctggagggcagtgacctctggtccttaaacaaggaggacacgtcggaacaagtcgtgcctgttttggtaaagaactggaagaaggaatgcgccaagactaggaagcagccggtgaaggttgtgtactcctccaaggatcctgcccagccgaaagagagttccaaggtggatgcgaatgaggaggtggaggctttgatcgtcaagtccccacagaaggagtggaacccctctctgtttaaggtgttatacaagacctttgggccctacttcctcatgagcttcttcttcaaggccatccacgacctgatgatgttttccgggccgcagatcttaaagttgctcatcaagttcgtgaatgacacgaaggccccagactggcagggctacttctacaccgtgctgctgtttgtcactgcctgcctgcagaccctcgtgctgcaccagtacttccacatctgcttcgtcagtggcatgaggatcaagaccgctgtcattggggctgtctatcggaaggccctggtgatcaccaattcagccagaaaatcctccacggtcggggagattgtcaacctcatgtctgtggacgctcagaggttcatggacttggccacgtacattaacatgatctggtcagcccccctgcaagtcatccttgctctctacctcctgtggctgaatctgggcccttccgtcctggctggagtggcggtgatggtcctcatggtgcccgtcaatgctgtgatggcgatgaagaccaagacgtatcaggtggcccacatgaagagcaaagacaatcggatcaagctgatgaacgaaattctcaatgggatcaaagtgctaaagctttatgcctgggagctggcattcaaggacaaggtgctggccatcaggcaggaggagctgaaggtgctgaagaagtctgcctacctgtcagccgtgggcaccttcacctgggtctgcacgccctttctggtggccttgtgcacatttgccgtctacgtgaccattgacgagaacaacatcctggatgcccagacagccttcgtgtctttggccttgttcaacatcctccggtttcccctgaacattctccccatggtcatcagcagcatcgtgcaggcgagtgtctccctcaaacgcctgaggatctttctctcccatgaggagctggaacctgacagcatcgagcgacggcctgtcaaagacggcgggggcacgaacagcatcaccgtgaggaatgccacattcacctgggccaggagcgaccctcccacactgaatggcatcaccttctccatccccgaaggtgctttggtggccgtggtgggccaggtgggctgcggaaagtcgtccctgctctcagccctcttggctgagatggacaaagtggaggggcacgtggctatcaagggctccgtggcctatgtgccacagcaggcctggattcagaatgattctctccgagaaaacatcctttttggatgtcagctggaggaaccatattacaggtccgtgatacaggcctgtgccctcctcccagacctggaaatcctgcccagtggggatcggacagagattggcgagaagggcgtgaacctgtctgggggccagaagcagcgcgtgagcctggcccgggccgtgtactccaacgctgacatttacctcttcgatgatcccctctcagcagtggatgcccatgtgggaaaacacatctttgaaaatgtgattggccccaaggggatgctgaagaacaagacgcggatcttggtcacgcacagcatgagctacttgccgcaggtggacgtcatcatcgtcatgagtggcggcaagatctctgagatgggctcctaccaggagctgctggctcgagacggcgccttcgctgagttcctgcgtacctatgccagcacagagcaggagcaggatgcagaggagaacggggtcacgggcgtcagcggtccagggaaggaagcaaagcaaatggagaatggcatgctggtgacggacagtgcagggaagcaactgcagagacagctcagcagctcctcctcctatagtggggacatcagcaggcaccacaacagcaccgcagaactgcagaaagctgaggccaagaaggaggagacctggaagctgatggaggctgacaaggcgcagacagggcaggtcaagctttccgtgtactgggactacatgaaggccatcggactcttcatctccttcctcagcatcttccttttcatgtgtaaccatgtgtccgcgctggcttccaactattggctcagcctctggactgatgaccccatcgtcaacgggactcaggagcacacgaaagtccggctgagcgtctatggagccctgggcatttcacaagggatcgccgtgtttggctactccatggccgtgtccatcggggggatcttggcttcccgctgtctgcacgtggacctgctgcacagcatcctgcggtcacccatgagcttctttgagcggacccccagtgggaacctggtgaaccgcttctccaaggagctggacacagtggactccatgatcccggaggtcatcaagatgttcatgggctccctgttcaacgtcattggtgcctgcatcgttatcctgctggccacgcccatcgccgccatcatcatcccgccccttggcctcatctacttcttcgtccagaggttctacgtggcttcctcccggcagctgaagcgcctcgagtcggtcagccgctccccggtctattcccatttcaacgagaccttgctgggggtcagcgtcattcgagccttcgaggagcaggagcgcttcatccaccagagtgacctgaaggtggacgagaaccagaaggcctattaccccagcatcgtggccaacaggtggctggccgtgcggctggagtgtgtgggcaactgcatcgttctgtttgctgccctgtttgcggtgatctccaggcacagcctcagtgctggcttggtgggcctctcagtgtcttactcattgcaggtcaccacgtacttgaactggctggttcggatgtcatctgaaatggaaaccaacatcgtggccgtggagaggctcaaggagtattcagagactgagaaggaggcgccctggcaaatccaggagacagctccgcccagcagctggccccaggtgggccgagtggaattccggaactactgcctgcgctaccgagaggacctggacttcgttctcaggcacatcaatgtcacgatcaatgggggagaaaaggtcggcatcgtggggcggacgggagctgggaagtcgtccctgaccctgggcttatttcggatcaacgagtctgccgaaggagagatcatcatcgatggcatcaacatcgccaagatcggcctgcacgacctccgcttcaagatcaccatcatcccccaggaccctgttttgttttcgggttccctccgaatgaacctggacccattcagccagtactcggatgaagaagtctggacgtccctggagctggcccacctgaaggacttcgtgtcagcccttcctgacaagctagaccatgaatgtgcagaaggcggggagaacctcagtgtcgggcagcgccagcttgtgtgcctagcccgggccctgctgaggaagacgaagatccttgtgttggatgaggccacggcagccgtggacctggaaacggacgacctcatccagtccaccatccggacacagttcgaggactgcaccgtcctcaccatcgcccaccggctcaacaccatcatggactacacaagggtgatcgtcttggacaaaggagaaatccaggagtacggcgccccatcggacctcctgcagcagagaggtcttttctacagcatggccaaagacgccggcttggtgtgagccccagagctggcatatctggtcagaactgcagggcctatatgccagcgcccagggaggagtcagtacccctggtaaaccaagcctcccacactgaaaccaaaacataaaaaccaaacccagacaaccaaaacatattcaaagcagcagccaccgccatccggtcccctgcctggaactggctgtgaagacccaggagagacagagatgcgaaccacccaaaacacgcacaccctgcccctggtgccctgagacagacacacagcctcacgcccccaggaatgcaagtggtttcctggtgcttcccacggaggagttttggcagccagacttctggaggaattggttgtatagaagatcctagtgaccaaattcagcctactgcctcggatctctccagccgaagtctgtggactgcaagtctttgagatgcttctggctcccatcacctctaacatccttgtctgggtctaccaggaacgcttcatttccttggggctgcagttttgtggttgaggggcctggagaaaatcattttctccccttggcagtgtcccagggccctggatggtcctcttaccaacatctggtcttccaggcactcaaaagctgggaaccagcatctcagcgccagctctaccagttctcgttttgggccagaggcagcctctgcactcccacgcctgtcctcctggaagggacctggttggactaacggctaacctggacctggaactgtagggccaggggattgtctcagggccgacgttccacctggggcttccctccccacccaccccgactccaggctttcccttttttcttttgttcaacattgtaagaacaatcaatgctgttattactgttcccaccatgattgatgtggggtaaatattaaggagatggcctcatgggaatttgaccttgactagaaatagagactgagagtgagcaaccagctggaaggtactatgccagtcctagcagaaaaatgtgttaggggcctggcccaaagcagtgttggttgcttacagtgttgattgattttgttcttttttcttaccacctcttttctttccctctcatggtacctgctcatggttatgaagctttcaaagtaaagaacacgaaatacctcccaagtattaccagtgggtaccaaaaaaatgtccccttgagtcttttccttgtttttagatgttaattctctcccttggcatccggttagccccccagggggggcagcattgtggagaacttgatatttagttactgatgctcttccaggacacgaaaagaacccatctttgaatatcaatgattttttttttttaagtactgttccggggagaaaaacagtctcaaaacttgaacttcttgggaatagaagtgttgggctgagaagtaacattcccaggaaatagtgagaagctcgccctgtgtttgaaaccgtgttggtctctgtgttcctggaagaaaacagggaagcagcatcttttaaagcctgttctttaaggtgtctcgttagagcccaaagtggaatccggaaggcagccagagctgaggctgccccaagactcagacttgctaagaattacgccgccgacttcaaacccagagagcatctttcttttaggcgaaaacgcatatatttattttttgtaagttataccattctttcacattagataaactaagttttgggggatccttttgtaatgacttacactggaaatgcgaacatttgcagtaaaaaaatatatatatatctatatatttta

SEQ ID NO: 409 - DNA, 5869 bp, Homo sapiens
  source 1..5869: mol_type = genomic DNA
tgctttcagaacacggtcctcgtgtgggtgccttgtttttacctctgggcctgtttccccttctacttcctctatctctcccgacatgaccgaggctacattcagatgacacctctcaacaaaaccaaaactgccttgggatttttgctgtggatcgtctgctgggcagtgacctctggtccttaaacaaggaggacacgtcggaacaagtcgtgcctgttttggtaaagaactggaagaaggaatgcgccaagactaggaagcagccggtgaaggttgtgtactcctccaaggatcctgcccagccgaaagagagttccaaggtggatgcgaatgaggaggtggaggctttgatcgtcaagtccccacagaaggagtggaacccctctctgtttaaggtgttatacaagacctttgggccctacttcctcatgagcttcttcttcaaggccatccacgacctgatgatgttttccgggccgcagatcttaaagttgctcatcaagttcgtgaatgacacgaaggccccagactggcagggctacttctacaccgtgctgctgtttgtcactgcctgcctgcagaccctcgtgctgcaccagtacttccacatctgcttcgtcagtggcatgaggatcaagaccgctgtcattggggctgtctatcggaaggccctggtgatcaccaattcagccagaaaatcctccacggtcggggagattgtcaacctcatgtctgtggacgctcagaggttcatggacttggccacgtacattaacatgatctggtcagcccccctgcaagtcatccttgctctctacctcctgtggctgaatctgggcccttccgtcctggctggagtggcggtgatggtcctcatggtgcccgtcaatgctgtgatggcgatgaagaccaagacgtatcaggtggcccacatgaagagcaaagacaatcggatcaagctgatgaacgaaattctcaatgggatcaaagtgctaaagctttatgcctgggagctggcattcaaggacaaggtgctggccatcaggcaggaggagctgaaggtgctgaagaagtctgcctacctgtcagccgtgggcaccttcacctgggtctgcacgccctttctggtggccttgtgcacatttgccgtctacgtgaccattgacgagaacaacatcctggatgcccagacagccttcgtgtctttggccttgttcaacatcctccggtttcccctgaacattctccccatggtcatcagcagcatcgtgcaggcgagtgtctccctcaaacgcctgaggatctttctctcccatgaggagctggaacctgacagcatcgagcgacggcctgtcaaagacggcgggggcacgaacagcatcaccgtgaggaatgccacattcacctgggccaggagcgaccctcccacactgaatggcatcaccttctccatccccgaaggtgctttggtggccgtggtgggccaggtgggctgcggaaagtcgtccctgctctcagccctcttggctgagatggacaaagtggaggggcacgtggctatcaagggctccgtggcctatgtgccacagcaggcctggattcagaatgattctctccgagaaaacatcctttttggatgtcagctggaggaaccatattacaggtccgtgatacaggcctgtgccctcctcccagacctggaaatcctgcccagtggggatcggacagagattggcgagaagggcgtgaacctgtctgggggccagaagcagcgcgtgagcctggcccgggccgtgtactccaacgctgacatttacctcttcgatgatcccctctcagcagtggatgcccatgtgggaaaacacatctttgaaaatgtgattggccccaaggggatgctgaagaacaagacgcggatcttggtcacgcacagcatgagctacttgccgcaggtggacgtcatcatcgtcatgagtggcggcaagatctctgagatgggctcctaccaggagctgctggctcgagacggcgccttcgctgagttcctgcgtacctatgccagcacagagcaggagcaggatgcagaggagaacggcagcacagtgatggacgaggaggaagcaggggtcacgggcgtcagcggtccagggaaggaagcaaagcaaatggagaatggcatgctggtgacggacagtgcagggaagcaactgcagagacagctcagcagctcctcctcctatagtggggacatcagcaggcaccacaacagcaccgcagaactgcagaaagctgaggccaagaaggaggagacctggaagctgatggaggctgacaaggcgcagacagggcaggtcaagctttccgtgtactgggactacatgaaggccatcggactcttcatctccttcctcagcatcttccttttcatgtgtaaccatgtgtccgcgctggcttccaactattggctcagcctctggactgatgaccccatcgtcaacgggactcaggagcacacgaaagtccggctgagcgtctatggagccctgggcatttcacaagggatcgccgtgtttggctactccatggccgtgtccatcggggggatcttggcttcccgctgtctgcacgtggacctgctgcacagcatcctgcggtcacccatgagcttctttgagcggacccccagtgggaacctggtgaaccgcttctccaaggagctggacacagtggactccatgatcccggaggtcatcaagatgttcatgggctccctgttcaacgtcattggtgcctgcatcgttatcctgctggccacgcccatcgccgccatcatcatcccgccccttggcctcatctacttcttcgtccagaggttctacgtggcttcctcccggcagctgaagcgcctcgagtcggtcagccgctccccggtctattcccatttcaacgagaccttgctgggggtcagcgtcattcgagccttcgaggagcaggagcgcttcatccaccagagtgacctgaaggtggacgagaaccagaaggcctattaccccagcatcgtggccaacaggtggctggccgtgcggctggagtgtgtgggcaactgcatcgttctgtttgctgccctgtttgcggtgatctccaggcacagcctcagtgctggcttggtgggcctctcagtgtcttactcattgcaggtcaccacgtacttgaactggctggttcggatgtcatctgaaatggaaaccaacatcgtggccgtggagaggctcaaggagtattcagagactgagaaggaggcgccctggcaaatccaggagacagctccgcccagcagctggccccaggtgggccgagtggaattccggaactactgcctgcgctaccgagaggacctggacttcgttctcaggcacatcaatgtcacgatcaatgggggagaaaaggtcggcatcgtggggcggacgggagctgggaagtcgtccctgaccctgggcttatttcggatcaacgagtctgccgaaggagagatcatcatcgatggcatcaacatcgccaagatcggcctgcacgacctccgcttcaagatcaccatcatcccccaggaccctgttttgttttcgggttccctccgaatgaacctggacccattcagccagtactcggatgaagaagtctggacgtccctggagctggcccacctgaaggacttcgtgtcagcccttcctgacaagctagaccatgaatgtgcagaaggcggggagaacctcagtgtcgggcagcgccagcttgtgtgcctagcccgggccctgctgaggaagacgaagatccttgtgttggatgaggccacggcagccgtggacctggaaacggacgacctcatccagtccaccatccggacacagttcgaggactgcaccgtcctcaccatcgcccaccggctcaacaccatcatggactacacaagggtgatcgtcttggacaaaggagaaatccaggagtacggcgccccatcggacctcctgcagcagagaggtcttttctacagcatggccaaagacgccggcttggtgtgagccccagagctggcatatctggtcagaactgcagggcctatatgccagcgcccagggaggagtcagtacccctggtaaaccaagcctcccacactgaaaccaaaacataaaaaccaaacccagacaaccaaaacatattcaaagcagcagccaccgccatccggtcccctgcctggaactggctgtgaagacccaggagagacagagatgcgaaccacccaaaacacgcacaccctgcccctggtgccctgagacagacacacagcctcacgcccccaggaatgcaagtggtttcctggtgcttcccacggaggagttttggcagccagacttctggaggaattggttgtatagaagatcctagtgaccaaattcagcctactgcctcggatctctccagccgaagtctgtggactgcaagtctttgagatgcttctggctcccatcacctctaacatccttgtctgggtctaccaggaacgcttcatttccttggggctgcagttttgtggttgaggggcctggagaaaatcattttctccccttggcagtgtcccagggccctggatggtcctcttaccaacatctggtcttccaggcactcaaaagctgggaaccagcatctcagcgccagctctaccagttctcgttttgggccagaggcagcctctgcactcccacgcctgtcctcctggaagggacctggttggactaacggctaacctggacctggaactgtagggccaggggattgtctcagggccgacgttccacctggggcttccctccccacccaccccgactccaggctttcccttttttcttttgttcaacattgtaagaacaatcaatgctgttattactgttcccaccatgattgatgtggggtaaatattaaggagatggcctcatgggaatttgaccttgactagaaatagagactgagagtgagcaaccagctggaaggtactatgccagtcctagcagaaaaatgtgttaggggcctggcccaaagcagtgttggttgcttacagtgttgattgattttgttcttttttcttaccacctcttttctttccctctcatggtacctgctcatggttatgaagctttcaaagtaaagaacacgaaatacctcccaagtattaccagtgggtaccaaaaaaatgtccccttgagtcttttccttgtttttagatgttaattctctcccttggcatccggttagccccccagggggggcagcattgtggagaacttgatatttagttactgatgctcttccaggacacgaaaagaacccatctttgaatatcaatgattttttttttttaagtactgttccggggagaaaaacagtctcaaaacttgaacttcttgggaatagaagtgttgggctgagaagtaacattcccaggaaatagtgagaagctcgccctgtgtttgaaaccgtgttggtctctgtgttcctggaagaaaacagggaagcagcatcttttaaagcctgttctttaaggtgtctcgttagagcccaaagtggaatccggaaggcagccagagctgaggctgccccaagactcagacttgctaagaattacgccgccgacttcaaacccagagagcatctttcttttaggcgaaaacgcatatatttattttttgtaagttataccattctttcacattagataaactaagttttgggggatccttttgtaatgacttacactggaaatgcgaacatttgcagtaaaaaaatatatatatatctatatattttatttctttct

SEQ ID NO: 410 - DNA, 4479 bp, Homo sapiens
  source 1..4479: mol_type = genomic DNA
actgcgttcagctctggcggtccacagcccgaagcgcggcttaggaagttcgtgtcagcgctgcctgagctcgtcccctggatgtccgggtctccccaggcggccacccgccggctcccatcgtgacctccagccgcagcgcctcccacgccggccgccgcgcgaggggagcgctcgggcgcgccgggtgtggttgggggaaggggttgtgccgcgcgcgggctgcgtgctgtgcccactcaaaaggttccgggcgcgcaggagggaagaggcagtgcccgccactcccactgagattgagagacgcggcaaggaggcagcctgtggaggaactgggtaggatttaggaacgcaccgtgcacatgcttggtggtcttgttaagtggaaactgctgctttagagtttgtttggaaggtccgggtgactcatcccaacatttacatccttaattgttaaagcgctgcctccgagcgcacgcatcctgagatcctgagcctttggttaagaccgagctctattaagctgaaaagataaaaactctccagatgtcttccagtaatgtcgaagtttttatcccagtgtcacaaggaaacaccaatggcttccccgcgacagcttccaatgacctgaaggcatttactgaaggagctgtgttaagttttcataacatctgctatcgagtaaaactgaagagtggctttctaccttgtcgaaaaccagttgagaaagaaatattatcgaatatcaatgggatcatgaaacctggtctcaacgccatcctgggacccacaggtggaggcaaatcttcgttattagatgtcttagctgcaaggaaagatccaagtggattatctggagatgttctgataaatggagcaccgcgacctgccaatttcaaatgtaattcaggttacgtggtacaagatgatgttgtgatgggcactctgacggtgagagaaaacttacagttctcagcagctcttcggcttgcaacaactatgacgaatcatgaaaaaaacgaacggattaacagggtcattcaagagttaggtctggataaagtggcagactccaaggttggaactcagtttatccgtggtgtgtctggaggagaaagaaaaaggactagtataggaatggagcttatcactgatccttccatcttgttcttggatgagcctacaactggcttagactcaagcacagcaaatgctgtccttttgctcctgaaaaggatgtctaagcagggacgaacaatcatcttctccattcatcagcctcgatattccatcttcaagttgtttgatagcctcaccttattggcctcaggaagacttatgttccacgggcctgctcaggaggccttgggatactttgaatcagctggttatcactgtgaggcctataataaccctgcagacttcttcttggacatcattaatggagattccactgctgtggcattaaacagagaagaagactttaaagccacagagatcatagagccttccaagcaggataagccactcatagaaaaattagcggagatttatgtcaactcctccttctacaaagagacaaaagctgaattacatcaactttccgggggtgagaagaagaagaagatcacagtcttcaaggagatcagctacaccacctccttctgtcatcaactcagatgggtttccaagcgttcattcaaaaacttgctgggtaatccccaggcctctatagctcagatcattgtcacagtcgtactgggactggttataggtgccatttactttgggctaaaaaatgattctactggaatccagaacagagctggggttctcttcttcctgacgaccaaccagtgtttcagcagtgtttcagccgtggaactctttgtggtagagaagaagctcttcatacatgaatacatcagcggatactacagagtgtcatcttatttccttggaaaactgttatctgatttattacccatgaggatgttaccaagtattatatttacctgtatagtgtacttcatgttaggattgaagccaaaggcagatgccttcttcgttatgatgtttacccttatgatggtggcttattcagccagttccatggcactggccatagcagcaggtcagagtgtggtttctgtagcaacacttctcatgaccatctgttttgtgtttatgatgattttttcaggtctgttggtcaatctcacaaccattgcatcttggctgtcatggcttcagtacttcagcattccacgatatggatttacggctttgcagcataatgaatttttgggacaaaacttctgcccaggactcaatgcaacaggaaacaatccttgtaactatgcaacatgtactggcgaagaatatttggtaaagcagggcatcgatctctcaccctggggcttgtggaagaatcacgtggccttggcttgtatgattgttattttcctcacaattgcctacctgaaattgttatttcttaaaaaatattcttaaatttccccttaattcagtatgatttatcctcacataaaaaagaagcactttgattgaagtattcaatcaagtttttttgttgttttctgttcccttgccatcacactgttgcacagcagcaattgttttaaagagatacatttttagaaatcacaacaaactgaattaaacatgaaagaacccaagacatcatgtatcgcatattagttaatctcctcagacagtaaccatggggaagaaatctggtctaatttattaatctaaaaaaggagaattgaattctggaaactcctgacaagttattactgtctctggcatttgtttcctcatctttaaaatgaataggtaggttagtagcccttcagtcttaatactttatgatgctatggtttgccattatttaataaatgacaaatgtattaatgctatactggaaatgtaaaattgaaaatatgttggaaaaaagattctgtcttatagggtaaaaaaagccaccgtgatagaaaaaaaatctttttgataagcacattaaagttaatagaacttactgatattcctgtctagtggtataatatctcaggaatcttggctgagggtttggaactgtgggtagagtagagggccaggagtccagtaatagaattcttgcaccatttctggaacattctagctctgggaggtcacgtaaccttcttggggtagttcagtggtttagtggtttataatccaggtgtgcgtcagaatcatctgaggaactttgctaaaatacaaaaatctggcctaagtagctccagatctaccttcataaaggaatctgaccactcctggatttggtaatttccaagttctgaaaattttacttaggatttaataactattaacatctgtccctacataggttttctttcctacttatataccttatgttctcttcattctaaccttcatcagtaatagggaaatgttttaattttatttttttagttgaagggtaatgtaccaaaaaatatagttcagtgaattaaaatgaacacacatgtgcaaccatcaattcaggtcaagaaatagaagattgtagcacacaaaagcctactcagccattctcccagtcactacttccttccttacccctgggttatttttgaaatgacacttgatgtatttccctctgttgctgttatgagaacattgctacagccaagtgttgtgtttctgtgtgcataggttgatacttaattatctccccactttttaataaacttttaatttggaaataattttagattgacagaaaagttgcaaagatagtgaggaaagttcctgtctactctttgctcagcttcccttaatgttaacattttatatagcaagatgcatttgtcaaagctaacaagttaacattggtacaatcactgttaattaaactgcacacaatattcagatttcaccacttttccactaatattctttcattgttctaggattcaattcaggagaccacatttcatctagccctcttttttaaaagtaaatacttttcagcacttacaggagttaactgagctggggcatcatggtgtatagacgccctgacactggtcatcttggaattcatttagtttgtcagtgggtgccctgacattctgtcacaacatcaatttgggaacatggcattatatttttatctttgaacttttttctttttggatgacatttgattaatgcgtcatcttggaacacattatcttttttcttggttatgtgatcaggaagattaatcagtttttcctgttcttggtataattcctgcttttcacatacctgtcccttacagttctctatatatacccttcccttattacacagagagaaatatctatctatactttttacacaaaatatacttcaaaagaaacaaaacagccacaattattaactttttaaataaatgagaatttaattata

SEQ ID NO: 411 - DNA, 4276 bp, Homo sapiens
  source 1..4276: mol_type = genomic DNA
gaaaaaaggaacccaaggagataggagagctgttaatttcactcgggacatttcctcgaggctagtttactcggaaagcctcaatgttccctggtagctgcaggatctactttgggggctgccaagtttcctctctcattctttctcctgccccaagagcaggcaggaaggaaagttcctggactgatactcgtctgtttagtaggcgtgggtcctggttgaagtctgtctaggaaaactcctaagtgtagaaatcttcttcgtattaccactgtctctgcactgagatttgggctgctttgcttccagcgtcacacatcataactgagaaagataaaaactctccagatgtcttccagtaatgtcgaagtttttatcccagtgtcacaaggaaacaccaatggcttccccgcgacagcttccaatgacctgaaggcatttactgaaggagctgtgttaagttttcataacatctgctatcgagtaaaactgaagagtggctttctaccttgtcgaaaaccagttgagaaagaaatattatcgaatatcaatgggatcatgaaacctggtctcaacgccatcctgggacccacaggtggaggcaaatcttcgttattagatgtcttagctgcaaggaaagatccaagtggattatctggagatgttctgataaatggagcaccgcgacctgccaatttcaaatgtaattcaggttacgtggtacaagatgatgttgtgatgggcactctgacggtgagagaaaacttacagttctcagcagctcttcggcttgcaacaactatgacgaatcatgaaaaaaacgaacggattaacagggtcattcaagagttaggtctggataaagtggcagactccaaggttggaactcagtttatccgtggtgtgtctggaggagaaagaaaaaggactagtataggaatggagcttatcactgatccttccatcttgttcttggatgagcctacaactggcttagactcaagcacagcaaatgctgtccttttgctcctgaaaaggatgtctaagcagggacgaacaatcatcttctccattcatcagcctcgatattccatcttcaagttgtttgatagcctcaccttattggcctcaggaagacttatgttccacgggcctgctcaggaggccttgggatactttgaatcagctggttatcactgtgaggcctataataaccctgcagacttcttcttggacatcattaatggagattccactgctgtggcattaaacagagaagaagactttaaagccacagagatcatagagccttccaagcaggataagccactcatagaaaaattagcggagatttatgtcaactcctccttctacaaagagacaaaagctgaattacatcaactttccgggggtgagaagaagaagaagatcacagtcttcaaggagatcagctacaccacctccttctgtcatcaactcagatgggtttccaagcgttcattcaaaaacttgctgggtaatccccaggcctctatagctcagatcattgtcacagtcgtactgggactggttataggtgccatttactttgggctaaaaaatgattctactggaatccagaacagagctggggttctcttcttcctgacgaccaaccagtgtttcagcagtgtttcagccgtggaactctttgtggtagagaagaagctcttcatacatgaatacatcagcggatactacagagtgtcatcttatttccttggaaaactgttatctgatttattacccatgaggatgttaccaagtattatatttacctgtatagtgtacttcatgttaggattgaagccaaaggcagatgccttcttcgttatgatgtttacccttatgatggtggcttattcagccagttccatggcactggccatagcagcaggtcagagtgtggtttctgtagcaacacttctcatgaccatctgttttgtgtttatgatggtctgttggtcaatctcacaaccattgcatcttggctgtcatggcttcagtacttcagcattccacgatatggatttacggctttgcagcataatgaatttttgggacaaaacttctgcccaggactcaatgcaacaggaaacaatccttgtaactatgcaacatgtactggcgaagaatatttggtaaagcagggcatcgatctctcaccctggggcttgtggaagaatcacgtggccttggcttgtatgattgttattttcctcacaattgcctacctgaaattgttatttcttaaaaaatattcttaaatttccccttaattcagtatgatttatcctcacataaaaaagaagcactttgattgaagtattcaatcaagtttttttgttgttttctgttcccttgccatcacactgttgcacagcagcaattgttttaaagagatacatttttagaaatcacaacaaactgaattaaacatgaaagaacccaagacatcatgtatcgcatattagttaatctcctcagacagtaaccatggggaagaaatctggtctaatttattaatctaaaaaaggagaattgaattctggaaactcctgacaagttattactgtctctggcatttgtttcctcatctttaaaatgaataggtaggttagtagcccttcagtcttaatactttatgatgctatggtttgccattatttaataaatgacaaatgtattaatgctatactggaaatgtaaaattgaaaatatgttggaaaaaagattctgtcttatagggtaaaaaaagccaccgtgatagaaaaaaaatctttttgataagcacattaaagttaatagaacttactgatattcctgtctagtggtataatatctcaggaatcttggctgagggtttggaactgtgggtagagtagagggccaggagtccagtaatagaattcttgcaccatttctggaacattctagctctgggaggtcacgtaaccttcttggggtagttcagtggtttagtggtttataatccaggtgtgcgtcagaatcatctgaggaactttgctaaaatacaaaaatctggcctaagtagctccagatctaccttcataaaggaatctgaccactcctggatttggtaatttccaagttctgaaaattttacttaggatttaataactattaacatctgtccctacataggttttctttcctacttatataccttatgttctcttcattctaaccttcatcagtaatagggaaatgttttaattttatttttttagttgaagggtaatgtaccaaaaaatatagttcagtgaattaaaatgaacacacatgtgcaaccatcaattcaggtcaagaaatagaagattgtagcacacaaaagcctactcagccattctcccagtcactacttccttccttacccctgggttatttttgaaatgacacttgatgtatttccctctgttgctgttatgagaacattgctacagccaagtgttgtgtttctgtgtgcataggttgatacttaattatctccccactttttaataaacttttaatttggaaataattttagattgacagaaaagttgcaaagatagtgaggaaagttcctgtctactctttgctcagcttcccttaatgttaacattttatatagcaagatgcatttgtcaaagctaacaagttaacattggtacaatcactgttaattaaactgcacacaatattcagatttcaccacttttccactaatattctttcattgttctaggattcaattcaggagaccacatttcatctagccctcttttttaaaagtaaatacttttcagcacttacaggagttaactgagctggggcatcatggtgtatagacgccctgacactggtcatcttggaattcatttagtttgtcagtgggtgccctgacattctgtcacaacatcaatttgggaacatggcattatatttttatctttgaacttttttctttttggatgacatttgattaatgcgtcatcttggaacacattatcttttttcttggttatgtgatcaggaagattaatcagtttttcctgttcttggtataattcctgcttttcacatacctgtcccttacagttctctatatatacccttcccttattacacagagagaaatatctatctatactttttacacaaaatatacttcaaaagaaacaaaacagccacaattattaactttttaaataaatgagaatttaattatatccta

SEQ ID NO: 412 - DNA, 2223 bp, Homo sapiens
  source 1..2223: mol_type = genomic DNA
acaaggcagcctcgctcgagcgcaggccaatcggctttctagctagagggtttaactcctatttaaaaagaagaacctttgaattctaacggctgagctcttggaagacttgggtccttgggtcgcagggtctcactccattgcccaggccagagtgcggggatatttgataagaaacttcagtgaaggccgggcgcggtggctcatgcccgtaatcccagcattttcggaggccgaggcatcatggaccgatctaaagaaaactgcatttcaggacctgttaaggctacagctccagttggaggtccaaaacgtgttctcgtgactcagcaatttccttgtcagaatccattacctgtaaatagtggccaggctcagcgggtcttgtgtccttcaaattcttcccagcgcattcctttgcaagcacaaaagcttgtctccagtcacaagccggttcagaatcagaagcagaagcaattgcaggcaaccagtgtacctcatcctgtctccaggccactgaataacacccaaaagagcaagcagcccctgccatcggcacctgaaaataatcctgaggaggaactggcatcaaaacagaaaaatgaagaatcaaaaaagaggcagtgggctttggaagactttgaaattggtcgccctctgggtaaaggaaagtttggtaatgtttatttggcaagagaaaagcaaagcaagtttattctggctcttaaagtgttatttaaagctcagctggagaaagccggagtggagcatcagctcagaagagaagtagaaatacagtcccaccttcggcatcctaatattcttagactgtatggttatttccatgatgctaccagagtctacctaattctggaatatgcaccacttggaacagtttatagagaacttcagaaactttcaaagtttgatgagcagagaactgctacttatataacagaattggcaaatgccctgtcttactgtcattcgaagagagttattcatagagacattaagccagagaacttacttcttggatcagctggagagcttaaaattgcagattttgggtggtcagtacatgctccatcttccaggaggaccactctctgtggcaccctggactacctgccccctgaaatgattgaaggtcggatgcatgatgagaaggtggatctctggagccttggagttctttgctatgaatttttagttgggaagcctccttttgaggcaaacacataccaagagacctacaaaagaatatcacgggttgaattcacattccctgactttgtaacagagggagccagggacctcatttcaagactgttgaagcataatcccagccagaggccaatgctcagagaagtacttgaacacccctggatcacagcaaattcatcaaaaccatcaaattgccaaaacaaagaatcagctagcaaacagtcttaggaatcgtgcagggggagaaatccttgagccagggctgccatataacctgacaggaacatgctactgaagtttattttaccattgactgctgccctcaatctagaacgctacacaagaaatatttgttttactcagcaggtgtgccttaacctccctattcagaaagctccacatcaataaacatgacactctgaagtgaaagtagccacgagaattgtgctacttatactggttcataatctggaggcaaggttcgactgcagccgccccgtcagcctgtgctaggcatggtgtcttcacaggaggcaaatccagagcctggctgtggggaaagtgaccactctgccctgaccccgatcagttaaggagctgtgcaataaccttcctagtacctgagtgagtgtgtaacttattgggttggcgaagcctggtaaagctgttggaatgagtatgtgattctttttaagtatgaaaataaagatatatgtacagacttgtattttttctctggtggcattcctttaggaatgctgtgtgtctgtccggcaccccggtaggcctgattgggtttctagtcctccttaaccacttatctcccatatgagagtgtgaaaaataggaacacgtgctctacctccatttagggatttgcttgggatacagaagaggccatgtgtctcagagctgttaagggcttatttttttaaaacattggagtcatagcatgtgtgtaaactttaaatatgcaaataaataagtatctatgtc

SEQ ID NO: 413 - DNA, 2248 bp, Homo sapiens
  source 1..2248: mol_type = genomic DNA
ggctgagctcttggaagacttgggtccttgggtcgcaggtgggagccgacgggtgggtagaccgtgggggatatctcagtggcggacgaggacggcggggacaaggggcggctggtcggagtggcggagcgtcaagtcccctgtcggttcctccgtccctgagtgtccttggcgctgccttgtgcccgcccagcgcctttgcatccgctcctgggcaccgaggcgccctgtaggatactgcttgttacttattacagctagaggcatcatggaccgatctaaagaaaactgcatttcaggacctgttaaggctacagctccagttggaggtccaaaacgtgttctcgtgactcagcaatttccttgtcagaatccattacctgtaaatagtggccaggctcagcgggtcttgtgtccttcaaattcttcccagcgcattcctttgcaagcacaaaagcttgtctccagtcacaagccggttcagaatcagaagcagaagcaattgcaggcaaccagtgtacctcatcctgtctccaggccactgaataacacccaaaagagcaagcagcccctgccatcggcacctgaaaataatcctgaggaggaactggcatcaaaacagaaaaatgaagaatcaaaaaagaggcagtgggctttggaagactttgaaattggtcgccctctgggtaaaggaaagtttggtaatgtttatttggcaagagaaaagcaaagcaagtttattctggctcttaaagtgttatttaaagctcagctggagaaagccggagtggagcatcagctcagaagagaagtagaaatacagtcccaccttcggcatcctaatattcttagactgtatggttatttccatgatgctaccagagtctacctaattctggaatatgcaccacttggaacagtttatagagaacttcagaaactttcaaagtttgatgagcagagaactgctacttatataacagaattggcaaatgccctgtcttactgtcattcgaagagagttattcatagagacattaagccagagaacttacttcttggatcagctggagagcttaaaattgcagattttgggtggtcagtacatgctccatcttccaggaggaccactctctgtggcaccctggactacctgccccctgaaatgattgaaggtcggatgcatgatgagaaggtggatctctggagccttggagttctttgctatgaatttttagttgggaagcctccttttgaggcaaacacataccaagagacctacaaaagaatatcacgggttgaattcacattccctgactttgtaacagagggagccagggacctcatttcaagactgttgaagcataatcccagccagaggccaatgctcagagaagtacttgaacacccctggatcacagcaaattcatcaaaaccatcaaattgccaaaacaaagaatcagctagcaaacagtcttaggaatcgtgcagggggagaaatccttgagccagggctgccatataacctgacaggaacatgctactgaagtttattttaccattgactgctgccctcaatctagaacgctacacaagaaatatttgttttactcagcaggtgtgccttaacctccctattcagaaagctccacatcaataaacatgacactctgaagtgaaagtagccacgagaattgtgctacttatactggttcataatctggaggcaaggttcgactgcagccgccccgtcagcctgtgctaggcatggtgtcttcacaggaggcaaatccagagcctggctgtggggaaagtgaccactctgccctgaccccgatcagttaaggagctgtgcaataaccttcctagtacctgagtgagtgtgtaacttattgggttggcgaagcctggtaaagctgttggaatgagtatgtgattctttttaagtatgaaaataaagatatatgtacagacttgtattttttctctggtggcattcctttaggaatgctgtgtgtctgtccggcaccccggtaggcctgattgggtttctagtcctccttaaccacttatctcccatatgagagtgtgaaaaataggaacacgtgctctacctccatttagggatttgcttgggatacagaagaggccatgtgtctcagagctgttaagggcttatttttttaaaacattggagtcatagcatgtgtgtaaactttaaatatgcaaataaataagtatctatgtc

SEQ ID NO: 414 - DNA, 2112 bp, Homo sapiens
  source 1..2112: mol_type = genomic DNA
cttggaagacttgggtccttgggtcgcaggctggagtgcaatggtgtgatctcagctcactgcaacctctgcttcctgggtttaagtgattctcctgcctcagcctcccgagtagctgggattacaggcatcatggaccgatctaaagaaaactgcatttcaggacctgttaaggctacagctccagttggaggtccaaaacgtgttctcgtgactcagcaatttccttgtcagaatccattacctgtaaatagtggccaggctcagcgggtcttgtgtccttcaaattcttcccagcgcattcctttgcaagcacaaaagcttgtctccagtcacaagccggttcagaatcagaagcagaagcaattgcaggcaaccagtgtacctcatcctgtctccaggccactgaataacacccaaaagagcaagcagcccctgccatcggcacctgaaaataatcctgaggaggaactggcatcaaaacagaaaaatgaagaatcaaaaaagaggcagtgggctttggaagactttgaaattggtcgccctctgggtaaaggaaagtttggtaatgtttatttggcaagagaaaagcaaagcaagtttattctggctcttaaagtgttatttaaagctcagctggagaaagccggagtggagcatcagctcagaagagaagtagaaatacagtcccaccttcggcatcctaatattcttagactgtatggttatttccatgatgctaccagagtctacctaattctggaatatgcaccacttggaacagtttatagagaacttcagaaactttcaaagtttgatgagcagagaactgctacttatataacagaattggcaaatgccctgtcttactgtcattcgaagagagttattcatagagacattaagccagagaacttacttcttggatcagctggagagcttaaaattgcagattttgggtggtcagtacatgctccatcttccaggaggaccactctctgtggcaccctggactacctgccccctgaaatgattgaaggtcggatgcatgatgagaaggtggatctctggagccttggagttctttgctatgaatttttagttgggaagcctccttttgaggcaaacacataccaagagacctacaaaagaatatcacgggttgaattcacattccctgactttgtaacagagggagccagggacctcatttcaagactgttgaagcataatcccagccagaggccaatgctcagagaagtacttgaacacccctggatcacagcaaattcatcaaaaccatcaaattgccaaaacaaagaatcagctagcaaacagtcttaggaatcgtgcagggggagaaatccttgagccagggctgccatataacctgacaggaacatgctactgaagtttattttaccattgactgctgccctcaatctagaacgctacacaagaaatatttgttttactcagcaggtgtgccttaacctccctattcagaaagctccacatcaataaacatgacactctgaagtgaaagtagccacgagaattgtgctacttatactggttcataatctggaggcaaggttcgactgcagccgccccgtcagcctgtgctaggcatggtgtcttcacaggaggcaaatccagagcctggctgtggggaaagtgaccactctgccctgaccccgatcagttaaggagctgtgcaataaccttcctagtacctgagtgagtgtgtaacttattgggttggcgaagcctggtaaagctgttggaatgagtatgtgattctttttaagtatgaaaataaagatatatgtacagacttgtattttttctctggtggcattcctttaggaatgctgtgtgtctgtccggcaccccggtaggcctgattgggtttctagtcctccttaaccacttatctcccatatgagagtgtgaaaaataggaacacgtgctctacctccatttagggatttgcttgggatacagaagaggccatgtgtctcagagctgttaagggcttatttttttaaaacattggagtcatagcatgtgtgtaaactttaaatatgcaaataaataagtatctatgtc

SEQ ID NO: 415 - DNA, 1902 bp, Homo sapiens
  source 1..1902: mol_type = genomic DNA
gaattctaacggctgagctcttggaagacttgggtccttgggtcgcaggcatcatggaccgatctaaagaaaactgcatttcaggacctgttaaggctacagctccagttggaggtccaaaacgtgttctcgtgactcagcaatttccttgtcagaatccattacctgtaaatagtggccaggctcagcgggtcttgtgtccttcaaattcttcccagcgcattcctttgcaagcacaaaagcttgtctccagtcacaagccggttcagaatcagaagcagaagcaattgcaggcaaccagtgtacctcatcctgtctccaggccactgaataacacccaaaagagcaagcagcccctgccatcggcacctgaaaataatcctgaggaggaactggcatcaaaacagaaaaatgaagaatcaaaaaagaggcagtgggctttggaagactttgaaattggtcgccctctgggtaaaggaaagtttggtaatgtttatttggcaagagaaaagcaaagcaagtttattctggctcttaaagtgttatttaaagctcagctggagaaagccggagtggagcatcagctcagaagagaagtagaaatacagtcccaccttcggcatcctaatattcttagactgtatggttatttccatgatgctaccagagtctacctaattctggaatatgcaccacttggaacagtttatagagaacttcagaaactttcaaagtttgatgagcagagaactgctacttatataacagaattggcaaatgccctgtcttactgtcattcgaagagagttattcatagagacattaagccagagaacttacttcttggatcagctggagagcttaaaattgcagattttgggtggtcagtacatgctccatcttccaggaggaccactctctgtggcaccctggactacctgccccctgaaatgattgaaggtcggatgcatgatgagaaggtggatctctggagccttggagttctttgctatgaatttttagttgggaagcctccttttgaggcaaacacataccaagagacctacaaaagaatatcacgggtaagacgcaactgaaaaggacccagcacatctgctggaattctttccttatcagcctgaactgcaggccaagatccgaacatctatactatttgatctctctaacctgtgttttgtgatattttatcatttgttgtactccaggttgaattcacattccctgactttgtaacagagggagccagggacctcatttcaagactgttgaagcataatcccagccagaggccaatgctcagagaagtacttgaacacccctggatcacagcaaattcatcaaaaccatcaaattgccaaaacaaagaatcagctagcaaacagtcttaggaatcgtgcagggggagaaatccttgagccagggctgccatataacctgacaggaacatgctactgaagtttattttaccattgactgctgccctcaatctagaacgctacacaagaaatatttgttttactcagcaggtgtgccttaacctccctattcagaaagctccacatcaataaacatgacactctgaagtgaaagtagccacgagaattgtgctacttatactggttcataatctggaggcaaggttcgactgcagccgccccgtcagcctgtgctaggcatggtgtcttcacaggaggcaaatccagagcctggctgtggggaaagtgaccactctgccctgaccccgatcagttaaggagctgtgcaataaccttcctagtacctgagtgagtgtgtaacttattgggttggcgaagcctggtaaagctgttggaatgagtatgtgattctttttaagtatgaaaataaagatatatgtacaga

SEQ ID NO: 416 - DNA, 2547 bp, Homo sapiens
  source 1..2547: mol_type = genomic DNA
acaaggcagcctcgctcgagcgcaggccaatcggctttctagctagagggtttaactcctatttaaaaagaagaacctttgaattctaacggctgagctcttggaagacttgggtccttgggtcgcaggtgggagccgacgggtgggtagaccgtgggggatatctcagtggcggacgaggacggcggggacaaggggcggctggtcggagtggcggagcgtcaagtcccctgtcggttcctccgtccctgagtgtccttggcgctgccttgtgcccgcccagcgcctttgcatccgctcctgggcaccgaggcgccctgtaggatactgcttgttacttattacagctagagggtctcactccattgcccaggccagagtgcggggatatttgataagaaacttcagtgaaggccgggcgcggtggctcatgcccgtaatcccagcattttcggaggccgaggctggagtgcaatggtgtgatctcagctcactgcaacctctgcttcctgggtttaagtgattctcctgcctcagcctcccgagtagctgggattacaggcatcatggaccgatctaaagaaaactgcatttcaggacctgttaaggctacagctccagttggaggtccaaaacgtgttctcgtgactcagcaatttccttgtcagaatccattacctgtaaatagtggccaggctcagcgggtcttgtgtccttcaaattcttcccagcgcattcctttgcaagcacaaaagcttgtctccagtcacaagccggttcagaatcagaagcagaagcaattgcaggcaaccagtgtacctcatcctgtctccaggccactgaataacacccaaaagagcaagcagcccctgccatcggcacctgaaaataatcctgaggaggaactggcatcaaaacagaaaaatgaagaatcaaaaaagaggcagtgggctttggaagactttgaaattggtcgccctctgggtaaaggaaagtttggtaatgtttatttggcaagagaaaagcaaagcaagtttattctggctcttaaagtgttatttaaagctcagctggagaaagccggagtggagcatcagctcagaagagaagtagaaatacagtcccaccttcggcatcctaatattcttagactgtatggttatttccatgatgctaccagagtctacctaattctggaatatgcaccacttggaacagtttatagagaacttcagaaactttcaaagtttgatgagcagagaactgctacttatataacagaattggcaaatgccctgtcttactgtcattcgaagagagttattcatagagacattaagccagagaacttacttcttggatcagctggagagcttaaaattgcagattttgggtggtcagtacatgctccatcttccaggaggaccactctctgtggcaccctggactacctgccccctgaaatgattgaaggtcggatgcatgatgagaaggtggatctctggagccttggagttctttgctatgaatttttagttgggaagcctccttttgaggcaaacacataccaagagacctacaaaagaatatcacgggttgaattcacattccctgactttgtaacagagggagccagggacctcatttcaagactgttgaagcataatcccagccagaggccaatgctcagagaagtacttgaacacccctggatcacagcaaattcatcaaaaccatcaaattgccaaaacaaagaatcagctagcaaacagtcttaggaatcgtgcagggggagaaatccttgagccagggctgccatataacctgacaggaacatgctactgaagtttattttaccattgactgctgccctcaatctagaacgctacacaagaaatatttgttttactcagcaggtgtgccttaacctccctattcagaaagctccacatcaataaacatgacactctgaagtgaaagtagccacgagaattgtgctacttatactggttcataatctggaggcaaggttcgactgcagccgccccgtcagcctgtgctaggcatggtgtcttcacaggaggcaaatccagagcctggctgtggggaaagtgaccactctgccctgaccccgatcagttaaggagctgtgcaataaccttcctagtacctgagtgagtgtgtaacttattgggttggcgaagcctggtaaagctgttggaatgagtatgtgattctttttaagtatgaaaataaagatatatgtacagacttgtattttttctctggtggcattcctttaggaatgctgtgtgtctgtccggcaccccggtaggcctgattgggtttctagtcctccttaaccacttatctcccatatgagagtgtgaaaaataggaacacgtgctctacctccatttagggatttgcttgggatacagaagaggccatgtgtctcagagctgttaagggcttatttttttaaaacattggagtcatagcatgtgtgtaaactttaaatatgcaaataaataagtatctatgtct

SEQ ID NO: 417 - DNA, 2145 bp, Homo sapiens
  source 1..2145: mol_type = genomic DNA
gaattctaacggctgagctcttggaagacttgggtccttgggtcgcaggtgggagccgacgggctggagtgcaatggtgtgatctcagctcactgcaacctctgcttcctgggtttaagtgattctcctgcctcagcctcccgagtagctgggattacaggcatcatggaccgatctaaagaaaactgcatttcaggacctgttaaggctacagctccagttggaggtccaaaacgtgttctcgtgactcagcaatttccttgtcagaatccattacctgtaaatagtggccaggctcagcgggtcttgtgtccttcaaattcttcccagcgcattcctttgcaagcacaaaagcttgtctccagtcacaagccggttcagaatcagaagcagaagcaattgcaggcaaccagtgtacctcatcctgtctccaggccactgaataacacccaaaagagcaagcagcccctgccatcggcacctgaaaataatcctgaggaggaactggcatcaaaacagaaaaatgaagaatcaaaaaagaggcagtgggctttggaagactttgaaattggtcgccctctgggtaaaggaaagtttggtaatgtttatttggcaagagaaaagcaaagcaagtttattctggctcttaaagtgttatttaaagctcagctggagaaagccggagtggagcatcagctcagaagagaagtagaaatacagtcccaccttcggcatcctaatattcttagactgtatggttatttccatgatgctaccagagtctacctaattctggaatatgcaccacttggaacagtttatagagaacttcagaaactttcaaagtttgatgagcagagaactgctacttatataacagaattggcaaatgccctgtcttactgtcattcgaagagagttattcatagagacattaagccagagaacttacttcttggatcagctggagagcttaaaattgcagattttgggtggtcagtacatgctccatcttccaggaggaccactctctgtggcaccctggactacctgccccctgaaatgattgaaggtcggatgcatgatgagaaggtggatctctggagccttggagttctttgctatgaatttttagttgggaagcctccttttgaggcaaacacataccaagagacctacaaaagaatatcacgggttgaattcacattccctgactttgtaacagagggagccagggacctcatttcaagactgttgaagcataatcccagccagaggccaatgctcagagaagtacttgaacacccctggatcacagcaaattcatcaaaaccatcaaattgccaaaacaaagaatcagctagcaaacagtcttaggaatcgtgcagggggagaaatccttgagccagggctgccatataacctgacaggaacatgctactgaagtttattttaccattgactgctgccctcaatctagaacgctacacaagaaatatttgttttactcagcaggtgtgccttaacctccctattcagaaagctccacatcaataaacatgacactctgaagtgaaagtagccacgagaattgtgctacttatactggttcataatctggaggcaaggttcgactgcagccgccccgtcagcctgtgctaggcatggtgtcttcacaggaggcaaatccagagcctggctgtggggaaagtgaccactctgccctgaccccgatcagttaaggagctgtgcaataaccttcctagtacctgagtgagtgtgtaacttattgggttggcgaagcctggtaaagctgttggaatgagtatgtgattctttttaagtatgaaaataaagatatatgtacagacttgtattttttctctggtggcattcctttaggaatgctgtgtgtctgtccggcaccccggtaggcctgattgggtttctagtcctccttaaccacttatctcccatatgagagtgtgaaaaataggaacacgtgctctacctccatttagggatttgcttgggatacagaagaggccatgtgtctcagagctgttaagggcttatttttttaaaacattggagtcatagcatgtgtgtaaactttaaatatgcaaataaataagtatctatgtc

SEQ ID NO: 418 - DNA, 2169 bp, Homo sapiens
  source 1..2169: mol_type = genomic DNA
cttaaacgcgactcaaggcgtcgggtttgttgtcaaccaatcacaaggcagcctcgctcgagcgcaggccaatcggctttctagctagagggtttaactcctatttaaaaagaagaacctttgaattctaacggctgagctcttggaagacttgggtccttgggtcgcaggtgggagccgacgggcatcatggaccgatctaaagaaaactgcatttcaggacctgttaaggctacagctccagttggaggtccaaaacgtgttctcgtgactcagcaatttccttgtcagaatccattacctgtaaatagtggccaggctcagcgggtcttgtgtccttcaaattcttcccagcgcattcctttgcaagcacaaaagcttgtctccagtcacaagccggttcagaatcagaagcagaagcaattgcaggcaaccagtgtacctcatcctgtctccaggccactgaataacacccaaaagagcaagcagcccctgccatcggcacctgaaaataatcctgaggaggaactggcatcaaaacagaaaaatgaagaatcaaaaaagaggcagtgggctttggaagactttgaaattggtcgccctctgggtaaaggaaagtttggtaatgtttatttggcaagagaaaagcaaagcaagtttattctggctcttaaagtgttatttaaagctcagctggagaaagccggagtggagcatcagctcagaagagaagtagaaatacagtcccaccttcggcatcctaatattcttagactgtatggttatttccatgatgctaccagagtctacctaattctggaatatgcaccacttggaacagtttatagagaacttcagaaactttcaaagtttgatgagcagagaactgctacttatataacagaattggcaaatgccctgtcttactgtcattcgaagagagttattcatagagacattaagccagagaacttacttcttggatcagctggagagcttaaaattgcagattttgggtggtcagtacatgctccatcttccaggaggaccactctctgtggcaccctggactacctgccccctgaaatgattgaaggtcggatgcatgatgagaaggtggatctctggagccttggagttctttgctatgaatttttagttgggaagcctccttttgaggcaaacacataccaagagacctacaaaagaatatcacgggttgaattcacattccctgactttgtaacagagggagccagggacctcatttcaagactgttgaagcataatcccagccagaggccaatgctcagagaagtacttgaacacccctggatcacagcaaattcatcaaaaccatcaaattgccaaaacaaagaatcagctagcaaacagtcttaggaatcgtgcagggggagaaatccttgagccagggctgccatataacctgacaggaacatgctactgaagtttattttaccattgactgctgccctcaatctagaacgctacacaagaaatatttgttttactcagcaggtgtgccttaacctccctattcagaaagctccacatcaataaacatgacactctgaagtgaaagtagccacgagaattgtgctacttatactggttcataatctggaggcaaggttcgactgcagccgccccgtcagcctgtgctaggcatggtgtcttcacaggaggcaaatccagagcctggctgtggggaaagtgaccactctgccctgaccccgatcagttaaggagctgtgcaataaccttcctagtacctgagtgagtgtgtaacttattgggttggcgaagcctggtaaagctgttggaatgagtatgtgattctttttaagtatgaaaataaagatatatgtacagacttgtattttttctctggtggcattcctttaggaatgctgtgtgtctgtccggcaccccggtaggcctgattgggtttctagtcctccttaaccacttatctcccatatgagagtgtgaaaaataggaacacgtgctctacctccatttagggatttgcttgggatacagaagaggccatgtgtctcagagctgttaagggcttatttttttaaaacattggagtcatagcatgtgtgtaaactttaaatatgcaaataaataagtatctatgtc

SEQ ID NO: 419 - DNA, 2238 bp, Homo sapiens
  source 1..2238: mol_type = genomic DNA
acaaggcagcctcgctcgagcgcaggccaatcggctttctagctagagggtttaactcctatttaaaaagaagaacctttgaattctaacggctgagctcttggaagacttgggtccttgggtcgcaggtgggagccgacggggtctcactccattgcccaggccagagtgcggggatatttgataagaaacttcagtgaaggccgggcgcggtggctcatgcccgtaatcccagcattttcggaggccgaggcatcatggaccgatctaaagaaaactgcatttcaggacctgttaaggctacagctccagttggaggtccaaaacgtgttctcgtgactcagcaatttccttgtcagaatccattacctgtaaatagtggccaggctcagcgggtcttgtgtccttcaaattcttcccagcgcattcctttgcaagcacaaaagcttgtctccagtcacaagccggttcagaatcagaagcagaagcaattgcaggcaaccagtgtacctcatcctgtctccaggccactgaataacacccaaaagagcaagcagcccctgccatcggcacctgaaaataatcctgaggaggaactggcatcaaaacagaaaaatgaagaatcaaaaaagaggcagtgggctttggaagactttgaaattggtcgccctctgggtaaaggaaagtttggtaatgtttatttggcaagagaaaagcaaagcaagtttattctggctcttaaagtgttatttaaagctcagctggagaaagccggagtggagcatcagctcagaagagaagtagaaatacagtcccaccttcggcatcctaatattcttagactgtatggttatttccatgatgctaccagagtctacctaattctggaatatgcaccacttggaacagtttatagagaacttcagaaactttcaaagtttgatgagcagagaactgctacttatataacagaattggcaaatgccctgtcttactgtcattcgaagagagttattcatagagacattaagccagagaacttacttcttggatcagctggagagcttaaaattgcagattttgggtggtcagtacatgctccatcttccaggaggaccactctctgtggcaccctggactacctgccccctgaaatgattgaaggtcggatgcatgatgagaaggtggatctctggagccttggagttctttgctatgaatttttagttgggaagcctccttttgaggcaaacacataccaagagacctacaaaagaatatcacgggttgaattcacattccctgactttgtaacagagggagccagggacctcatttcaagactgttgaagcataatcccagccagaggccaatgctcagagaagtacttgaacacccctggatcacagcaaattcatcaaaaccatcaaattgccaaaacaaagaatcagctagcaaacagtcttaggaatcgtgcagggggagaaatccttgagccagggctgccatataacctgacaggaacatgctactgaagtttattttaccattgactgctgccctcaatctagaacgctacacaagaaatatttgttttactcagcaggtgtgccttaacctccctattcagaaagctccacatcaataaacatgacactctgaagtgaaagtagccacgagaattgtgctacttatactggttcataatctggaggcaaggttcgactgcagccgccccgtcagcctgtgctaggcatggtgtcttcacaggaggcaaatccagagcctggctgtggggaaagtgaccactctgccctgaccccgatcagttaaggagctgtgcaataaccttcctagtacctgagtgagtgtgtaacttattgggttggcgaagcctggtaaagctgttggaatgagtatgtgattctttttaagtatgaaaataaagatatatgtacagacttgtattttttctctggtggcattcctttaggaatgctgtgtgtctgtccggcaccccggtaggcctgattgggtttctagtcctccttaaccacttatctcccatatgagagtgtgaaaaataggaacacgtgctctacctccatttagggatttgcttgggatacagaagaggccatgtgtctcagagctgttaagggcttatttttttaaaacattggagtcatagcatgtgtgtaaactttaaatatgcaaataaataagtatctatgtct

SEQ ID NO: 420 - DNA, 2114 bp, Homo sapiens
  source 1..2114: mol_type = genomic DNA
cacaaggcagcctcgctcgagcgcaggccaatcggctttctagctagagggtttaactcctatttaaaaagaagaacctttgaattctaacggctgagctcttggaagacttgggtccttgggtcgcaggcatcatggaccgatctaaagaaaactgcatttcaggacctgttaaggctacagctccagttggaggtccaaaacgtgttctcgtgactcagcaatttccttgtcagaatccattacctgtaaatagtggccaggctcagcgggtcttgtgtccttcaaattcttcccagcgcattcctttgcaagcacaaaagcttgtctccagtcacaagccggttcagaatcagaagcagaagcaattgcaggcaaccagtgtacctcatcctgtctccaggccactgaataacacccaaaagagcaagcagcccctgccatcggcacctgaaaataatcctgaggaggaactggcatcaaaacagaaaaatgaagaatcaaaaaagaggcagtgggctttggaagactttgaaattggtcgccctctgggtaaaggaaagtttggtaatgtttatttggcaagagaaaagcaaagcaagtttattctggctcttaaagtgttatttaaagctcagctggagaaagccggagtggagcatcagctcagaagagaagtagaaatacagtcccaccttcggcatcctaatattcttagactgtatggttatttccatgatgctaccagagtctacctaattctggaatatgcaccacttggaacagtttatagagaacttcagaaactttcaaagtttgatgagcagagaactgctacttatataacagaattggcaaatgccctgtcttactgtcattcgaagagagttattcatagagacattaagccagagaacttacttcttggatcagctggagagcttaaaattgcagattttgggtggtcagtacatgctccatcttccaggaggaccactctctgtggcaccctggactacctgccccctgaaatgattgaaggtcggatgcatgatgagaaggtggatctctggagccttggagttctttgctatgaatttttagttgggaagcctccttttgaggcaaacacataccaagagacctacaaaagaatatcacgggttgaattcacattccctgactttgtaacagagggagccagggacctcatttcaagactgttgaagcataatcccagccagaggccaatgctcagagaagtacttgaacacccctggatcacagcaaattcatcaaaaccatcaaattgccaaaacaaagaatcagctagcaaacagtcttaggaatcgtgcagggggagaaatccttgagccagggctgccatataacctgacaggaacatgctactgaagtttattttaccattgactgctgccctcaatctagaacgctacacaagaaatatttgttttactcagcaggtgtgccttaacctccctattcagaaagctccacatcaataaacatgacactctgaagtgaaagtagccacgagaattgtgctacttatactggttcataatctggaggcaaggttcgactgcagccgccccgtcagcctgtgctaggcatggtgtcttcacaggaggcaaatccagagcctggctgtggggaaagtgaccactctgccctgaccccgatcagttaaggagctgtgcaataaccttcctagtacctgagtgagtgtgtaacttattgggttggcgaagcctggtaaagctgttggaatgagtatgtgattctttttaagtatgaaaataaagatatatgtacagacttgtattttttctctggtggcattcctttaggaatgctgtgtgtctgtccggcaccccggtaggcctgattgggtttctagtcctccttaaccacttatctcccatatgagagtgtgaaaaataggaacacgtgctctacctccatttagggatttgcttgggatacagaagaggccatgtgtctcagagctgttaagggcttatttttttaaaacattggagtcatagcatgtgtgtaaactttaaatatgcaaataaataagtatctatgtc

SEQ ID NO: 421 - DNA, 879 bp, Homo sapiens
  source 1..879: mol_type = genomic DNA
aatcggctttctagctagagggtttaactcctatttaaaaagaagaacctttgaattctaacggctgagctcttggaagacttgggtccttgggtcgcagggtctcactccattgcccaggccagagtgcggggatatttgataagaaacttcagtgaaggccgggcgcggtggctcatgcccgtaatcccagcattttcggaggccgaggctggagtgcaatggtgtgatctcagctcactgcaacctctgcttcctgggtttaagtgattctcctgcctcagcctcccgagtagctgggattacaggcatcatggaccgatctaaagaaaactgcatttcaggacctgttaaggctacagctccagttggaggtccaaaacgtgttctcgtgactcagcaatttccttgtcagaatccattacctgtaaatagtggccaggctcagcgggtcttgtgtccttcaaattcttcccagcgcattcctttgcaagcacaaaagcttgtctccagtcacaagccggttcagaatcagaagcagaagcaattgcaggcaaccagtgtacctcatcctgtctccaggccactgaataacacccaaaagagcaagcagcccctgccatcggcacctgaaaataatcctgaggaggaactggcatcaaaacagaaaaatgaagaatcaaaaaagaggcagtgggctttggaagactttgaaattggtcgccctctgggtaaaggaaagtttggtaatgtttatttggcaagagaaaagcaaagcaagtttattctggctcttaaagtgttatttaaagctcagctggagaaagccggagtggagcatcagctcagaagagaagtagaaatacagtcccaccttcg

SEQ ID NO: 422 - DNA, 744 bp, Homo sapiens
  source 1..744: mol_type = genomic DNA
ctcagtggcggacgaggacggcggggacaaggggcggctggtcggagtggcggagcgtcaagtcccctgtcggttcctccgtccctgagtgtccttggcgctgccttgtgcccgcccagcgcctttgcatccgctcctgggcaccgaggcgccctgtaggatactgcttgttacttattacagctagagggtctcactccattgcccaggccagagtgcggggatatttgataagaaacttcagtgaaggccgggcgcggtggctcatgcccgtaatcccagcattttcggaggccgaggcatcatggaccgatctaaagaaaactgcatttcaggacctgttaaggctacagctccagttggaggtccaaaacgtgttctcgtgactcagcaatttccttgtcagaatccattacctgtaaatagtggccaggctcagcgggtcttgtgtccttcaaattcttcccagcgcattcctttgcaagcacaaaagcttgtctccagtcacaagccggttcagaatcagaagcagaagcaattgcaggcaaccagtgtacctcatcctgtctccaggccactgaataacacccaaaagagcaagcagcccctgccatcggcacctgaaaataatcctgaggaggaactggcatcaaaacagaaaaatgaagaatcaaaaaagaggcagtgggctttggaagactttgaaattggtcgccctctgggtaaaggaaagtttggtaatgt

SEQ ID NO: 423 - DNA, 991 bp, Homo sapiens
  source 1..991: mol_type = genomic DNA
gaattctaacggctgagctcttggaagacttgggtccttgggtcgcaggtgggagccgacggggtctcactccattgcccaggccagagtgcggggatatttgataagaaacttcagtgaaggccgggcgcggtggctcatgcccgtaatcccagcattttcggaggccgaggcatcatggaccgatctaaagaaaactgcatttcaggacctgttaaggctacagctccagttggaggtccaaaacgtgttctcgtgactcagcaatttccttgtcagaatccattacctgtaaatagtggccaggctcagcgggtcttgtgtccttcaaattcttcccagcgcattcctttgcaagcacaaaagcttgtctccagtcacaagccggttcagaatcagaagcagaagcaattgcaggcaaccagtgtacctcatcctgtctccaggccactgaataacacccaaaagagcaagcagcccctgccatcggcacctgaaaataatcctgaggaggaactggcatcaaaacagaaaaatgaagaatcaaaaaagaggcagtgggctttggaagactttgaaattggtcgccctctgggtaaaggaaagtttggtaatgtttatttggcaagagaaaagcaaagcaagtttattctggctcttaaagtgttatttaaagctcagctggagaaagccggagtggagcatcagctcagaagagaagtagaaatacagtcccaccttcggcatcctaatattcttagactgtatggttatttccatgatgctaccagagtctacctaattctggaatatgcaccacttggaacagtttatagagaacttcagaaactttcaaagtttgatgagcagagaactgctacttatataacagaattggcaaatgccctgtcttactgtcattcgaagagagttattcatagagacattaagccagagaacttacttcttggatcagctggagagcttaaaa

SEQ ID NO: 424 - DNA, 584 bp, Homo sapiens
  source 1..584: mol_type = genomic DNA
tgagctcttggaagacttgggtccttgggtcgcagggtctcactccattgcccaggccagagtgcggggatatttgataagaaacttcagtgaaggccgggcgcggtggctcatgcccgtaatcccagcattttcggaggccgagcaggtatgccagtaggctgcacagggatggaagtgatccattagaggagagatgatggagcagcaagaccatcaggagtgaagactccgtgacagaggatgggacgcagtgcccaaggggaggttggccttgcagggaaagcacatgcctgtccctccctcattagcttcatttggacaaaacatgtaaaatccggcatcatggaccgatctaaagaaaactgcatttcaggacctgttaaggctacagctccagttggaggtccaaaacgtgttctcgtgactcagcaatttccttgtcagaatccattacctgtaaatagtggccaggctcagcgggtcttgtgtccttcaaattcttcccagcgcattcctttgcaagcacaaaagcttgtctccagtcacaagccggttcagaatcagaagcagaagcaattgca

SEQ ID NO: 425 - DNA, 810 bp, Homo sapiens
  source 1..810: mol_type = genomic DNA
cctttgaattctaacggctgagctcttggaagacttgggtccttgggtcgcaggtgggagccgacgggtgggtagaccgtgggggatatctcagtggcggacgaggacggcggggacaaggggcggctggtcggagtggcggagcgtcaagtcccctgtcggttcctccgtccctgagtgtccttggcgctgccttgtgcccgcccagcgcctttgcatccgctcctgggcaccgaggcgccctgtaggatactgcttgttacttattacagctagagggtctcactccattgcccaggccagagtgcggggatatttgataagaaacttcagtgaaggccgggcgcggtggctcatgcccgtaatcccagcattttcggaggccgaggctggagtgcaatggtgtgatctcagctcactgcaacctctgcttcctgggtttaagtgattctcctgcctcagcctcccgagtagctgggattacaggcatcatggaccgatctaaagaaaactgcatttcaggacctgttaaggctacagctccagttggaggtccaaaacgtgttctcgtgactcagcaatttccttgtcagaatccattacctgtaaatagtggccaggctcagcgggtcttgtgtccttcaaattcttcccagcgcattcctttgcaagcacaaaagcttgtctccagtcacaagccggttcagaatcagaagcagaagcaattgcaggcaaccagtgtacctcatcctgtctccaggccactgaataacacccaaaagagcaagcagcccctgccatcggcacctg

SEQ ID NO: 426 - DNA, 1287 bp, Homo sapiens
  source 1..1287: mol_type = genomic DNA
gagatttgaaaagtccttggccagggcgcggcgtggcagattcagttgtttgcgggcggccgggagagtagcagtgccttggaccccagctctcctccccctttctctctaaggatggcccagaaggagaactcctacccctggccctacggccgacagacggctccatctggcctgagcaccctgccccagcgagtcctccggaaagagcctgtcaccccatctgcacttgtcctcatgagccgctccaatgtccagcccacagctgcccctggccagaaggtgatggagaatagcagtgggacacccgacatcttaacgcggcacttcacaattgatgactttgagattgggcgtcctctgggcaaaggcaagtttggaaacgtgtacttggctcgggagaagaaaagccatttcatcgtggcgctcaaggtcctcttcaagtcccagatagagaaggagggcgtggagcatcagctgcgcagagagatcgaaatccaggcccacctgcaccatcccaacatcctgcgtctctacaactatttttatgaccggaggaggatctacttgattctagagtatgccccccgcggggagctctacaaggagctgcagaagagctgcacatttgacgagcagcgaacagccacgatcatggaggagttggcagatgctctaatgtactgccatgggaagaaggtgattcacagagacataaagccagaaaatctgctcttagggctcaagggagagctgaagattgctgacttcggctggtctgtgcatgcgccctccctgaggaggaagacaatgtgtggcaccctggactacctgcccccagagatgattgaggggcgcatgcacaatgagaaggtggatctgtggtgcattggagtgctttgctatgagctgctggtggggaacccaccctttgagagtgcatcacacaacgagacctatcgccgcatcgtcaaggtggacctaaagttccccgcttccgtgcccatgggagcccaggacctcatctccaaactgctcaggcataacccctcggaacggctgcccctggcccaggtctcagcccacccttgggtccgggccaactctcggagggtgctgcctccctctgcccttcaatctgtcgcctgatggtccctgtcattcactcgggtgcgtgtgtttgtatgtctgtgtatgtataggggaaagaagggatccctaactgttcccttatctgttttctacctcctcctttgtttaataaaggctgaagctttttgtactcat

SEQ ID NO: 427 - DNA, 1167 bp, Homo sapiens
  source 1..1167: mol_type = genomic DNA
agattcagttgtttgcgggcggccgggagagtagcagtgccttggaccccaggctccatctggcctgagcaccctgccccagcgagtcctccggaaagagcctgtcaccccatctgcacttgtcctcatgagccgctccaatgtccagcccacagctgcccctggccagaaggtgatggagaatagcagtgggacacccgacatcttaacgcggcacttcacaattgatgactttgagattgggcgtcctctgggcaaaggcaagtttggaaacgtgtacttggctcgggagaagaaaagccatttcatcgtggcgctcaaggtcctcttcaagtcccagatagagaaggagggcgtggagcatcagctgcgcagagagatcgaaatccaggcccacctgcaccatcccaacatcctgcgtctctacaactatttttatgaccggaggaggatctacttgattctagagtatgccccccgcggggagctctacaaggagctgcagaagagctgcacatttgacgagcagcgaacagccacgatcatggaggagttggcagatgctctaatgtactgccatgggaagaaggtgattcacagagacataaagccagaaaatctgctcttagggctcaagggagagctgaagattgctgacttcggctggtctgtgcatgcgccctccctgaggaggaagacaatgtgtggcaccctggactacctgcccccagagatgattgaggggcgcatgcacaatgagaaggtggatctgtggtgcattggagtgctttgctatgagctgctggtggggaacccaccctttgagagtgcatcacacaacgagacctatcgccgcatcgtcaaggtggacctaaagttccccgcttccgtgcccatgggagcccaggacctcatctccaaactgctcaggcataacccctcggaacggctgcccctggcccaggtctcagcccacccttgggtccgggccaactctcggagggtgctgcctccctctgcccttcaatctgtcgcctgatggtccctgtcattcactcgggtgcgtgtgtttgtatgtctgtgtatgtataggggaaagaagggatccctaactgttcccttatctgttttctacctcctcctttgtttaataaaggctgaagcttt

SEQ ID NO: 428 - DNA, 1227 bp, Homo sapiens
  source 1..1227: mol_type = genomic DNA
ccagggcgcggcgtggcagattcagttgtttgcgggcggccgggagagtagcagtgccttggaccccagctctcctccccctttctctctaaggatggcccagaaggagaactcctacccctggccctacggccgacagacggctccatctggcctgagcaccctgccccagcgagtcctccggaaagagcctgtcaccccatctgcacttgtcctcatgagccgctccaatgtccagcccacagctgcccctggccagaaggtgatggagaatagcagtgggacacccgacatcttaacgcggcacttcacaattgatgactttgagattgggcgtcctctgggcaaaggcaagtttggaaacgtgtacttggctcgggagaagaaaagccatttcatcgtggcgctcaaggtcctcttcaagtcccagatagagaaggagggcgtggagcatcagctgcgcagagagatcgaaatccaggcccacctgcaccatcccaacatcctgcgtctctacaactatttttatgaccggaggaggatctacttgattctagagtatgccccccgcggggagctctacaaggagctgcagaagagctgcacatttgacgagcagcgaacagccacgatcatggaggagttggcagatgctctaatgtactgccatgggaagaaggtgattcacagagacataaagccagaaaatctgctcttagggctcaagggagagctgaagattgctgacttcggctggtctgtgcatgcgccctccctgaggaggaagacaatgtgtggcaccctggactacctgcccccagagatgattgaggggcgcatgcacaatgagaaggtggatctgtggtgcattggagtgctttgctatgagctgctggtggggaacccaccctttgagagtgcatcacacaacgagacctatcgccgcatcgtcaaggtggacctaaagttccccgcttccgtgcccatgggagcccaggacctcatctccaaactgctcaggcataacccctcggaacggctgcccctggcccaggtctcagcccacccttgggtccgggccaactctcggagggtgctgcctccctctgcccttcaatctgtcgcctgatggtccctgtcattcactcgggtgcgtgtgtttgtatgtctgtgtatgtataggggaaagaagggatccctaactgttcccttatctgttttctacct

SEQ ID NO: 429 - DNA, 1249 bp, Homo sapiens
  source 1..1249: mol_type = genomic DNA
ccacggctgctcacgacgccgcggatcccgaagcctgtgtagcagtgagacatcagtgaggctgcaggacgagcaggattggaagcgccccggccagaaagtgaccccccacccctttcaggaccctgtgaacgggaacagccatccagagggttcaggaaggcgtccgcgccctcacctcttctccccatgagctcccccagagctgtggtgcagctgggcaaagctcaacctgcaggcgaagagttggctacagcaaaccaaacagcccagcagcccagcagcccagccatgcggcgcctcacagtcgatgactttgaaatcgggcgtcccctgggcaaggggaaatttgggaatgtgtacctggctcggctcaaggaaagccatttcattgtggccctgaaggttctcttcaagtcgcagatagagaaggaaggactggagcaccagctgcgccgggaaattgagatccaggctcatctacaacaccccaatatcctgcgcctgtataactatttccatgatgcacgccgggtgtacctgattctggaatatgctccaaggggtgagctctacaaggagctgcagaaaagcgagaaattagatgaacagcgcacagccacgataatagaggagttggcagatgccctgacctactgccatgacaagaaagtgattcacagagatattaagccagagaacctgctgctggggttcaggggtgaggtgaagattgcagattttggctggtctgtgcacaccccctccctgaggaggaagacaatgtgtgggacactggactacttgccgccagaaatgattgaggggagaacatatgatgaaaaggtggatttgtggtgcattggagtgctctgctatgagctgctggtgggatatccaccctttgagagcgcctcccacagtgagacttacagacgcatcctcaaggtagatgtgaggtttccactatcaatgcctctgggggcccgggacttgatttccaggcttctcagataccagcccttggagagactgcccctggcccagatcctgaagcacccctgggttcaggcccactcccgaagggtgctgcctccctgtgctcagatggcttcctgagccctgtctgcctctgttccctttgtgtgtgttcagggagctctcctggctctgccacctcatttgtctttatttttttctcttttaagatgtaagatgctaattaataaaagctgaatcatttcatacc

SEQ ID NO: 430 - DNA, 1108 bp, Homo sapiens
  source 1..1108: mol_type = genomic DNA
ggaagtacctctctgagcggttggtgccgggtataaaagaaggccgcgcagccacggctgctcacgacgccgcggatcccgaagcctgtgtagcagtgagacatcatggctacagcaaaccaaacagcccagcagcccagcagcccagccatgcggcgcctcacagtcgatgactttgaaatcgggcgtcccctgggcaaggggaaatttgggaatgtgtacctggctcggctcaaggaaagccatttcattgtggccctgaaggttctcttcaagtcgcagatagagaaggaaggactggagcaccagctgcgccgggaaattgagatccaggctcatctacaacaccccaatatcctgcgcctgtataactatttccatgatgcacgccgggtgtacctgattctggaatatgctccaaggggtgagctctacaaggagctgcagaaaagcgagaaattagatgaacagcgcacagccacgataatagaggagttggcagatgccctgacctactgccatgacaagaaagtgattcacagagatattaagccagagaacctgctgctggggttcaggggtgaggtgaagattgcagattttggctggtctgtgcacaccccctccctgaggaggaagacaatgtgtgggacactggactacttgccgccagaaatgattgaggggagaacatatgatgaaaaggtggatttgtggtgcattggagtgctctgctatgagctgctggtgggatatccaccctttgagagcgcctcccacagtgagacttacagacgcatcctcaaggtagatgtgaggtttccactatcaatgcctctgggggcccgggacttgatttccaggcttctcagataccagcccttggagagactgcccctggcccagatcctgaagcacccctgggttcaggcccactcccgaagggtgctgcctccctgtgctcagatggcttcctgagccctgtctgcctctgttccctttgtgtgtgttcagggagctctcctggctctgccacctcatttgtctttatttttttctcttttaagatgtaagatgctaattaataaaagctgaatcatttcatacc

SEQ ID NO: 431 - DNA, 1113 bp, Homo sapiens
  source 1..1113: mol_type = genomic DNA
ggaagtacctctctgagcggttggtgccgggtataaaagaaggccgcgcagccacggctgctcacgacgccgcggatcccgaagcctgtgtagcagtgagacatcagtgagtggctacagcaaaccaaacagcccagcagcccagcagcccagccatgcggcgcctcacagtcgatgactttgaaatcgggcgtcccctgggcaaggggaaatttgggaatgtgtacctggctcggctcaaggaaagccatttcattgtggccctgaaggttctcttcaagtcgcagatagagaaggaaggactggagcaccagctgcgccgggaaattgagatccaggctcatctacaacaccccaatatcctgcgcctgtataactatttccatgatgcacgccgggtgtacctgattctggaatatgctccaaggggtgagctctacaaggagctgcagaaaagcgagaaattagatgaacagcgcacagccacgataatagaggagttggcagatgccctgacctactgccatgacaagaaagtgattcacagagatattaagccagagaacctgctgctggggttcaggggtgaggtgaagattgcagattttggctggtctgtgcacaccccctccctgaggaggaagacaatgtgtgggacactggactacttgccgccagaaatgattgaggggagaacatatgatgaaaaggtggatttgtggtgcattggagtgctctgctatgagctgctggtgggatatccaccctttgagagcgcctcccacagtgagacttacagacgcatcctcaaggtagatgtgaggtttccactatcaatgcctctgggggcccgggacttgatttccaggcttctcagataccagcccttggagagactgcccctggcccagatcctgaagcacccctgggttcaggcccactcccgaagggtgctgcctccctgtgctcagatggcttcctgagccctgtctgcctctgttccctttgtgtgtgttcagggagctctcctggctctgccacctcatttgtctttatttttttctcttttaagatgtaagatgctaattaataaaagctgaatcatttcatacc

SEQ ID NO: 432 - DNA, 3643 bp, Homo sapiens
  source 1..3643: mol_type = genomic DNA
ctcgggaggcgatcgtggccgctgccgccgccagagccggccggagtcggcccggagccgcgtccacgcggagcgggcgggtgggagctggcggctgggcccctgcggcgcccccgcggcctgccccgcgtccgcctccgggccgccgagccgcagccgccgagatgggggccgccccgggccgcgcccccgccgggtcccgcccgccgcgctgccgctgagcgcatgggcccggaccgcgccgcgccgctccgggagccgggcccggggtcccgccaccaccgcgcgcgggacagattgattcactttggagctgtaagtactgatgtattagggtgcagcgctcattgttccttgacgcagagtcccaaaatgaatatccaagagcagggtttccccttggacctcggagcaagtttcaccgaagatgctccccgacccccagtgcctggtgaggagggagaactggtgtccacagacccgaggcccgccagctacagtttctgctccgggaaaggtgttggcattaaaggtgagacttcgacggccactccgaggcgctcggatctggacctggggtatgagcctgagggcagtgcctcccccaccccaccatacttgaagtgggctgagtcactgcattccctgctggatgaccaagatgggataagcctgttcaggactttcctgaagcaggagggctgtgccgacttgctggacttctggtttgcctgcactggcttcaggaagctggagccctgtgactcgaacgaggagaagaggctgaagctggcgagagccatctaccgaaagtacattcttgataacaatggcatcgtgtcccggcagaccaagccagccaccaagagcttcataaagggctgcatcatgaagcagctgatcgatcctgccatgtttgaccaggcccagaccgaaatccaggccactatggaggaaaacacctatccctccttccttaagtctgatatttatttggaatatacgaggacaggctcggagagccccaaagtctgtagtgaccagagctctgggtcagggacagggaagggcatatctggatacctgccgaccttaaatgaagatgaggaatggaagtgtgaccaggacatggatgaggacgatggcagagacgctgctccccccggaagactccctcagaagctgctcctggagacagctgccccgagggtctcctccagtagacggtacagcgaaggcagagagttcaggtatggatcctggcgggagccagtcaacccctattatgtcaatgccggctatgccctggccccagccaccagtgccaacgacagcgagcagcagagcctgtccagcgatgcagacaccctgtccctcacggacagcagcgtggatgggatccccccatacaggatccgtaagcagcaccgcagggagatgcaggagagcgtgcaggtcaatgggcgggtgcccctacctcacattccccgcacgtaccgggtgccgaaggaggtccgcgtggagcctcagaagttcgcggaggagctcatccaccgcctggaggctgtgcagcgcacgcgggaggccgaggagaagctggaggagcggctgaagcgcgtgcgcatggaggaggaaggtgaggacggcgatccatcgtcagggcccccagggccgtgtcacaagctgcctcccgcccccgcttggcaccacttcccgccccgctgtgtggacatgggctgtgccgggctccgggatgcacacgaggagaaccctgagagcatcctggacgagcacgtacagcgtgtgctgaggacacctggccgccagtcgcctgggcctggccatcgctccccggacagtgggcacgtggccaagatgccagtggcactggggggtgccgcctcggggcacgggaagcacgtacccaagtcaggggcgaagctggacgcggccggcctgcaccaccaccgacacgtccaccaccacgtccaccacagcacagcccggcccaaggagcaggtggaggccgaggccacccgcagggcccagagcagcttcgcctggggcctggaaccacacagccatggggcaaggtcccgaggctactcagagagtgttggcgctgcccccaacgccagtgatggcctcgcccacagtgggaaggtgggcgtggcgtgcaaaagaaatgccaagaaggctgagtcggggaagagcgccagcaccgaggtgccaggtgcctcggaggatgcggagaagaaccagaaaatcatgcagtggatcattgagggggaaaaggagatcagcaggcaccgcaggaccggccacgggtcttcggggacgaggaagccacagccccatgagaactccagacccttgtcccttgagcacccctgggccggccctcagctccggacctccgtgcagccctcccacctcttcatccaagaccccaccatgccaccccacccagctcccaaccccctaacccagctggaggaggcgcgccgacgtctggaggaggaagaaaagagagccagccgagcaccctccaagcagaggtatgtgcaggaggttatgcggcggggacgcgcctgcgtcaggccagcgtgcgcgccggtgctgcacgtggtaccagccgtgtcggacatggagctctccgagacagagacaagatcgcagaggaaggtgggcggcgggagtgcccagccgtgtgacagcatcgttgtggcgtactacttctgcggggaacccatcccctaccgcaccctggtgaggggccgcgctgtcaccctgggccagttcaaggagctgctgaccaaaaagggcagctacagatactacttcaagaaagtgagcgacgagtttgactgtggggtggtgtttgaggaggttcgagaggacgaggccgtcctgcccgtctttgaggagaagatcatcggcaaagtggagaaggtggactgataggctggtgggctggccgctgtgccaggcgaggcccttggcgggcacgggtgtcacggccaggcagatgacctcgtactcaggagcccgatggggaacagtgttgggtgtaccacccatccctgtggtctacccgtgtctagaggcaggtagggggtccctccaagtggtccacaagcttctgtcctgcccccaaggaggcagcctggaccactcctcatagcaatacttggagggcccagcccaagtgaggcagccgaggtccctgctgccagcttcaggtgacccccccccatcccccggcacctcccttgggcacgtgtgctgggatctactttccctctgggatttgcccacgtacccaggtctgggtggggcccaggcccggatgcagaggcctgcagggcctctgtcaattgtacgcgccaccgagtgccttcaacacagcttgtctcttgcctgccactgtgtgaatcggcgacggagcactgcacctgcctccagccgccggctgtgcagtcctgggtcctcctttctgagggcccgtgtaaatatgtacatttctcaggctaggccagcaggggctgcccgagtctgtttttcatgcgatgacacttgtacaattaattatcttttcaaaggtacttggataataatgaaataaaactgtttttgaacctgc

SEQ ID NO: 433 - DNA, 3324 bp, Homo sapiens
  source 1..3324: mol_type = genomic DNA
gctgccgctgagcgcatgggcccggaccgcgccgcgccgctccgggagccgggcccggggtcccgccaccaccgcgcgcgggacagattgattcactttggagctgtaagtactgatgtattagggtgcagcgctcattgttccttgacgcagagtcccaaaatgaatatccaagagcagggtttccccttggacctcggagcaagtttcaccgaagatgctccccgacccccagtgcctggtgaggagggagaactggtgtccacagacccgaggcccgccagctacagtttctgctccgggaaaggtgttggcattaaaggtgagacttcgacggccactccgaggcgctcggatctggacctggggtatgagcctgagggcagtgcctcccccaccccaccatacttgaagtgggctgagtcactgcattccctgctggatgaccaagatgggataagcctgttcaggactttcctgaagcaggagggctgtgccgacttgctggacttctggtttgcctgcactggcttcaggaagctggagccctgtgactcgaacgaggagaagaggctgaagctggcgagagccatctaccgaaagtacattcttgataacaatggcatcgtgtcccggcagaccaagccagccaccaagagcttcataaagggctgcatcatgaagcagctgatcgatcctgccatgtttgaccaggcccagaccgaaatccaggccactatggaggaaaacacctatccctccttccttaagtctgatatttatttggaatatacgaggacaggctcggagagccccaaagtctgtagtgaccagagctctgggtcagggacagggaagggcatatctggatacctgccgaccttaaatgaagatgaggaatggaagtgtgaccaggacatggatgaggacgatggcagagacgctgctccccccggaagactccctcagaagctgctcctggagacagctgccccgagggtctcctccagtagacggtacagcgaaggcagagagttcaggtatggatcctggcgggagccagtcaacccctattatgtcaatgccggctatgccctggccccagccaccagtgccaacgacagcgagcagcagagcctgtccagcgatgcagacaccctgtccctcacggacagcagcgtggatgggatccccccatacaggatccgtaagcagcaccgcagggagatgcaggagagcgtgcaggtcaatgggcgggtgcccctacctcacattccccgcacgtaccgggtgccgaaggaggtccgcgtggagcctcagaagttcgcggaggagctcatccaccgcctggaggctgtgcagcgcacgcgggaggccgaggagaagctggaggagcggctgaagcgcgtgcgcatggaggaggaaggtgaggacggcgatccatcgtcagggcccccagggccgtgtcacaagctgcctcccgcccccgcttggcaccacttcccgccccgctgtgtggacatgggctgtgccgggctccgggatgcacacgaggagaaccctgagagcatcctggacgagcacgtacagcgtgtgctgaggacacctggccgccagtcgcctgggcctggccatcgctccccggacagtgggcacgtggccaagatgccagtggcactggggggtgccgcctcggggcacgggaagcacgtacccaagtcaggggcgaagctggacgcggccggcctgcaccaccaccgacacgtccaccaccacgtccaccacagcacagcccggcccaaggagcaggtggaggccgaggccacccgcagggcccagagcagcttcgcctggggcctggaaccacacagccatggggcaaggtcccgaggctactcagagagtgttggcgctgcccccaacgccagtgatggcctcgcccacagtgggaaggtgggcgtggcgtgcaaaagaaatgccaagaaggctgagtcggggaagagcgccagcaccgaggtgccaggtgcctcggaggatgcggagaagaaccagaaaatcatgcagtggatcattgagggggaaaaggagatcagcaggcaccgcaggaccggccacgggtcttcggggacgaggaagccacagccccatgagaactccagacccttgtcccttgagcacccctgggccggccctcagctccggacctccgtgcagccctcccacctcttcatccaagaccccaccatgccaccccacccagctcccaaccccctaacccagctggaggaggcgcgccgacgtctggaggaggaagaaaagagagccagccgagcaccctccaagcagaggacaagatcgcagaggaaggtgggcggcgggagtgcccagccgtgtgacagcatcgttgtggcgtactacttctgcggggaacccatcccctaccgcaccctggtgaggggccgcgctgtcaccctgggccagttcaaggagctgctgaccaaaaagggcagctacagatactacttcaagaaagtgagcgacgagtttgactgtggggtggtgtttgaggaggttcgagaggacgaggccgtcctgcccgtctttgaggagaagatcatcggcaaagtggagaaggtggactgataggctggtgggctggccgctgtgccaggcgaggcccttggcgggcacgggtgtcacggccaggcagatgacctcgtactcaggagcccgatggggaacagtgttgggtgtaccacccatccctgtggtctacccgtgtctagaggcaggtagggggtccctccaagtggtccacaagcttctgtcctgcccccaaggaggcagcctggaccactcctcatagcaatacttggagggcccagcccaagtgaggcagccgaggtccctgctgccagcttcaggtgacccccccccatcccccggcacctcccttgggcacgtgtgctgggatctactttccctctgggatttgcccacgtacccaggtctgggtggggcccaggcccggatgcagaggcctgcagggcctctgtcaattgtacgcgccaccgagtgccttcaacacagcttgtctcttgcctgccactgtgtgaatcggcgacggagcactgcacctgcctccagccgccggctgtgcagtcctgggtcctcctttctgagggcccgtgtaaatatgtacatttctcaggctaggccagcaggggctgcccgagtctgtttttcatgcgatgacacttgtacaattaattatcttttcaaaggtacttggataataatgaaataaaactgtttttgaacctg

SEQ ID NO: 434 - DNA, 334 bp, Homo sapiens
  source 1..334: mol_type = genomic DNA
gtctggaggaggaagaaaagagagccagccgagcaccctccaagcagaggacaagatcgcagaggaaggtgggcggcgggagtgcccagccgtgtgacagcatcgttgtggcgtactacttctgcggggaacccatcccctaccgcaccctggtgaggggccgcgctgtcaccctgggccagttcaaggagctgctgaccaaaaagggcagctacaggcctccttcccatctgcggtgctgcctgctcactgccctcctcacctccgtcctgcagatactacttcaagaaagtgagcgacgagtttgactgtggggtggtgtttgaggaggttc

SEQ ID NO: 435 - DNA, 3743 bp, Homo sapiens
  source 1..3743: mol_type = genomic DNA
ggatggggcggcgggcttcgggagcgcccgggctgatccgagccgagcgggccgtatctccttgtcggcgccgctgattcccggctctgcggaggcctctaggcagccgcgcagcttccgtgtttgctgcgcccgcactgcgatttacaaccctgaagaatctccctatccctattttgtccccctgcagtaataaatcccattatggagatctcgaaactttataaagggatatagtttgaattctatggagtgtaattttgtgtatgaattatatttttaaaacattgaagagttttcagaaagaaggctagtagagttgattactgatactttatgctaagcagtacttttttggtagtacaatattttgttaggcgtttctgataacactagaaaggacaagttttatcttgtgataaattgattaatgtttacaacatgactgataattatagctgaatagtccttaaatgatgaacaggttatttagtttttaaatgcagtgtaaaaagtgtgctgtggaaattttatggctaactaagtttatggagaaaataccttcagttgatcaagaataatagtggtatacaaagttaggaagaaagtcaacatgatgctgcaggaaatggaaacaaatacaaatgatatttaacaaagatagagtttacagtttttgaactttaagccaaattcatttgacatcaagcactatagcaggcacaggttcaacaaagcttgtgggtattgacttcccccaaaagttgtcagctgaagtaatttagcccacttaagtaaatactatgatgataagctgtgtgaacttagcttttaaatagtgtgaccatatgaaggttttaattacttttgtttattggaataaaatgagattttttgggttgtcatgttaaagtgcttatagggaaagaagcctgcatataattttttaccttgtggcataatcagtaattggtctgttattcaggcttcatagcttgtaaccaaatataaataaaaggcataatttaggtattctatagttgcttagaattttgttaatataaatctctgtgaaaaatcaaggagttttaatattttcagaagtgcatccacctttcagggctttaagttagtattactcaagattatgaacaaatagcacttaggttacctgaaagagttactacaaccccaaagagttgtgttctaagtagtatcttggtaattcagagagatactcatcctacctgaatataaactgagataaatccagtaaagaaagtgtagtaaattctacataagagtctatcattgatttctttttgtggtaaaaatcttagttcatgtgaagaaatttcatgtgaatgttttagctatcaaacagtactgtcacctactcatgcacaaaactgcctcccaaagacttttcccaggtccctcgtatcaaaacattaagagtataatggaagatagcacgatcttgtcagattggacaaacagcaacaaacaaaaaatgaagtatgacttttcctgtgaactctacagaatgtctacatattcaactttccccgccggggtgcctgtctcagaaaggagtcttgctcgtgctggtttttattatactggtgtgaatgacaaggtcaaatgcttctgttgtggcctgatgctggataactggaaactaggagacagtcctattcaaaagcataaacagctatatcctagctgtagctttattcagaatctggtttcagctagtctgggatccacctctaagaatacgtctccaatgagaaacagttttgcacattcattatctcccaccttggaacatagtagcttgttcagtggttcttactccagcctttctccaaaccctcttaattctagagcagttgaagacatctcttcatcgaggactaacccctacagttatgcaatgagtactgaagaagccagatttcttacctaccatatgtggccattaacttttttgtcaccatcagaattggcaagagctggtttttattatataggacctggagatagggtagcctgctttgcctgtggtgggaagctcagtaactgggaaccaaaggatgatgctatgtcagaacaccggaggcattttcccaactgtccatttttggaaaattctctagaaactctgaggtttagcatttcaaatctgagcatgcagacacatgcagctcgaatgagaacatttatgtactggccatctagtgttccagttcagcctgagcagcttgcaagtgctggtttttattatgtgggtcgcaatgatgatgtcaaatgcttttgttgtgatggtggcttgaggtgttgggaatctggagatgatccatgggtagaacatgccaagtggtttccaaggtgtgagttcttgatacgaatgaaaggccaagagtttgttgatgagattcaaggtagatatcctcatcttcttgaacagctgttgtcaacttcagataccactggagaagaaaatgctgacccaccaattattcattttggacctggagaaagttcttcagaagatgctgtcatgatgaatacacctgtggttaaatctgccttggaaatgggctttaatagagacctggtgaaacaaacagttcaaagtaaaatcctgacaactggagagaactataaaacagttaatgatattgtgtcagcacttcttaatgctgaagatgaaaaaagagaagaggagaaggaaaaacaagctgaagaaatggcatcagatgatttgtcattaattcggaagaacagaatggctctctttcaacaattgacatgtgtgcttcctatcctggataatcttttaaaggccaatgtaattaataaacaggaacatgatattattaaacaaaaaacacagatacctttacaagcgagagaactgattgataccattttggttaaaggaaatgctgcggccaacatcttcaaaaactgtctaaaagaaattgactctacattgtataagaacttatttgtggataagaatatgaagtatattccaacagaagatgtttcaggtctgtcactggaagaacaattgaggaggttgcaagaagaacgaacttgtaaagtgtgtatggacaaagaagtttctgttgtatttattccttgtggtcatctggtagtatgccaggaatgtgccccttctctaagaaaatgccctatttgcaggggtataatcaagggtactgttcgtacatttctctcttaaagaaaaatagtctatattttaacctgcataaaaaggtctttaaaatattgttgaacacttgaagccatctaaagtaaaaagggaattatgagtttttcaattagtaacattcatgttctagtctgctttggtactaataatcttgtttctgaaaagatggtatcatatatttaatcttaatctgtttatttacaagggaagatttatgtttggtgaactatattagtatgtatgtgtacctaagggagtagtgtcactgcttgttatgcatcatttcaggagttactggatttgttgttctttcagaaagctttgaatactaaattatagtgtagaaaagaactggaaaccaggaactctggagttcatcagagttatggtgccgaattgtctttggtgcttttcacttgtgttttaaaataaggatttttctcttatttctccccctagtttgtgagaaacatctcaataaagtgctttaaaaaga

SEQ ID NO: 436 - DNA, 1927 bp, Homo sapiens
  source 1..1927: mol_type = genomic DNA
atcgtgcgtcagagtgagcccggatggggcggcgggcttcgggagcgcccgggctgatccgagccgagcgggccgtatctccttgtcggcgccgctgattcccggctctgcggaggcctctaggcagccgcgcagcttccgtgtttgctgcgcccgcactgcgaatgtctacatattcaactttccccgccggggtgcctgtctcagaaaggagtcttgctcgtgctggtttttattatactggtgtgaatgacaaggtcaaatgcttctgttgtggcctgatgctggataactggaaactaggagacagtcctattcaaaagcataaacagctatatcctagctgtagctttattcagaatctggtttcagctagtctgggatccacctctaagaatacgtctccaatgagaaacagttttgcacattcattatctcccaccttggaacatagtagcttgttcagtggttcttactccagcctttctccaaaccctcttaattctagagcagttgaagacatctcttcatcgaggactaacccctacagttatgcaatgagtactgaagaagccagatttcttacctaccatatgtggccattaacttttttgtcaccatcagaattggcaagagctggtttttattatataggacctggagatagggtagcctgctttgcctgtggtgggaagctcagtaactgggaaccaaaggatgatgctatgtcagaacaccggaggcattttcccaactgtccatttttggaaaattctctagaaactctgaggtttagcatttcaaatctgagcatgcagacacatgcagctcgaatgagaacatttatgtactggccatctagtgttccagttcagcctgagcagcttgcaagtgctggtttttattatgtgggtcgcaatgatgatgtcaaatgcttttgttgtgatggtggcttgaggtgttgggaatctggagatgatccatgggtagaacatgccaagtggtttccaaggtgtgagttcttgatacgaatgaaaggccaagagtttgttgatgagattcaaggtagatatcctcatcttcttgaacagctgttgtcaacttcagataccactggagaagaaaatgctgacccaccaattattcattttggacctggagaaagttcttcagaagatgctgtcatgatgaatacacctgtggttaaatctgccttggaaatgggctttaatagagacctggtgaaacaaacagttcaaagtaaaatcctgacaactggagagaactataaaacagttaatgatattgtgtcagcacttcttaatgctgaagatgaaaaaagagaagaggagaaggaaaaacaagctgaagaaatggcatcagatgatttgtcattaattcggaagaacagaatggctctctttcaacaattgacatgtgtgcttcctatcctggataatcttttaaaggccaatgtaattaataaacaggaacatgatattattaaacaaaaaacacagatacctttacaagcgagagaactgattgataccattttggttaaaggaaatgctgcggccaacatcttcaaaaactgtctaaaagaaattgactctacattgtataagaacttatttgtggataagaatatgaagtatattccaacagaagatgtttcaggtctgtcactggaagaacaattgaggaggttgcaagaagaacgaacttgtaaagtgtgtatggacaaagaagtttctgttgtatttattccttgtggtcatctggtagtatgccaggaatgtgccccttctctaagaaaatgccctatttgcaggggtataatcaagggtactgttcgtacatttctctcttaaagaaaaatagtctatattttaacctgcataaaaaggtctttaaaatattgttg

SEQ ID NO: 437 - DNA, 2617 bp, Homo sapiens
  source 1..2617: mol_type = genomic DNA
gggcttcgggagcgcccgggctgatccgagccgagcgggccgtatctccttgtcggcgccgctgattcccggctctgcggaggcctctaggcagccgcgcagcttccgtgtttgctgcgcccgcactgcgatttacaaccctgaagaatctccctatccctattttgtccccctgcagtaataaatcccattatggagatctcgaaactttataaagggatatagtttgaattctatggagtgtaattttgtgtatgaattatatttttaaaacattgaagagttttcagaaagaagacttttcccaggtccctcgtatcaaaacattaagagtataatggaagatagcacgatcttgtcagattggacaaacagcaacaaacaaaaaatgaagtatgacttttcctgtgaactctacagaatgtctacatattcaactttccccgccggggtgcctgtctcagaaaggagtcttgctcgtgctggtttttattatactggtgtgaatgacaaggtcaaatgcttctgttgtggcctgatgctggataactggaaactaggagacagtcctattcaaaagcataaacagctatatcctagctgtagctttattcagaatctggtttcagctagtctgggatccacctctaagaatacgtctccaatgagaaacagttttgcacattcattatctcccaccttggaacatagtagcttgttcagtggttcttactccagcctttctccaaaccctcttaattctagagcagttgaagacatctcttcatcgaggactaacccctacagttatgcaatgagtactgaagaagccagatttcttacctaccatatgtggccattaacttttttgtcaccatcagaattggcaagagctggtttttattatataggacctggagatagggtagcctgctttgcctgtggtgggaagctcagtaactgggaaccaaaggatgatgctatgtcagaacaccggaggcattttcccaactgtccatttttggaaaattctctagaaactctgaggtttagcatttcaaatctgagcatgcagacacatgcagctcgaatgagaacatttatgtactggccatctagtgttccagttcagcctgagcagcttgcaagtgctggtttttattatgtgggtcgcaatgatgatgtcaaatgcttttgttgtgatggtggcttgaggtgttgggaatctggagatgatccatgggtagaacatgccaagtggtttccaaggtgtgagttcttgatacgaatgaaaggccaagagtttgttgatgagattcaaggtagatatcctcatcttcttgaacagctgttgtcaacttcagataccactggagaagaaaatgctgacccaccaattattcattttggacctggagaaagttcttcagaagatgctgtcatgatgaatacacctgtggttaaatctgccttggaaatgggctttaatagagacctggtgaaacaaacagttcaaagtaaaatcctgacaactggagagaactataaaacagttaatgatattgtgtcagcacttcttaatgctgaagatgaaaaaagagaagaggagaaggaaaaacaagctgaagaaatggcatcagatgatttgtcattaattcggaagaacagaatggctctctttcaacaattgacatgtgtgcttcctatcctggataatcttttaaaggccaatgtaattaataaacaggaacatgatattattaaacaaaaaacacagatacctttacaagcgagagaactgattgataccattttggttaaaggaaatgctgcggccaacatcttcaaaaactgtctaaaagaaattgactctacattgtataagaacttatttgtggataagaatatgaagtatattccaacagaagatgtttcaggtctgtcactggaagaacaattgaggaggttgcaagaagaacgaacttgtaaagtgtgtatggacaaagaagtttctgttgtatttattccttgtggtcatctggtagtatgccaggaatgtgccccttctctaagaaaatgccctatttgcaggggtataatcaagggtactgttcgtacatttctctcttaaagaaaaatagtctatattttaacctgcataaaaaggtctttaaaatattgttgaacacttgaagccatctaaagtaaaaagggaattatgagtttttcaattagtaacattcatgttctagtctgctttggtactaataatcttgtttctgaaaagatggtatcatatatttaatcttaatctgtttatttacaagggaagatttatgtttggtgaactatattagtatgtatgtgtacctaagggagtagtgtcactgcttgttatgcatcatttcaggagttactggatttgttgttctttcagaaagctttgaatactaaattatagtgtagaaaagaactggaaaccaggaactctggagttcatcagagttatggtgccgaattgtctttggtgcttttcacttgtgttttaaaataaggatttttctcttatttctccccctagtttgtgagaaacatctcaataaagtgctttaaaaag

SEQ ID NO: 438 - DNA, 3001 bp, Homo sapiens
  source 1..3001: mol_type = genomic DNA
ggatggggcggcgggcttcgggagcgcccgggctgatccgagccgagcgggccgtatctccttgtcggcgccgctgattcccggctctgcggaggcctctaggcagccgcgcagcttccgtgtttgctgcgcccgcactgcgatttacaaccctgaagaatctccctatccctattttgtccccctgcagtaataaatcccattatggagatctcgaaactttataaagggatatagtttgaattctatggagtgtaattttgtgtatgaattatatttttaaaacattgaagagttttcagaaagaaggctagtagagttgattactgatactttatgctaagcagtacttttttggtagtacaatattttgttaggcgtttctgataacactagaaaggacaagttttatcttgtgataaattgattaatgtttacaacatgactgataattatagctgaatagtccttaaatgatgaacaggttatttagtttttaaatgcagtgtaaaaagtgtgctgtggaaattttatggctaactaagtttatggagaaaataccttcagttgatcaagaataatagtggtatacaaagttaggaagaaagtcaacatgatgctgcaggaaatggaaacaaatacaaatgatatttaacaaagatagagtttacagtttttgaactttaagccaaattcatttgacatcaagcactatagcaggcacaggttcaacaaagcttgtgggtattgacttcccccaaaagttgtcagctgaagtaatttagcccacttaagtaaatactatgatgataagctgtgtgaacttagcttttaaatagtgtgaccatatgaaggttttaattacttttgtttattggaataaaatgagattttttgggttgtcatgttaaagtgcttatagggaaagaagcctgcatataattttttaccttgtggcataatcagtaattggtctgttattcaggcttcatagcttgtaaccaaatataaataaaaggcataatttaggtattctatagttgcttagaattttgttaatataaatctctgtgaaaaatcaaggagttttaatattttcagaagtgcatccacctttcagggctttaagttagtattactcaagattatgaacaaatagcacttaggttacctgaaagagttactacaaccccaaagagttgtgttctaagtagtatcttggtaattcagagagatactcatcctacctgaatataaactgagataaatccagtaaagaaagtgtagtaaattctacataagagtctatcattgatttctttttgtggtaaaaatcttagttcatgtgaagaaatttcatgtgaatgttttagctatcaaacagtactgtcacctactcatgcacaaaactgcctcccaaagacttttcccaggtccctcgtatcaaaacattaagagtataatggaagatagcacgatcttgtcagattggacaaacagcaacaaacaaaaaatgaagtatgacttttcctgtgaactctacagaatgtctacatattcaactttccccgccggggtgcctgtctcagaaaggagtcttgctcgtgctggtttttattatactggtgtgaatgacaaggtcaaatgcttctgttgtggcctgatgctggataactggaaactaggagacagtcctattcaaaagcataaacagctatatcctagctgtagctttattcagaatctggtttcagctagtctgggatccacctctaagaatacgtctccaatgagaaacagttttgcacattcattatctcccaccttggaacatagtagcttgttcagtggttcttactccagcctttctccaaaccctcttaattctagagcagttgaagacatctcttcatcgaggactaacccctacagttatgcaatgagtactgaagaagccagatttcttacctaccatatgtggccattaacttttttgtcaccatcagaattggcaagagctggtttttattatataggacctggagatagggtagcctgctttgcctgtggtgggaagctcagtaactgggaaccaaaggatgatgctatgtcagaacaccggaggcattttcccaactgtccatttttggaaaattctctagaaactctgaggtttagcatttcaaatctgagcatgcagacacatgcagctcgaatgagaacatttatgtactggccatctagtgttccagttcagcctgagcagcttgcaagtgctggtttttattatgtgggtcgcaatgatgatgtcaaatgcttttgttgtgatggtggcttgaggtgttgggaatctggagatgatccatgggtagaacatgccaagtggtttccaaggtgtgagttcttgatacgaatgaaaggccaagagtttgttgatgagattcaaggtagatatcctcatcttcttgaacagctgttgtcaacttcagataccactggagaagaaaatgctgacccaccaattattcattttggacctggagaaagttcttcagaagatgctgtcatgatgaatacacctgtggttaaatctgccttggaaatgggctttaatagagacctggtgaaacaaacagttcaaagtaaaatcctgacaactggagagaactataaaacagttaatgatattgtgtcagcacttcttaatgctgaagatgaaaaaagagaagaggagaaggaaaaacaagctgaagaaatggcatcagatgatttgtcattaattcggaagaacagaatggctctctttcaacaattgacatgtgtgcttcctatcctggataatcttttaaaggccaatgtaattaataaacaggaacatgatattattaaacaaaaaacacagatacctttacaagcgagagaactgattgataccattttggttaaaggaaatgctgcggccaacatcttcaaaaactgtctaaaagtaaaacaaagattt

SEQ ID NO: 439 - DNA, 5197 bp, Homo sapiens
  source 1..5197: mol_type = genomic DNA
ggccaggcgacaggtgtcgcttgaaaagactgggcttgtccttgctggtgcatgcgtcgtcggcctctgggcagcaggtttacaaaggaggaaaacgacttcttctagatttttttttcagtttcttctataaatcaaaacatctcaaaatggagacctaaaatccttaaagggacttagtctaatctcgggaggtagttttgtgcatgggtaaacaaattaagtattaactggtgttttactatccaaagaatgctaattttataaacatgatcgagttatataaggtataccataatgagtttgattttgaatttgatttgtggaaataaaggaaaagtgattctagctggggcatattgttaaagcatttttttcagagttggccaggcagtctcctactggcacattctcccattatgtagaatagaaatagtacctgtgtttgggaaagattttaaaatgagtgacagttatttggaacaaagagctaataatcaatccactgcaaattaaagaaacatgcagatgaaagttttgacacattaaaatacttctacagtgacaaagaaaaatcaagaacaaagctttttgatatgtgcaacaaatttagaggaagtaaaaagataaatgtgatgattggtcaagaaattatccagttatttacaaggccactgatattttaaacgtccaaaagtttgtttaaatgggctgttaccgctgagaatgatgaggatgagaatgatggttgaaggttacattttaggaaatgaagaaacttagaaaattaatataaagacagtgatgaatacaaagaagatttttataacaatgtgtaaaatttttggccagggaaaggaatattgaagttagatacaattacttacctttgagggaaataattgttggtaatgagatgtgatgtttctcctgccacctggaaacaaagcattgaagtctgcagttgaaaagcccaacgtctgtgagatccaggaaaccatgcttgcaaaccactggtaaaaaaaaaaaaaaaaaaaaaaaaaagccacagtgacttgcttattggtcattgctagtattatcgactcagaacctctttactaatggctagtaaatcataattgagaaattctgaattttgacaaggtctctgctgttgaaatggtaaatttattattttttttgtcatgataaattctggttcaaggtatgctatccatgaaataatttctgaccaaaactaaattgatgcaatttgattatccatcttagcctacagatggcatctggtaacttttgactgttttaaaaaataaatccactatcagagtagatttgatgttggcttcagaaacatttagaaaaacaaaagttcaaaaatgttttcaggaggtgataagttgaataactctacaatgttagttctttgagggggacaaaaaatttaaaatctttgaaaggtcttattttacagccatatctaaattatcttaagaaaatttttaacaaagggaatgaaatatatatcatgattctgtttttccaaaagtaacctgaatatagcaatgaagttcagttttgttattggtagtttgggcagagtctctttttgcagcacctgttgtctaccataattacagaggacatttccatgttctagccaagtatactattagaataaaaaaacttaacattgagttgcttcaacagcatgaaactgagtccaaaagaccaaatgaacaaacacattaatctctgattatttattttaaatagaatatttaattgtgtaagatctaatagtatcattatacttaagcaatcatattcctgatgatctatgggaaataactattatttaattaatattgaaaccaggttttaagatgtgttagccagtcctgttactagtaaatctctttatttggagagaaattttagattgttttgttctccttattagaaggattgtagaaagaaaaaaatgactaattggagaaaaattggggatatatcatatttcactgaattcaaaatgtcttcagttgtaaatcttaccattattttacgtacctctaagaaataaaagtgcttctaattaaaatatgatgtcattaattatgaaatacttcttgataacagaagttttaaaatagccatcttagaatcagtgaaatatggtaatgtattattttcctcctttgagttaggtcttgtgcttttttttcctggccactaaatttcacaatttccaaaaagcaaaataaacatattctgaatatttttgctgtgaaacacttgacagcagagctttccaccatgaaaagaagcttcatgagtcacacattacatctttgggttgattgaatgccactgaaacattctagtagcctggagaagttgacctacctgtggagatgcctgccattaaatggcatcctgatggcttaatacacatcactcttctgtgaagggttttaattttcaacacagcttactctgtagcatcatgtttacattgtatgtataaagattatacaaaggtgcaattgtgtatttcttccttaaaatgtatcagtataggatttagaatctccatgttgaaactctaaatgcatagaaataaaaataataaaaaatttttcattttggcttttcagcctagtattaaaactgataaaagcaaagccatgcacaaaactacctccctagagaaaggctagtcccttttcttccccattcatttcattatgaacatagtagaaaacagcatattcttatcaaatttgatgaaaagcgccaacacgtttgaactgaaatacgacttgtcatgtgaactgtaccgaatgtctacgtattccacttttcctgctggggttcctgtctcagaaaggagtcttgctcgtgctggtttctattacactggtgtgaatgacaaggtcaaatgcttctgttgtggcctgatgctggataactggaaaagaggagacagtcctactgaaaagcataaaaagttgtatcctagctgcagattcgttcagagtctaaattccgttaacaacttggaagctacctctcagcctacttttccttcttcagtaacaaattccacacactcattacttccgggtacagaaaacagtggatatttccgtggctcttattcaaactctccatcaaatcctgtaaactccagagcaaatcaagatttttctgccttgatgagaagttcctaccactgtgcaatgaataacgaaaatgccagattacttacttttcagacatggccattgacttttctgtcgccaacagatctggcaaaagcaggcttttactacataggacctggagacagagtggcttgctttgcctgtggtggaaaattgagcaattgggaaccgaaggataatgctatgtcagaacacctgagacattttcccaaatgcccatttatagaaaatcagcttcaagacacttcaagatacacagtttctaatctgagcatgcagacacatgcagcccgctttaaaacattctttaactggccctctagtgttctagttaatcctgagcagcttgcaagtgcgggtttttattatgtgggtaacagtgatgatgtcaaatgcttttgctgtgatggtggactcaggtgttgggaatctggagatgatccatgggttcaacatgccaagtggtttccaaggtgtgagtacttgataagaattaaaggacaggagttcatccgtcaagttcaagccagttaccctcatctacttgaacagctgctatccacatcagacagcccaggagatgaaaatgcagagtcatcaattatccattttgaacctggagaagaccattcagaagatgcaatcatgatgaatactcctgtgattaatgctgccgtggaaatgggctttagtagaagcctggtaaaacagacagttcagagaaaaatcctagcaactggagagaattatagactagtcaatgatcttgtgttagacttactcaatgcagaagatgaaataagggaagaggagagagaaagagcaactgaggaaaaagaatcaaatgatttattattaatccggaagaatagaatggcactttttcaacatttgacttgtgtaattccaatcctggatagtctactaactgccggaattattaatgaacaagaacatgatgttattaaacagaagacacagacgtctttacaagcaagagaactgattgatacgattttagtaaaaggaaatattgcagccactgtattcagaaactctctgcaagaagctgaagctgtgttatatgagcatttatttgtgcaacaggacataaaatatattcccacagaagatgtttcagatctaccagtggaagaacaattgcggagactacaagaagaaagaacatgtaaagtgtgtatggacaaagaagtgtccatagtgtttattccttgtggtcatctagtagtatgcaaagattgtgctccttctttaagaaagtgtcctatttgtaggagtacaatcaagggtacagttcgtacatttctttcatgaagaagaaccaaaacatcgtctaaactttagaattaatttattaaatgtattataactttaacttttatcctaatttggtttccttaaaatttttatttatttacaactcaaaaaacattgttttgtgtaacatatttatatatgtatctaaaccatatgaacatatattttttagaaactaagagaatgataggcttttgttcttatgaacgaaaaagaggtagcactacaaacacaatattcaatcaaaatttcagcattattgaaattgtaagtgaagtaaaacttaagatatttgagttaacctttaagaattttaaatattttggcattgtactaataccgggaacatgaagccaggtgtggtggtatgtgcctgtagtcccaggctgaggcaagagaattacttgagcccaggagtttgaatccatcctgggcagcatactgagaccctgcctttaaaaacaaacagaacaaaaacaaaacaccagggacacatttctctgtcttttttgatcagtgtcctatacatcgaaggtgtgcatatatgttgaatgacattttagggacatggtgtttttataaagaattctgtgagaaaaaatttaataaagcaacaaaaattactctta

SEQ ID NO: 440 - DNA, 4238 bp, Homo sapiens
  source 1..4238: mol_type = genomic DNA
gggcagcaggtttacaaaggaggaaaacgacttcttctagatttttttttcagtttcttctataaatcaaaactacctccctagagaaaggctagtcccttttcttccccattcatttcattatgaacatagtagaaaacagcatattcttatcaaatttgatgaaaagcgccaacacgtttgaactgaaatacgacttgtcatgtgaactgtaccgaatgtctacgtattccacttttcctgctggggttcctgtctcagaaaggagtcttgctcgtgctggtttctattacactggtgtgaatgacaaggtcaaatgcttctgttgtggcctgatgctggataactggaaaagaggagacagtcctactgaaaagcataaaaagttgtatcctagctgcagattcgttcagagtctaaattccgttaacaacttggaagctacctctcagcctacttttccttcttcagtaacaaattccacacactcattacttccgggtacagaaaacagtggatatttccgtggctcttattcaaactctccatcaaatcctgtaaactccagagcaaatcaagatttttctgccttgatgagaagttcctaccactgtgcaatgaataacgaaaatgccagattacttacttttcagacatggccattgacttttctgtcgccaacagatctggcaaaagcaggcttttactacataggacctggagacagagtggcttgctttgcctgtggtggaaaattgagcaattgggaaccgaaggataatgctatgtcagaacacctgagacattttcccaaatgcccatttatagaaaatcagcttcaagacacttcaagatacacagtttctaatctgagcatgcagacacatgcagcccgctttaaaacattctttaactggccctctagtgttctagttaatcctgagcagcttgcaagtgcgggtttttattatgtgggtaacagtgatgatgtcaaatgcttttgctgtgatggtggactcaggtgttgggaatctggagatgatccatgggttcaacatgccaagtggtttccaaggtgtgagtacttgataagaattaaaggacaggagttcatccgtcaagttcaagccagttaccctcatctacttgaacagctgctatccacatcagacagcccaggagatgaaaatgcagagtcatcaattatccattttgaacctggagaagaccattcagaagatgcaatcatgatgaatactcctgtgattaatgctgccgtggaaatgggctttagtagaagcctggtaaaacagacagttcagagaaaaatcctagcaactggagagaattatagactagtcaatgatcttgtgttagacttactcaatgcagaagatgaaataagggaagaggagagagaaagagcaactgaggaaaaagaatcaaatgatttattattaatccggaagaatagaatggcactttttcaacatttgacttgtgtaattccaatcctggatagtctactaactgccggaattattaatgaacaagaacatgatgttattaaacagaagacacagacgtctttacaagcaagagaactgattgatacgattttagtaaaaggaaatattgcagccactgtattcagaaactctctgcaagaagctgaagctgtgttatatgagcatttatttgtgcaacaggacataaaatatattcccacagaagatgtttcagatctaccagtggaagaacaattgcggagactacaagaagaaagaacatgtaaagtgtgtatggacaaagaagtgtccatagtgtttattccttgtggtcatctagtagtatgcaaagattgtgctccttctttaagaaagtgtcctatttgtaggagtacaatcaagggtacagttcgtacatttctttcatgaagaagaaccaaaacatcgtctaaactttagaattaatttattaaatgtattataactttaacttttatcctaatttggtttccttaaaatttttatttatttacaactcaaaaaacattgttttgtgtaacatatttatatatgtatctaaaccatatgaacatatattttttagaaactaagagaatgataggcttttgttcttatgaacgaaaaagaggtagcactacaaacacaatattcaatcaaaatttcagcattattgaaattgtaagtgaagtaaaacttaagatatttgagttaacctttaagaattttaaatattttggcattgtactaataccgggaacatgaagccaggtgtggtggtatgtgcctgtagtcccaggctgaggcaagagaattacttgagcccaggagtttgaatccatcctgggcagcatactgagaccctgcctttaaaaacaaacagaacaaaaacaaaacaccagggacacatttctctgtcttttttgatcagtgtcctatacatcgaaggtgtgcatatatgttgaatgacattttagggacatggtgtttttataaagaattctgtgagaaaaaatttaataaagcaacaaaaattactcttattcttcattgctttatttcaatgacattggatagtttagtcactcccagactctttccataccttcttaaagcctctcaaatattgaactacagtttatactccttcccataagatgcttcttcattgacacttgtagaacacggggtcaacacatcataaaatctattatggaatgcctgagacaagaatcaaacagtccctttagtaagtttgtttattcacttctctattgattcattcaagaagtctcatgccagccccacctattggaagaaggtctgagttttattcttatctctttggtattaattctgaaacttagaaagtacactggttagcaatgcttgggaccaacaggttgttctggtaaataaatctgtttcatattgtcagtgcaacaaaatgtccccctctgcattatgttattggtactcaacacgtccgagtcataactctgtcctttgcttcttatagaggtattaggtcttcaagagcagaagtaagactgtaatagggaatactcaggggaaggcaggcaaaggctagtcatctaaaccagttctagatgtctgtataggggcagatggctctgtaagggcagaagggaaagaccccttcataagggtcacagctgacaatcctataacaaaagacaggttaacaagagaaaaacttaacaaatttatttaatcacagatttacatcaccggggagccttcgtaatgaagatccaaaattacaggggaaactgtgcatttttatgcttaggtttgataatgaatggacagccctgaagaatagtgattggaaaaaaaggatatgatctaatgggaatagacacaggttggggacccagcaaggcctgtctgttcagattattcttggtctctgtgcagcattccttcctcctggatatagggcagggcctgtatgggatggggatattataacctgctatcaagcaaggtaggtcagagaatttatttatggccagctcttacatagttaggtgaggaaagattagagtactatctttaagatgtaagtctggcattgtggaaagatggttccagtttctatgacctaccttggggaagaggaattcaagtttctgtggcttgccttcagggagaatgaggctgagacaggagggcaggataacatcagagaaaaactttgcttctgaggccttcactttgggttttctgagccccaacatctgctagtgttgtaaagagaacaattagggaccaagtgaggggaggaaagaatccatctctgcattctgatgctgggagacttatttccttgaaatgcaattgattttgcctctgctaagaggctctgctggctacccatgtactagccagtgtcctgcatgggtgctaggctgaattatttgtaattgtgcttaggtgatttgtaactcaggtatagggtatttaaatagtaggcaccctttttgcaccatgtgtttttttttttatctagttcttgtatactacagataatatttgaactttgtcatctcactgtaaaacttttgttcatttctcattatggtaataaatagctattataaccaacccatttattcaaatatgttatttccctaagtgttattttgacattttgttttggaaaaaataaatcaccatagataataa

SEQ ID NO: 441 - DNA, 2699 bp, Homo sapiens
  source 1..2699: mol_type = genomic DNA
cccagaaggccgcggggggtggaccgcctaagagggcgtgcgctcccgacatgccccgcggcgcgccattaaccgccagatttgaatcgcgggacccgttggcagaggtggcggcggcggcatgggtgccccgacgttgccccctgcctggcagccctttctcaaggaccaccgcatctctacattcaagaactggcccttcttggagggctgcgcctgcaccccggagcggatggccgaggctggcttcatccactgccccactgagaacgagccagacttggcccagtgtttcttctgcttcaaggagctggaaggctgggagccagatgacgaccccattgggccgggcacggtggcttacgcctgtaataccagcactttgggaggccgaggcgggcggatcacgagagaggaacataaaaagcattcgtccggttgcgctttcctttctgtcaagaagcagtttgaagaattaacccttggtgaatttttgaaactggacagagaaagagccaagaacaaaattgcaaaggaaaccaacaataagaagaaagaatttgaggaaactgcggagaaagtgcgccgtgccatcgagcagctggctgccatggattgaggcctctggccggagctgcctggtcccagagtggctgcaccacttccagggtttattccctggtgccaccagccttcctgtgggccccttagcaatgtcttaggaaaggagatcaacattttcaaattagatgtttcaactgtgctcttgttttgtcttgaaagtggcaccagaggtgcttctgcctgtgcagcgggtgctgctggtaacagtggctgcttctctctctctctctcttttttgggggctcatttttgctgttttgattcccgggcttaccaggtgagaagtgagggaggaagaaggcagtgtcccttttgctagagctgacagctttgttcgcgtgggcagagccttccacagtgaatgtgtctggacctcatgttgttgaggctgtcacagtcctgagtgtggacttggcaggtgcctgttgaatctgagctgcaggttccttatctgtcacacctgtgcctcctcagaggacagtttttttgttgttgtgtttttttgtttttttttttttggtagatgcatgacttgtgtgtgatgagagaatggagacagagtccctggctcctctactgtttaacaacatggctttcttattttgtttgaattgttaattcacagaatagcacaaactacaattaaaactaagcacaaagccattctaagtcattggggaaacggggtgaacttcaggtggatgaggagacagaatagagtgataggaagcgtctggcagatactccttttgccactgctgtgtgattagacaggcccagtgagccgcggggcacatgctggccgctcctccctcagaaaaaggcagtggcctaaatcctttttaaatgacttggctcgatgctgtgggggactggctgggctgctgcaggccgtgtgtctgtcagcccaaccttcacatctgtcacgttctccacacgggggagagacgcagtccgcccaggtccccgctttctttggaggcagcagctcccgcagggctgaagtctggcgtaagatgatggatttgattcgccctcctccctgtcatagagctgcagggtggattgttacagcttcgctggaaacctctggaggtcatctcggctgttcctgagaaataaaaagcctgtcatttcaaacactgctgtggaccctactgggtttttaaaatattgtcagtttttcatcgtcgtccctagcctgccaacagccatctgcccagacagccgcagtgaggatgagcgtcctggcagagacgcagttgtctctgggcgcttgccagagccacgaaccccagacctgtttgtatcatccgggctccttccgggcagaaacaactgaaaatgcacttcagacccacttatttctgccacatctgagtcggcctgagatagacttttccctctaaactgggagaatatcacagtggtttttgttagcagaaaatgcactccagcctctgtactcatctaagctgcttatttttgatatttgtgtcagtctgtaaatggatacttcactttaataactgttgcttagtaattggctttgtagagaagctggaaaaaaatggttttgtcttcaactcctttgcatgccaggcggtgatgtggatctcggcttctgtgagcctgtgctgtgggcagggctgagctggagccgcccctctcagcccgcctgccacggcctttccttaaaggccatccttaaaaccagaccctcatggctaccagcacctgaaagcttcctcgacatctgttaataaagccgtaggcccttgtctaagtgcaaccgcctagactttctttcagatacatgtccacatgtccatttttcaggttctctaagttggagtggagtctgggaagggttgtgaatgaggcttctgggctatgggtgaggttccaatggcaggttagagcccctcgggccaactgccatcctggaaagtagagacagcagtgcccgctgcccagaagagaccagcaagccaaactggagcccccattgcaggctgtcgccatgtggaaagagtaactcacaattgccaataaagtctcatgtggttttatct

SEQ ID NO: 442 - DNA, 2630 bp, Homo sapiens
  source 1..2630: mol_type = genomic DNA
cccagaaggccgcggggggtggaccgcctaagagggcgtgcgctcccgacatgccccgcggcgcgccattaaccgccagatttgaatcgcgggacccgttggcagaggtggcggcggcggcatgggtgccccgacgttgccccctgcctggcagccctttctcaaggaccaccgcatctctacattcaagaactggcccttcttggagggctgcgcctgcaccccggagcggatggccgaggctggcttcatccactgccccactgagaacgagccagacttggcccagtgtttcttctgcttcaaggagctggaaggctgggagccagatgacgaccccatagaggaacataaaaagcattcgtccggttgcgctttcctttctgtcaagaagcagtttgaagaattaacccttggtgaatttttgaaactggacagagaaagagccaagaacaaaattgcaaaggaaaccaacaataagaagaaagaatttgaggaaactgcggagaaagtgcgccgtgccatcgagcagctggctgccatggattgaggcctctggccggagctgcctggtcccagagtggctgcaccacttccagggtttattccctggtgccaccagccttcctgtgggccccttagcaatgtcttaggaaaggagatcaacattttcaaattagatgtttcaactgtgctcttgttttgtcttgaaagtggcaccagaggtgcttctgcctgtgcagcgggtgctgctggtaacagtggctgcttctctctctctctctcttttttgggggctcatttttgctgttttgattcccgggcttaccaggtgagaagtgagggaggaagaaggcagtgtcccttttgctagagctgacagctttgttcgcgtgggcagagccttccacagtgaatgtgtctggacctcatgttgttgaggctgtcacagtcctgagtgtggacttggcaggtgcctgttgaatctgagctgcaggttccttatctgtcacacctgtgcctcctcagaggacagtttttttgttgttgtgtttttttgtttttttttttttggtagatgcatgacttgtgtgtgatgagagaatggagacagagtccctggctcctctactgtttaacaacatggctttcttattttgtttgaattgttaattcacagaatagcacaaactacaattaaaactaagcacaaagccattctaagtcattggggaaacggggtgaacttcaggtggatgaggagacagaatagagtgataggaagcgtctggcagatactccttttgccactgctgtgtgattagacaggcccagtgagccgcggggcacatgctggccgctcctccctcagaaaaaggcagtggcctaaatcctttttaaatgacttggctcgatgctgtgggggactggctgggctgctgcaggccgtgtgtctgtcagcccaaccttcacatctgtcacgttctccacacgggggagagacgcagtccgcccaggtccccgctttctttggaggcagcagctcccgcagggctgaagtctggcgtaagatgatggatttgattcgccctcctccctgtcatagagctgcagggtggattgttacagcttcgctggaaacctctggaggtcatctcggctgttcctgagaaataaaaagcctgtcatttcaaacactgctgtggaccctactgggtttttaaaatattgtcagtttttcatcgtcgtccctagcctgccaacagccatctgcccagacagccgcagtgaggatgagcgtcctggcagagacgcagttgtctctgggcgcttgccagagccacgaaccccagacctgtttgtatcatccgggctccttccgggcagaaacaactgaaaatgcacttcagacccacttatttctgccacatctgagtcggcctgagatagacttttccctctaaactgggagaatatcacagtggtttttgttagcagaaaatgcactccagcctctgtactcatctaagctgcttatttttgatatttgtgtcagtctgtaaatggatacttcactttaataactgttgcttagtaattggctttgtagagaagctggaaaaaaatggttttgtcttcaactcctttgcatgccaggcggtgatgtggatctcggcttctgtgagcctgtgctgtgggcagggctgagctggagccgcccctctcagcccgcctgccacggcctttccttaaaggccatccttaaaaccagaccctcatggctaccagcacctgaaagcttcctcgacatctgttaataaagccgtaggcccttgtctaagtgcaaccgcctagactttctttcagatacatgtccacatgtccatttttcaggttctctaagttggagtggagtctgggaagggttgtgaatgaggcttctgggctatgggtgaggttccaatggcaggttagagcccctcgggccaactgccatcctggaaagtagagacagcagtgcccgctgcccagaagagaccagcaagccaaactggagcccccattgcaggctgtcgccatgtggaaagagtaactcacaattgccaataaagtctcatgtggttttatct

SEQ ID NO: 443 - DNA, 2512 bp, Homo sapiens
  source 1..2512: mol_type = genomic DNA
cccagaaggccgcggggggtggaccgcctaagagggcgtgcgctcccgacatgccccgcggcgcgccattaaccgccagatttgaatcgcgggacccgttggcagaggtggcggcggcggcatgggtgccccgacgttgccccctgcctggcagccctttctcaaggaccaccgcatctctacattcaagaactggcccttcttggagggctgcgcctgcaccccggagcggatggccgaggctggcttcatccactgccccactgagaacgagccagacttggcccagtgtttcttctgcttcaaggagctggaaggctgggagccagatgacgaccccatgcaaaggaaaccaacaataagaagaaagaatttgaggaaactgcggagaaagtgcgccgtgccatcgagcagctggctgccatggattgaggcctctggccggagctgcctggtcccagagtggctgcaccacttccagggtttattccctggtgccaccagccttcctgtgggccccttagcaatgtcttaggaaaggagatcaacattttcaaattagatgtttcaactgtgctcttgttttgtcttgaaagtggcaccagaggtgcttctgcctgtgcagcgggtgctgctggtaacagtggctgcttctctctctctctctcttttttgggggctcatttttgctgttttgattcccgggcttaccaggtgagaagtgagggaggaagaaggcagtgtcccttttgctagagctgacagctttgttcgcgtgggcagagccttccacagtgaatgtgtctggacctcatgttgttgaggctgtcacagtcctgagtgtggacttggcaggtgcctgttgaatctgagctgcaggttccttatctgtcacacctgtgcctcctcagaggacagtttttttgttgttgtgtttttttgtttttttttttttggtagatgcatgacttgtgtgtgatgagagaatggagacagagtccctggctcctctactgtttaacaacatggctttcttattttgtttgaattgttaattcacagaatagcacaaactacaattaaaactaagcacaaagccattctaagtcattggggaaacggggtgaacttcaggtggatgaggagacagaatagagtgataggaagcgtctggcagatactccttttgccactgctgtgtgattagacaggcccagtgagccgcggggcacatgctggccgctcctccctcagaaaaaggcagtggcctaaatcctttttaaatgacttggctcgatgctgtgggggactggctgggctgctgcaggccgtgtgtctgtcagcccaaccttcacatctgtcacgttctccacacgggggagagacgcagtccgcccaggtccccgctttctttggaggcagcagctcccgcagggctgaagtctggcgtaagatgatggatttgattcgccctcctccctgtcatagagctgcagggtggattgttacagcttcgctggaaacctctggaggtcatctcggctgttcctgagaaataaaaagcctgtcatttcaaacactgctgtggaccctactgggtttttaaaatattgtcagtttttcatcgtcgtccctagcctgccaacagccatctgcccagacagccgcagtgaggatgagcgtcctggcagagacgcagttgtctctgggcgcttgccagagccacgaaccccagacctgtttgtatcatccgggctccttccgggcagaaacaactgaaaatgcacttcagacccacttatttctgccacatctgagtcggcctgagatagacttttccctctaaactgggagaatatcacagtggtttttgttagcagaaaatgcactccagcctctgtactcatctaagctgcttatttttgatatttgtgtcagtctgtaaatggatacttcactttaataactgttgcttagtaattggctttgtagagaagctggaaaaaaatggttttgtcttcaactcctttgcatgccaggcggtgatgtggatctcggcttctgtgagcctgtgctgtgggcagggctgagctggagccgcccctctcagcccgcctgccacggcctttccttaaaggccatccttaaaaccagaccctcatggctaccagcacctgaaagcttcctcgacatctgttaataaagccgtaggcccttgtctaagtgcaaccgcctagactttctttcagatacatgtccacatgtccatttttcaggttctctaagttggagtggagtctgggaagggttgtgaatgaggcttctgggctatgggtgaggttccaatggcaggttagagcccctcgggccaactgccatcctggaaagtagagacagcagtgcccgctgcccagaagagaccagcaagccaaactggagcccccattgcaggctgtcgccatgtggaaagagtaactcacaattgccaataaagtctcatgtggttttatct

SEQ ID NO: 444 - DNA, 476 bp, Homo sapiens
  source 1..476: mol_type = genomic DNA
agatttgaatcgcgggacccgttggcagaggtggcggcggcggcatgggtgccccgacgttgccccctgcctggcagccctttctcaaggaccaccgcatctctacattcaagaactggcccttcttggagggctgcgcctgcaccccggagcggatggccgaggctggcttcatccactgccccactgagaacgagccagacttggcccagtgtttcttctgcttcaaggagctggaaggctgggagccagatgacgaccccattgggccgggcacggtggcttacgcctgtaataccagcactttgggaggccgaggcgggcggatcacgagagaggaacataaaaagcattcgtccggttgcgctttcctttctgtcaagaagcagtttgaagaattaacccttggtgaatttttgaaactggacagagaaagagccaagaacaaaattgagagagctctgttagcagaatga

SEQ ID NO: 445 - DNA, 15703 bp, Homo sapiens
  source 1..15703: mol_type = genomic DNA
tccctgcttctccccctctcccgtcagcctccctccgagtttggcccctccggccgggcgatcgacgttccgcgtgcgtgcgggcgcctgacttcacttccggctaacgcgctcggcttgccccctggccccggatggtgactggtggtggtgctgcacctcccgggactgtcactgagccgcttcccagtgtgattgtgctgagcgcaggccggaagatggcggctgcggctgcggcggcctcgggccccggctgctcctcggcggcgggggcgggggcggccggggtctcagagtggctggtgctgcgggacggctgcatgcactgcgacgccgacgggctgcacagcctgtcctaccaccctgcgctcaacgccatcctggccgtcactagccgcgggaccatcaaagtcatcgacggcacctcgggggccacactgcaggcctccgcgctcagtgctaaaccaggtggacaggtgaaatgtcagtatatctctgctgtggataaagttatatttgtggatgattatgcagtagggtgtaggaaggaccttaatggaatcttgttgttagacactgctctgcaaactccagtttcaaagcaggatgatgtggttcagcttgaattacccgttacagaggcacagcagctcttatcagcatgtttagaaaaggtagatatttctagtacagagggttatgatttgttcatcacacagctcaaagatggtttaaaaaatacatctcatgagactgcagcaaaccacaaagttgctaagtgggccacagttacatttcatcttcctcatcatgtgttgaagtccattgccagtgccattgtaaatgaactcaagaaaataaatcaaaatgttgctgccttacctgtggcgtcctcagtgatggacagattgtcttacctcttacctagtgcacgtccagaactcggagtggggccaggccgttctgtagacagatcactgatgtatagtgaagctaacagacgggagacatttacctcatggcctcatgtaggctataggtgggcacaaccagatcccatggctcaagctggattttatcatcagcctgcctcatctggagatgatagagccatgtgttttacttgtagtgtatgcctcgtttgttgggaacctactgatgaaccttggtctgaacacgaaagacattccccaaactgcccatttgtgaaaggtgagcacacacagaatgtgccattgtcagtcactcttgcaacaagtcctgcacagtttccttgtacggatggaactgacagaatatcttgctttgggtcggggagctgccctcattttctagctgctgcaactaaacgaggaaagatctgcatatgggatgtttccaaacttatgaaggtgcacttaaagtttgaaattaatgcctatgatccagcaattgtacaacagcttattctatcaggagacccaagctcaggagttgattcaaggagaccaactttggcgtggctggaggactcctctagttgctcagatataccaaaattggaaggagatagtgatgatttactggaggattcagacagtgaagagcattccagatcagattctgtgacagggcatacatcacagaaggaagccatggaagtaagccttgatataacagcactcagcattctccaacagccagaaaaacttcagtgggagattgttgcaaatgtgcttgaagatactgttaaggatcttgaagaacttggggcaaatccttgtttaacaaactctaagagtgaaaagacaaaggaaaagcaccaggagcaacacaacattccttttccatgtttattagctggaggtttattaacatataaatctcctgctacctcacccattagtagtaattctcacaggtcactggatggtttaagcagaactcagggtgaaagtatatcagaacaagggtcaactgacaatgaatcctgcactaattcagaactaaattctcctctggtaaggaggactttaccggttttgcttctttatagcatcaaggaatctgatgagaaagcaggaaagatcttttcacagatgaacaatattatgagtaaaagtttgcatgatgatggttttactgttccacagattattgaaatggagctggatagtcaggagcagttgttattgcaggatcctcctgtgacttacattcagcaatttgcagatgcagcagccaaccttacctctccggattctgagaagtggaactctgtgtttcccaagcctgggactttggttcagtgcttgaggctgccaaagtttgcagaggaggagaatctttgtatagactcaataactccttgtgctgacggaattcatttgttggtaggactgcggacatgccctgttgaatccttgagtgcaataaatcaagtagaggccttgaataatttaaataaattaaactctgcactatgtaatagacggaaaggtgagctggaatcaaatcttgctgtagtgaatggtgcaaatattagtgtaatccaacatgaatcaccagcagatgtacagactcctttaataattcagcctgagcagaggaatgttagtggtggatatttagtgctttataaaatgaattatgccactcggatagtgactttagaagaggagccaataaaaatacaacatatcaaagatccccaggacacaattacctcgctcattttgcttccacccgatatattggataatcgagaggatgactgtgaggaacctattgaggacatgcagttaacctcaaagaatggttttgagagagaaaaaacgtctgacatttctactcttggacacctggtaataaccactcagggaggatatgtaaaaatactagatctttcaaactttgaaattttggccaaagtggagcctcccaaaaaggagggcactgaggaacaggacacatttgtttctgtgatttactgttctggcacagacaggctgtgtgcatgcaccaaaggtggtgagcttcattttctccaaattggaggaacctgtgatgatattgatgaagctgatatactagtggatggatctctttctaaaggaatagaaccatcttcagaaggttccaaacctttatcaaatccttcaagtcctggcatttcaggagttgatttattggtggaccagccattcacccttgaaatcttgacatccctagtggagctaacccgctttgagactttgactccaaggttttcagcgactgttcctccatgctgggtagaagttcaacaagaacagcagcaaaggaggcatcctcaacatttgcatcagcaacaccatggtgatgctgctcagcatactcgaacttggaaactacagaccgacagcaacagctgggatgaacatgtatttgaattagtactacctaaagcttgtatggttggacatgtggacttcaaattcgttttgaactcaaacatcaccaatattccacagatacaagtgacactgctgaaaaataaagctccaggattagggaaagtcaatgctcttaacattgaagtggaacaaaatgggaaaccgtccctggttgatttgaatgaagaaatgcagcacatggatgtagaggaatcacagtgtcttagattatgtccatttttggaggatcataaagaagacattctatgtgggccagtatggcttgctagtggccttgatctatcagggcatgctggaatgttgacgttaacaagccccaaacttgttaaaggtatggcaggaggaaaatatcgttcgtttttaatccatgtcaaggcagtgaatgaaagaggaacagaagagatttgtaatggtggtatgcgtcctgtagtaaggcttccatccctaaaacaccagagtaacaagggttattcacttgcttcacttttggctaaagttgcagcaggcaaggaaaaatcatctaatgttaagaatgaaaatacaagtggcacccgtaaatctgaaaacctccggggctgtgatttacttcaagaggtctcagtcaccattcgaagatttaagaaaacctcaatttctaaggaaagagtgcaacgatgtgccatgttacagttttcagaatttcatgagaagcttgttaatactctttgcagaaaaacagatgatggccagatcacagaacatgcccagagccttgtgttggatactctctgttggttagctggagttcattcaaatggacccggaagctcaaaggaaggaaatgagaacctactttcaaaaacacgaaaatttctgtcagacatcgtacgtgtttgcttctttgaggcaggacgaagtatagcccataagtgtgcccgatttctagccttgtgcattagtaatggcaaatgtgacccatgtcaaccagcatttggacctgttctgttgaaggctttacttgataatatgtcatttttacctgcagcaacaactggtggttctgtctattggtattttgtcttactgaattatgtgaaagatgaagatctggctggatgcagtacagcttgtgcatctttgcttactgcagtgtccagacagttacaggacaggctaacaccaatggaggctttacttcagacaagatatggattatatagctcaccatttgatccagtcctctttgatttggagatgagtggctcttcttgtaaaaatgtttataacagcagcattggtgtccagtcagatgaaattgatttatcagatgtcctttcaggaaatggaaaggtcagtagttgcacagctgctgagggtagtttcacatctctcactggacttttggaagttgaacctctgcactttacttgtgtgtcaactagtgatggaaccagaatagaaagggatgatgcaatgagttccttcggggttactcctgcagtaggtggactatcatctgggacagttggggaagcctcgacagccctgagttcagcagcccaggtagctttgcagtctctctctcatgcaatggcttcagccgagcaacagctacaggtgctgcaagagaaacagcagcagcttttgaagcttcagcaacagaaagcaaagctggaagccaagttacatcagacaacagctgcagcagctgcagcagcatcagcagtaggtcctgttcacaactctgtgccttccaacccagtggctgcccctggattcttcattcatccatctgatgttattccacccactccaaaaacaacacctctttttatgactccaccactcactccacccaatgaagcagtttccgttgtgattaatgccgaacttgcacagcttttcccaggctcagtcattgatcccccagcagtcaatcttgctgcacataacaaaaattccaacaagtccagaatgaatccacttggttctggtctagcccttgcaatttctcatgcttcacattttcttcaacctccgcctcaccagtccattattatagagcgaatgcattcaggagcaagaagatttgtgaccttggattttgggaggcctatattgttgactgatgtattgattcccacttgtggagacttggcctctttgtcaattgacatttggacattaggagaagaggtggatggaaggcggttggtagtggcaactgatataagcactcattcactaattcttcatgacttaataccacctcccgtgtgcagattcatgaagatcactgttattggacgttacgggagtacaaatgccagagccaaaatcccattaggattttactatggtcatacctacatcttgccttgggaaagtgaactgaagttaatgcatgatcctctaaagggagagggagaatctgcaaaccagccagaaattgaccagcatttagcaatgatggttgctttgcaggaggatatacagtgcaggtataacttggcttgtcatcgtctggaaacccttttgcaaagtattgatcttcctcctctaaacagtgctaacaatgcacagtactttttacgaaaaccagataaggcagttgaggaagacagtagggttttttctgcttatcaagattgtattcagctacagcttcaactaaatttggctcataatgcagtgcagaggctcaaagtggcgctaggtgcaagccggaagatgttgagtgaaacatcaaatccagaagatttaattcagacatcttccacagagcagttacgtactatcatcagatatttactggacactttgctcagcctgcttcatgcttctaatggacactctgttcctgcagttttgcagagcacatttcatgcccaggcctgtgaagagctctttaaacacttgtgcatcagtggaaccccaaagatacggttacatactggtcttcttcttgttcaactgtgtggtggtgaaaggtggtggggtcaatttctttctaatgtccttcaggaattgtacaattcggaacagcttctcatctttccacaggatagggtcttcatgttactttcctgcattggtcaaagatcacttagtaatagtggagtattagaaagcttacttaatctcttggataatttattgtcacctcttcagccacagttacccatgcataggaggacagaaggagtactagatattcccatgatcagttgggttgttatgctggtgtccaggttgctggattatgtggcaactgttgaagatgaagcagcagctgcaaagaaacctttgaatggtaatcagtggagttttattaacaataatctacacactcagagcttaaatagatcttctaaaggcagcagtagccttgatagattatattccagaaaaatcagaaagcagcttgttcatcataaacagcaacttaacctactaaaagcaaagcagaaggcattggtagaacagatggaaaaagaaaaaatacaaagtaacaaaggatcatcatataaactcctggtagaacaagcaaaactaaagcaggccacttcaaagcactttaaggatttaattcgtttacgtcggacagcagaatggtcccgttctaatttagacacagaagttacaacagcaaaagaaagtcctgagatagaaccacttccatttactctggcccatgagcgttgtatctcagtagtccagaaacttgttctgtttcttctctccatggactttacatgtcatgcagatctcttattgtttgtttgtaaggttcttgcacgcattgcaaatgccacgaggccaactattcatctgtgtgagattgtgaacgaaccccagctggaaagactgctgttacttttggttggaactgacttcaatagaggagatatatcttggggtggtgcttgggctcagtattccttaacttgcatgctacaagatattttagcaggagaattactggctccagtagccgcagaagccatggaggaaggaacagtgggtgatgatgtaggtgcgacagctggtgactctgatgactcccttcaacagtcctcagttcagttgctggaaactatagatgaacctttgacacatgacataacaggtgcacctcctctgtcctctttggaaaaagataaagaaattgaccttgagttacttcaggatctaatggaagttgacattgatcctttagatattgatttggaaaaggaccctcttgcagccaaggtttttaagccaataagcagtacatggtatgattattggggtgctgattatgggacctacaattacaacccttacattggaggtctgggaattcctgtagcaaagccaccagcaaacacggagaagaacggatcacagacagttagcgtttcagtctctcaggccctggatgctcgcctagaagttggacttgaacagcaagcagaactgatgttgaaaatgatgtctactctggaggcagattccattttacaggcattaacaaatacatctcctacattatcacagtctcccactggaacagatgattcacttctagggggtttacaagcagcaaaccaaaccagccagcttattatacagttatcatctgtcccaatgttaaatgtttgtttcaacaaacttttttccatgcttcaagtccatcatgttcagttggagtcacttctccaattgtggctcacactgagcctgaattctagttcaactggaaacaaagaaaatggagcagacatatttttatataatgctaataggatacctgttatttcattaaatcaagcatcaataactagctttctcacagtgttagcttggtatcccaatactttgctccggacatggtgccttgtgcttcatagcctaacactcatgacaaacatgcagcttaattctggttccagcagtgccattggaactcaggagagtactgctcatttgttggtttcagatccaaacctaattcatgtattagtgaaatttctttctggcaccagtccacatggaacaaatcaacacagtccacaggttggtcctacagctacacaagctatgcaagaatttcttactcgattacaagtgcatctttcttcaacatgtcctcagatattcagtgaatttttgctcaagctaattcatatactttcaactgaaaggggtgctttccagacaggccaaggacctctcgatgcccaagtgaagctcttagaattcactctggagcagaattttgaagtcgtttcagttagtactatttctgccgtgatagaatcggttacatttttagtgcaccactatatcacttgctcagacaaagtaatgtcaagaagtggatcagatagctccgtgggtgctcgagcatgctttgggggactctttgccaatcttattcgtccgggtgatgcaaaagcagtttgtggcgaaatgacaagagatcaactcatgtttgatttgttaaaacttgttaacattttagtgcagctgcctctttcaggcaatagggaatacagtgcaagagtgtctgtgaccacaaatacaacagatagtgtttcagatgaagaaaaagtctcaggaggcaaagatggcaatggaagcagtaccagtgttcaaggatcgcctgcatatgttgctgacttagtcttagccaaccaacaaattatgagccagattttgtctgctctgggcctgtgtaatagcagtgccatggcaatgataattggagcaagtggattacatctcactaaacatgaaaactttcatggtgggttggatgccatatcagttggggatggattatttaccatactgacaacccttagtaaaaaagcttctacagtccacatgatgctgcagccaattttaacatacatggcctgtggatatatgggcagacaaggctctcttgctacttgccagttatctgagccattattgtggttcattttgagagtattggatactagtgatgccttgaaagcatttcatgatatgggtggtgttcagctcatatgcaataatatggttactagtacaagggctattgtgaacactgcaagaagtatggtatcaactattatgaaatttcttgactctggtccaaataaagctgttgacagcacattgaaaacaagaatactagcttctgagcctgacaatgctgaagggattcataactttgcacccctcggtacaatcacatctagcagtcctactgcccaaccagctgaagtgctattgcaggccacacctcctcacagaagagctcgctctgctgcttggtcctacatctttcttccagaggaggcttggtgtgaccttaccattcaccttcctgcagcagtgctgcttaaggagatacatatccagcctcatcttgcatctcttgcaacctgcccttcctcagtgtctgttgaagtaagtgcagatggggtaaatatgctacctttgtccactcctgttgtcacaagtggcctcacctacataaaaattcagcttgtaaaagccgaagtagcttctgctgtctgccttagactacatcgtccacgggatgccagcacattaggcctttcacaaattaaattattggggctcactgcttttggtaccacctcttctgcaacagttaataatccattccttccatctgaagatcaggtatccaaaacaagtattggatggttacggttattacatcattgccttactcacataagtgatctagaaggaatgatggcaagtgcagctgcacctactgctaatctgctgcagacttgtgcggccttattgatgtcaccttactgtggaatgcattcacccaacatcgaggttgtgcttgtaaagataggactgcagtctactagaattggcctgaagctcatagacattctcctgagaaattgtgcagcatcaggcagtgatcctacagatttgaatagtcctttactttttggaagactaaatggactctcttctgactctacgatagatattctttaccagcttggaacaactcaggatcctggtacaaaagacagaattcaggccttgttaaaatgggttagtgattctgcaagagtggctgctatgaagagaagtggcaggatgaactacatgtgtcctaactcctcaacagtagagtatggtcttctgatgccatctccttctcatttgcactgtgtagcagccattctgtggcatagttatgagctgcttgtagaatatgacttaccagcactcctggaccaagagctctttgagttactttttaattggtccatgtctcttccctgcaatatggttttgaagaaagctgttgacagtctactttgctcaatgtgtcacgtacacccaaactatttttctttgctcatgggctggatgggaattacccctcctccagtgcaatgtcatcatagactgtccatgacagatgatagcaaaaagcaggatcttagttcatctttaacagatgactctaaaaatgcacaagcacctctcgcattaactgaatcacatttggctacccttgcttcctcttctcaatctcctgaagctattaaacaattactagactcaggtttgccttctcttcttgtgaggagtctggctagtttctgctttagccacatttctagctcagaaagcattgcccagtcaatagatatttcccaggacaaactcaggcgccatcatgtcccacaacaatgtaataagatgcctatcacagccgacctagttgctcctattcttaggtttttgacagaagttggcaatagccatattatgaaagattggcttggtggttctgaagtcaatccactatggacagcacttctgtttttattgtgtcactctgggtccacttctggaagccataatttaggtgcacaacagaccagtgcaagatcagcttctctttcttcagctgctacaacaggactgactactcaacagcgcacagcaattgagaatgcaactgttgcgttctttctacagtgcatttcatgccatcctaataatcaaaagctgatggcacaggttctttgtgaactatttcagacatctcctcaaagagggaaccttccaacatctgggaacatttcagggtttatacgaagattatttttacagttgatgctggaagatgagaaagtgacaatgtttcttcagtctccatgtccactgtacaaaggtagaattaatgctactagccacgtcatccagcatccaatgtatggagcaggccacaaattccgtactcttcatttgccagtctcaacaacattatcagatgttcttgacagagtgtcagatactccaagtatcacagctaaattaattagtgaacaaaaagatgacaaagaaaagaaaaaccatgaagagaaagaaaaagttaaagcggaaaatggatttcaagacaattacagtgttgttgttgcctctgggctgaagtctcaatctaaacgtgctgtgtcagctacaccacctcgcccaccatccaggagggggaggacaatacctgataaaataggaagtacttcaggagcagaggctgccaacaaaataattactgtcccagtgtttcacctgtttcacaaactcttggcaggccagccattgccagctgaaatgacacttgcccagcttttaactctcctatatgaccgaaaacttcctcagggttaccgctcaatagatctgactgttaaattgggatcaagagttataacagaccccagtctatcaaaaacagattcttataaaagactacaccctgaaaaagatcatggagacttacttgctagctgtccagaagatgaggctctcactccaggtgatgaatgcatggatgggatactggatgaatctttgcttgaaacctgtccaattcagtcaccattacaagtttttgcaggaatgggtggactggctcttattgctgaaagactacccatgctatatccagaagtaattcaacaggtgagtgctccagttgtaacatctaccactcaggaaaagccgaaggatagcgatcagtttgaatgggtgaccattgaacagtcaggggagttagtttatgaagcaccagaaactgttgcggctgaacctccacctatcaagtcagcagtacagaccatgtctcccatacctgcccattctttggctgcttttggattatttcttcgtcttccgggctatgcggaagtgctactgaaagagagaaaacatgcccagtgccttcttcgattggtattgggagtgacagatgatggagaaggaagtcatattcttcaatctccatcagccaatgtgcttccaacccttcctttccacgtccttcgtagcttgtttagcactacacctttgacaactgatgatggtgtacttctaaggcggatggcattggaaattggagccttacacctcattcttgtctgtctctctgctttgagccaccattccccacgagttccaaactctagcgtgaatcaaactgagccacaggtgtcaagctctcataaccctacatcaacagaagaacaacagttatattgggccaaagggactggctttggaacaggctctacagcttctgggtgggatgtggaacaagccttaactaagcaaaggctggaagaggaacatgttacctgccttctgcaggttcttgccagttacataaatcccgtcagtagtgcggtaaatggagaagctcagtcatctcatgagactagagggcagaacagtaatgcccttccttctgtacttctcgagcttctcagtcagtcctgcctcatcccagccatgtcatcttatctacgaaatgattcagttctggacatggcaagacatgtgccactctatcgggcactgctggaattgcttcgggccattgcttcttgtgctgccatggtgcccctattgttgcccctttctacagagaacggtgaagaggaagaagaacagtcagaatgtcaaacttctgttggtacattgttagccaaaatgaagacctgtgttgatacctataccaaccgtttaagatctaaaagggaaaatgttaaaacaggagtaaaaccagatgcgtctgatcaagaaccagaaggacttactcttttggtaccagacatccaaaagactgctgagatagtttatgcagccaccaccagtttgcggcaagcaaatcaggaaaaaaaactgggtgaatactccaagaaggcggctatgaaacccaaacctttgtcagtattaaagtcacttgaagaaaaatatgtggctgttatgaagaaattacagtttgatacgtttgaaatggtttctgaagatgaagatgggaaattgggatttaaagtaaattaccactacatgtctcaggtgaaaaatgctaatgatgcgaacagtgctgccagagctcgccgccttgcccaggaagctgtgacgctttcaacctcactgcctctgtcttcatcctctagtgtgtttgtacgctgtgatgaggagcgacttgatatcatgaaggttctaataactggtccagcggacaccccttatgcaaatggctgctttgagtttgatgtgtattttcctcaagattatcccagttcaccccctcttgtgaatctagagacaactggtggtcatagcgtgcgattcaatccaaacctttataatgatggcaaggtttgtttaagcatcttaaacacgtggcatggaagaccagaagagaagtggaatcctcagacctcaagctttttgcaagtgttggtgtctgtccagtcccttatattagtagctgagccttattttaatgaaccgggatatgaacggtctagaggcactcccagtggcacacagagttctcgagaatatgatggaaacattcgacaagcaacagttaagtgggcaatgctagaacaaatcagaaacccttcaccatgttttaaagaggtaatacacaaacatttttacttgaaaagagttgagataatggcccaatgtgaggagtggattgcggatatccagcagtacagcagtgataagcgggtaggcaggactatgtctcaccatgcagcagctctcaagcgtcacactgctcagctccgcgaagagttgctgaaacttccctgccctgaaggcttggatcctgacactgacgatgccccagaggtgtgcagagccacaacaggtgctgaggagactctaatgcatgatcaggttaaacccagcagcagcaaagaactccccagtgacttccagttatgagctgcattgatgtggacttcatagacacaaaggcttcgaagcacaagccaaatatgtcaatatttgtatgtaagaaactaattatgtaataggtaatgaaactgaaactatactatgcccttaaggagatccagtttaattcaaggtgatcttttatttacctgtacaggagtgtaaacttttttgtgcttttatttttcaattgtgagaaccactgattggtatgttcaacaaatttgtgtatacaaagaaatggataaatcactgctatataagggaaactaccttaggaaagaatgtttactgaatgtttattttattttattttttttttactatagagtgaggggttgttaacaaagaatatatattggtcattcttacaactactatttaaagtcagcaacttttcactgaatttgatagattttatgtttggccatatcttcatgctcacatttgatttctgaagacctcctacatacacttcaataaaagttaaatggacatactccctcttttttgatttactggtacatttttaaaataataaatctgccataaaatgcattatatctggagacttgcacttgtatggatgaatttattacattcaacatatttaattttatgccttctaattctaagatgcagaaaaaaataaatgaacatgattttattctatgccaacatttgggcctctgaatgtatctgttatttgaatttaagtatttgaaaaggaatggtcaatttgaaagtcattctaaactgattttttttttctaaagggctccttttttcctggactatgtggttttatgactaaagtcacatgtatgtattaaacattgaggctctgtagaggagagaggatgtacctctctggtgctgttacagtacattctgtacctgccatacaggctcattttcatgcaaattcttcctagagccaaataaataaagacttaggtgaattagtatgtcttgtttctaaa

SEQ ID NO: 446 - DNA, 3188 bp, Homo sapiens
  source 1..3188: mol_type = genomic DNA
ctctgtggttcgggtccgctttcgtctccgtcctgctgccgttaccgccgctgctgccgccgcttgcgtcccccgctccggtctgtggtgcagccgggacccaggaccatgtctctgtctcgctcagaggagatgcaccggctcacggaaaatgtctataagaccatcatggagcagttcaaccctagcctccggaacttcatcgccatggggaagaattacgagaaggcactggcaggtgtgacgtatgcagccaaaggctactttgacgccctggtgaagatgggggagctggccagcgagagccagggctccaaagaactcggagacgttctcttccagatggctgaagtccacaggcagatccagaatcagctggaagaaatgctgaagtcttttcacaacgagctgcttacgcagctggagcagaaggtggagctggactccaggtatctgagtgctgcgctgaagaaataccagactgagcaaaggagcaaaggcgacgccctggacaagtgtcaggctgagctgaagaagcttcggaagaagagccagggcagcaagaatcctcagaagtactcggacaaggagctgcagtacatcgacgccatcagcaacaagcagggcgagctggagaattacgtgtccgacggctacaagaccgcactgacagaggagcgcaggcgcttctgcttcctggtggagaagcagtgcgccgtggccaagaactccgcggcctaccactccaagggcaaggagctgctggcgcagaagctgccgctgtggcaacaggcctgtgccgaccccagcaagatcccggagcgcgcggtgcagctcatgcagcaggtggccagcaacggcgccaccctccccagcgccctgtcggcctccaagtccaacctggtcatttccgaccccattccgggggccaagcccctgccggtgccccccgagctggcaccgttcgtggggcggatgtctgcccaggagagcacacccatcatgaacggcgtcacaggcccggatggcgaggactacagcccgtgggctgaccgcaaggctgcccagcccaaatccctgtctcctccgcagtctcagagcaagctcagcgactcctactccaacacactccccgtgcgcaagagcgtgaccccaaaaaacagctatgccaccaccgagaacaagactctgcctcgctcgagctccatggcagccggcctggagcgcaatggccgtatgcgggtgaaggccatcttctcccacgctgctggggacaacagcaccctcctgagcttcaaggagggtgacctcattaccctgctggtgcctgaggcccgcgatggctggcactacggagagagtgagaagaccaagatgcggggctggtttcccttctcctacacccgggtcttggacagcgatggcagtgacaggctgcacatgagcctgcagcaagggaagagcagcagcacgggcaacctcctggacaaggacgacctggccatcccaccccccgattacggcgccgcctcccgggccttccccgcccagacggccagcggcttcaagcagaggccctacagtgtggccgtgcccgccttctcccagggcctggatgactatggagcgcggtccatgagcagtggcagcggcacgctggtgtccacagtgtgaggacgctgaccccgggcagccgctgctctgaagagcttccgcgccttccccctggtctcgtccgttttcctcctcagctctcgctggtttgttcttgggttgtttttcttttccacctgccccatgccttttggttggtgaccccagactctgtgatcccccagggtccatggtgctgctccatccgccccccctcccctgtgtttacgcgccccatcctgtgtgtcccagccttttgagcagaaactgccaggcaggacctgctgggccgtgcggggcaccctcggcctcaccctgcagtgtctgtggcactcactgcttttctaaggctcgccgtgagccaggtctaaagtttgaagaaaaagaaaaatcttaaaaaaaaaaaaaaaaaaaaaaagaaaaaaagaaaaacaggaaaaaggactttttttttcctgaaaaacaaaaaccgatctgcatggactccggtgtgcgctgttatctcgcatccgacttccccggtgcgatggcctctgtccggacagggaaggtgctggggtccctggccgccccggcccctgtggaggggtgcacagagaaagggggctcgtgccaagctcgaggggcctcctgaggaagccggccgctcctgtgagggaggccgggcccgggcacctgagggcttctccctctggacactgcgggccaggtgtacatagagcagcgcggcacagtggcctcacctcccgtcgggcactggcgggagcaaggtcgggggcaggcgctgcccagctggccgcacacggacattccaaagacctccagagaccaccccacccccacattcctttgaccagccttgtgagggcatcgatgctgccccgggctacctggctgctctgggcagggtgtgcgggccgggcccggctgggggagggcagctctgggcacgccgcacccacgccccccacctgggggaaacaggcggttcctgcccggttcttcctaaacgctctcgtctttttgtgtgtcttggtgactttagaaacaaacacagtggactcagtggctactggtattgtctcttcccacactgaactctggggaattgagtgcagggcacagcccggctcagcctgcccgctggtgggagcccctgggaagctgcggcgctcctttatctgatgtggtttagtaaaagcctcccacacacctccccgtggcctgggacgtggctggtagtgtttgtgtgggaagcagctcaagacgcggaccgcgtgacattaaggagagctcaagggcggaccgggccctgtgtagagacccttccgcgccggcgttcccgctccgctaaagatttcaaatccaggggattccatgctcaatggatgaatgtagacacaaaacagcaacacttgtatgaagatgtaaagtgctgaacatatttttttcctgtttcctttccttttttttaaaaaatctgaattgtgccctgtactgcagttacttgtttgaataaaagttttatttattgc

SEQ ID NO: 447 - DNA, 2894 bp, Homo sapiens
  source 1..2894: mol_type = genomic DNA
ctctgtggttcgggtccgctttcgtctccgtcctgctgccgttaccgccgctgctgccgccgcttgcgtcccccgctccggtctgtggtgcagccgggacccaggaccatgtctctgtctcgctcagaggagatgcaccggctcacggaaaatgtctataagaccatcatggagcagttcaaccctagcctccggaacttcatcgccatggggaagaattacgagaaggcactggcaggtgtgacgtatgcagccaaaggctactttgacgccctggtgaagatgggggagctggccagcgagagccagggctccaaagaactcggagacgttctcttccagatggctgaagtccacaggcagatccagaatcagctggaagaaatgctgaagtcttttcacaacgagctgcttacgcagctggagcagaaggtggagctggactccaggtatctgagtgctgcgctgaagaaataccagactgagcaaaggagcaaaggcgacgccctggacaagtgtcaggctgagctgaagaagcttcggaagaagagccagggcagcaagaatcctcagaagtactcggacaaggagctgcagtacatcgacgccatcagcaacaagcagggcgagctggagaattacgtgtccgacggctacaagaccgcactgacagaggagcgcaggcgcttctgcttcctggtggagaagcagtgcgccgtggccaagaactccgcggcctaccactccaagggcaaggagctgctggcgcagaagctgccgctgtggcaacaggcctgtgccgaccccagcaagatcccggagcgcgcggtgcagctcatgcagcaggtggccagcaacggcgccaccctccccagcgccctgtcggcctccaagtccaacctggtcatttccgaccccattccgggggccaagcccctgccggtgccccccgagctggcaccgttcgtggggcggatgtctgcccaggagagcacacccatcatgaacggcgtcacaggcccggatggcgaggactacagcccgtgggctgaccgcaaggctgcccagcccaaatccctgtctcctccgcagtctcagagcaagctcagcgactcctactccaacacactccccgtgcgcaagagcgtgaccccaaaaaacagctatgccaccaccgagaacaagactctgcctcgctcgagctccatggcagccggcctggagcgcaatggccgtatgcgggtgaaggccatcttctcccacgctgctggggacaacagcaccctcctgagcttcaaggagggtgacctcattaccctgctggtgcctgaggcccgcgatggctggcactacggagagagtgagaagaccaagatgcggggctggtttcccttctcctacacccgggtcttggacagcgatggcagtgacaggctgcacatgagcctgcagcaagggaagagcagcagcacgggcaacctcctggacaaggacgacctggccatcccaccccccgattacggcgccgcctcccgggccttccccgcccagacggccagcggcttcaagcagaggccctacagtgtggccgtgcccgccttctcccagggcctggatgactatggagcgcggtccatgagcaggaatccctttgcccacgtccagctgaagccgacagtgaccaacgacaggtgtgatctgtccgcccaagggccagaaggccgggagcacggggatgggagcgcccgcaccctggctggaagatgaacttcccgtaagcacgtaattccctgcaggtccggcagctacacctggagtgtggggcctggtccctccccatgcccctcggtggggctctcctgggcccctcactcccactggcaatgtcacaagggcctccccaggcccctcctgcctcgggcaggccccagccctcctccttacccaacctcccatccagaaccttgctgccagggcctcccagctcgctcctgcggccaaaggccagctgtcaggtgctatgcggggtcaccagcagagtgcccgctggcaggtgggggcttccccgcttccggggtctgccccaggactcctgggtggacctcccccccccacctccgctgactcctgcaggcactggggagctctgctggaattgggggttttaaaacttcattagcagatttgtgctcttccatactgtttgtttgtttgttaggtgaaatacagtgtggtgagctgcactggtgacaacagcccttacctggctggggaggtgtctccagcagagctcactcccgcctacagccactcacaccccggggacaggaagctgtagagttggcgggccaggagggcagttgagagctggccagcggagggtgcagggaagcccagctgtgctcaactctcctgcctccgccttccaccctgggcccagggacagacagacattgccctcagaagggcagggaggaggctgtcctggagaggcctgtaggtccattcttcacccgtccctaccaggccaactcggcctgcaggaagggagacctgcagggcgctacccctgcgcccccacacacagtagggccagaacaccatcccctccaccggggtgtgccgaggacagtggggaggagaggagaggggcagcttcctcctggccccaggaagggctggcatcgggttcctggcacagcccctcctgtccaggactttatcatcggcagacctcagaagacaacacacaaaggtttcttttgtcttagcttcatttctcttaaaaaacaaggaacaagaaaacattgcaccagcgttctaagcctcaaacaaaacacaaaacaaatccccctgcgaagcaacaataaactttacatctctttggcaacaat

SEQ ID NO: 448 - DNA, 1686 bp, Homo sapiens
  source 1..1686: mol_type = genomic DNA
tgtggttcgggtccgctttcgtctccgtcctgctgccgttaccgccgctgctgccgccgcttgcgtcccccgctccggtctgtggtgcagccgggacccaggaccatgtctctgtctcgctcagaggagatgcaccggctcacggaaaatgtctataaggagacgttctcttccagatggctgaagtccacaggcagatccagaatcagctggaagaaatgctgaagtcttttcacaacgagctgcttacgcagctggagcagaaggtggagctggactccaggtatctgagtgctgcgctgaagaaataccagactgagcaaaggagcaaaggcgacgccctggacaagtgtcaggctgagctgaagaagcttcggaagaagagccagggcagcaagaatcctcagaagtactcggacaaggagctgcagtacatcgacgccatcagcaacaagcagggcgagctggagaattacgtgtccgacggctacaagaccgcactgacagaggagcgcaggcgcttctgcttcctggtggagaagcagtgcgccgtggccaagaactccgcggcctaccactccaagggcaaggagctgctggcgcagaagctgccgctgtggcaacaggcctgtgccgaccccagcaagatcccggagcgcgcggtgcagctcatgcagcaggtggccagcaacggcgccaccctccccagcgccctgtcggcctccaagtccaacctggtcatttccgaccccattccgggggccaagcccctgccggtgccccccgagctggcaccgttcgtggggcggatgtctgcccaggagagcacacccatcatgaacggcgtcacaggcccggatggcgaggactacagcccgtgggctgaccgcaaggctgcccagcccaaatccctgtctcctccgcagtctcagagcaagctcagcgactcctactccaacacactccccgtgcgcaagagcgtgaccccaaaaaacagctatgccaccaccgagaacaagactctgcctcgctcgagctccatggcagccggcctggagcgcaatggccgtatgcgggtgaaggccatcttctcccacgctgctggggacaacagcaccctcctgagcttcaaggagggtgacctcattaccctgctggtgcctgaggcccgcgatggctggcactacggagagagtgagaagaccaagatgcggggctggtttcccttctcctacacccgggtcttggacagcgatggcagtgacaggctgcacatgagcctgcagcaagggaagagcagcagcacgggcaacctcctggacaaggacgacctggccatcccaccccccgattacggcgccgcctcccgggccttccccgcccagacggccagcggcttcaagcagaggccctacagtgtggccgtgcccgccttctcccagggcctggatgactatggagcgcggtccatgagcaggaatccctttgcccacgtccagctgaagccgacagtgaccaacgacaggtctgcccccctcctcagctgatggccacatctgcagtgctgcccatctggtggcttcccccgcccttcccatgtagcctgttctgtcatcatctgtgcgttcctgtgtagagaacatccaggccccggctgcctggtcttgccccacttgagtctggcct

SEQ ID NO: 449 - DNA, 1442 bp, Homo sapiens
  source 1..1442: mol_type = genomic DNA
atgctcctcccagagggacagaggcagagagccctggggtttggaactgtcacttccacctacagccctgttggtcagtacatcgacgccatcagcaacaagcagggcgagctggagaattacgtgtccgacggctacaagaccgcactgacagaggagcgcaggcgcttctgcttcctggtggagaagcagtgcgccgtggccaagaactccgcggcctaccactccaagggcaaggagctgctggcgcagaagctgccgctgtggcaacaggcctgtgccgaccccagcaagatcccggagcgcgcggtgcagctcatgcagcaggtggccagcaacggcgccaccctccccagcgccctgtcggcctccaagtccaacctggtcatttccgaccccattccgggggccaagcccctgccggtgccccccgagctggcaccgttcgtggggcggatgtctgcccaggagagcacacccatcatgaacggcgtcacaggcccggatggcgaggactacagcccgtgggctgaccgcaaggctgcccagcccaaatccctgtctcctccgcagtctcagagcaagctcagcgactcctactccaacacactccccgtgcgcaagagcgtgaccccaaaaaacagctatgccaccaccgagaacaagactctgcctcgctcgagctccatggcagccggcctggagcgcaatggccgtatgcgggtgaaggccatcttctcccacgctgctggggacaacagcaccctcctgagcttcaaggagggtgacctcattaccctgctggtgcctgaggcccgcgatggctggcactacggagagagtgagaagaccaagatgcggggctggtttcccttctcctacacccgggtcttggacagcgatggcagtgacaggctgcacatgagcctgcagcaagggaagagcagcagcacgggcaacctcctggacaaggacgacctggccatcccaccccccgattacggcgccgcctcccgggccttccccgcccagacggccagcggcttcaagcagaggccctacagtgtggccgtgcccgccttctcccagggcctggatgactatggagcgcggtccatgagcaggtaaggggactttcagacctgtctttgggaccgtgggtgggtgtgaagaggccgggtggggcaggtccctctgctaggacctggggccacctcttttcctttagggcccagcctggcccttcacccctgtcagagccggggatgtcccttagggcgtcctgctttctccgagtgacacgggaacccccctgggccctgcccctctttcatcgcatctggccggccccatccatccctgtcaggcaaggttggggagggtagctgaggctggcatccatggctggggctgcagcctcctctgccccaatctgtgctccg

SEQ ID NO: 450 - DNA, 3306 bp, Homo sapiens
  source 1..3306: mol_type = genomic DNA
ctctgtggttcgggtccgctttcgtctccgtcctgctgccgttaccgccgctgctgccgccgcttgcgtcccccgctccggtctgtggtgcagccgggacccaggaccatgtctctgtctcgctcagaggagatgcaccggctcacggaaaatgtctataagaccatcatggagcagttcaaccctagcctccggaacttcatcgccatggggaagaattacgagaaggcactggcaggtgtgacgtatgcagccaaaggctactttgacgccctggtgaagatgggggagctggccagcgagagccagggctccaaagaactcggagacgttctcttccagatggctgaagtccacaggcagatccagaatcagctggaagaaatgctgaagtcttttcacaacgagctgcttacgcagctggagcagaaggtggagctggactccaggtatctgagtgctgcgctgaagaaataccagactgagcaaaggagcaaaggcgacgccctggacaagtgtcaggctgagctgaagaagcttcggaagaagagccagggcagcaagaatcctcagaagtactcggacaaggagctgcagtacatcgacgccatcagcaacaagcagggcgagctggagaattacgtgtccgacggctacaagaccgcactgacagaggagcgcaggcgcttctgcttcctggtggagaagcagtgcgccgtggccaagaactccgcggcctaccactccaagggcaaggagctgctggcgcagaagctgccgctgtggcaacaggcctgtgccgaccccagcaagatcccggagcgcgcggtgcagctcatgcagcaggtggccagcaacggcgccaccctccccagcgccctgtcggcctccaagtccaacctggtcatttccgaccccattccgggggccaagcccctgccggtgccccccgagctggcaccgttcgtggggcggatgtctgcccaggagagcacacccatcatgaacggcgtcacaggcccggatggcgaggactacagcccgtgggctgaccgcaaggctgcccagcccaaatccctgtctcctccgcagtctcagagcaagctcagcgactcctactccaacacactccccgtgcgcaagagcgtgaccccaaaaaacagctatgccaccaccgagaacaagactctgcctcgctcgagctccatggcagccggcctggagcgcaatggccgtatgcgggtgaaggccatcttctcccacgctgctggggacaacagcaccctcctgagcttcaaggagggtgacctcattaccctgctggtgcctgaggcccgcgatggctggcactacggagagagtgagaagaccaagatgcggggctggtttcccttctcctacacccgggtcttggacagcgatggcagtgacaggctgcacatgagcctgcagcaagggaagagcagcagcacgggcaacctcctggacaaggacgacctggccatcccaccccccgattacggcgccgcctcccgggccttccccgcccagacggccagcggcttcaagcagaggccctacagtgtggccgtgcccgccttctcccagggcctggatgactatggagcgcggtccatgagcaggaatccctttgcccacgtccagctgaagccgacagtgaccaacgacaggtctgcccccctcctcagctgatggccacatctgcagtgctgcccatctggtggcttcccccgcccttcccatgtagcctgttctgtcatcatctgtgcgttcctgtgtagagaacatccaggccccggctgcctggtcttgccccacttgagtctggcctggactggatcccagctgttctaggcagggccgggcagagtggggcgcaggcccctgaagggcgagacccagtggctgggctgcccagggctgaggggccgcctcttgagggtacacgcctctggtcacatggccatggagccttgggtacccctgagttaagggaggacatttggccagctggtggctgggaggggagcctggctgccctgctgcttctcctgcctaataaacaggcttctcctgcaccaggtgtgatctgtccgcccaagggccagaaggccgggagcacggggatgggagcgcccgcaccctggctggaagatgaacttcccgtaagcacgtaattccctgcaggtccggcagctacacctggagtgtggggcctggtccctccccatgcccctcggtggggctctcctgggcccctcactcccactggcaatgtcacaagggcctccccaggcccctcctgcctcgggcaggccccagccctcctccttacccaacctcccatccagaaccttgctgccagggcctcccagctcgctcctgcggccaaaggccagctgtcaggtgctatgcggggtcaccagcagagtgcccgctggcaggtgggggcttccccgcttccggggtctgccccaggactcctgggtggacctcccccccccacctccgctgactcctgcaggcactggggagctctgctggaattgggggttttaaaacttcattagcagatttgtgctcttccatactgtttgtttgtttgttaggtgaaatacagtgtggtgagctgcactggtgacaacagcccttacctggctggggaggtgtctccagcagagctcactcccgcctacagccactcacaccccggggacaggaagctgtagagttggcgggccaggagggcagttgagagctggccagcggagggtgcagggaagcccagctgtgctcaactctcctgcctccgccttccaccctgggcccagggacagacagacattgccctcagaagggcagggaggaggctgtcctggagaggcctgtaggtccattcttcacccgtccctaccaggccaactcggcctgcaggaagggagacctgcagggcgctacccctgcgcccccacacacagtagggccagaacaccatcccctccaccggggtgtgccgaggacagtggggaggagaggagaggggcagcttcctcctggccccaggaagggctggcatcgggttcctggcacagcccctcctgtccaggactttatcatcggcagacctcagaagacaacacacaaaggtttcttttgtcttagcttcatttctcttaaaaaacaaggaacaagaaaacattgcaccagcgttctaagcctcaaacaaaacacaaaacaaatccccctgcgaagcaacaataaactttacatctctttggcaacaat

SEQ ID NO: 451 - DNA, 3352 bp, Homo sapiens
  source 1..3352: mol_type = genomic DNA
ctctgtggttcgggtccgctttcgtctccgtcctgctgccgttaccgccgctgctgccgccgcttgcgtcccccgctccggtctgtggtgcagccgggacccaggaccatgtctctgtctcgctcagaggagatgcaccggctcacggaaaatgtctataagaccatcatggagcagttcaaccctagcctccggaacttcatcgccatggggaagaattacgagaaggcactggcaggtgtgacgtatgcagccaaaggctactttgacgccctggtgaagatgggggagctggccagcgagagccagggctccaaagaactcggagacgttctcttccagatggctgaagtccacaggcagatccagaatcagctggaagaaatgctgaagtcttttcacaacgagctgcttacgcagctggagcagaaggtggagctggactccaggtatctgagtgctgcgctgaagaaataccagactgagcaaaggagcaaaggcgacgccctggacaagtgtcaggctgagctgaagaagcttcggaagaagagccagggcagcaagaatcctcagaagtactcggacaaggagctgcagtacatcgacgccatcagcaacaagcagggcgagctggagaattacgtgtccgacggctacaagaccgcactgacagaggagcgcaggcgcttctgcttcctggtggagaagcagtgcgccgtggccaagaactccgcggcctaccactccaagggcaaggagctgctggcgcagaagctgccgctgtggcaacaggcctgtgccgaccccagcaagatcccggagcgcgcggtgcagctcatgcagcaggtggccagcaacggcgccaccctccccagcgccctgtcggcctccaagtccaacctggtcatttccgaccccattccgggggccaagcccctgccggtgccccccgagctggcaccgttcgtggggcggatgtctgcccaggagagcacacccatcatgaacggcgtcacaggcccggatggcgaggactacagcccgtgggctgaccgcaaggctgcccagcccaaatccctgtctcctccgcagtctcagagcaagctcagcgactcctactccaacacactccccgtgcgcaagagcgtgaccccaaaaaacagctatgccaccaccgagaacaagactctgcctcgctcgagctccatggcagccggcctggagcgcaatggccgtatgcgggtgaaggccatcttctcccacgctgctggggacaacagcaccctcctgagcttcaaggagggtgacctcattaccctgctggtgcctgaggcccgcgatggctggcactacggagagagtgagaagaccaagatgcggggctggtttcccttctcctacacccgggtcttggacagcgatggcagtgacaggctgcacatgagcctgcagcaagggaagagcagcagcacgggcaacctcctggacaaggacgacctggccatcccaccccccgattacggcgccgcctcccgggccttccccgcccagacggccagcggcttcaagcagaggccctacagtgtggccgtgcccgccttctcccagggcctggatgactatggagcgcggtccatgagcagcgccgatgtggaagtggccagattctgagccgcctgactagagttagaatccctttgcccacgtccagctgaagccgacagtgaccaacgacaggtctgcccccctcctcagctgatggccacatctgcagtgctgcccatctggtggcttcccccgcccttcccatgtagcctgttctgtcatcatctgtgcgttcctgtgtagagaacatccaggccccggctgcctggtcttgccccacttgagtctggcctggactggatcccagctgttctaggcagggccgggcagagtggggcgcaggcccctgaagggcgagacccagtggctgggctgcccagggctgaggggccgcctcttgagggtacacgcctctggtcacatggccatggagccttgggtacccctgagttaagggaggacatttggccagctggtggctgggaggggagcctggctgccctgctgcttctcctgcctaataaacaggcttctcctgcaccaggtgtgatctgtccgcccaagggccagaaggccgggagcacggggatgggagcgcccgcaccctggctggaagatgaacttcccgtaagcacgtaattccctgcaggtccggcagctacacctggagtgtggggcctggtccctccccatgcccctcggtggggctctcctgggcccctcactcccactggcaatgtcacaagggcctccccaggcccctcctgcctcgggcaggccccagccctcctccttacccaacctcccatccagaaccttgctgccagggcctcccagctcgctcctgcggccaaaggccagctgtcaggtgctatgcggggtcaccagcagagtgcccgctggcaggtgggggcttccccgcttccggggtctgccccaggactcctgggtggacctcccccccccacctccgctgactcctgcaggcactggggagctctgctggaattgggggttttaaaacttcattagcagatttgtgctcttccatactgtttgtttgtttgttaggtgaaatacagtgtggtgagctgcactggtgacaacagcccttacctggctggggaggtgtctccagcagagctcactcccgcctacagccactcacaccccggggacaggaagctgtagagttggcgggccaggagggcagttgagagctggccagcggagggtgcagggaagcccagctgtgctcaactctcctgcctccgccttccaccctgggcccagggacagacagacattgccctcagaagggcagggaggaggctgtcctggagaggcctgtaggtccattcttcacccgtccctaccaggccaactcggcctgcaggaagggagacctgcagggcgctacccctgcgcccccacacacagtagggccagaacaccatcccctccaccggggtgtgccgaggacagtggggaggagaggagaggggcagcttcctcctggccccaggaagggctggcatcgggttcctggcacagcccctcctgtccaggactttatcatcggcagacctcagaagacaacacacaaaggtttcttttgtcttagcttcatttctcttaaaaaacaaggaacaagaaaacattgcaccagcgttctaagcctcaaacaaaacacaaaacaaatccccctgcgaagcaacaataaactttacatctctttggcaacaat

SEQ ID NO: 452 - DNA, 6492 bp, Homo sapiens
  source 1..6492: mol_type = genomic DNA
tttctgtgaagcagaagtctgggaatcgatctggaaatcctcctaatttttactccctctccccgcgactcctgattcattgggaagtttcaaatcagctataactggagagtgctgaagattgatgggatcgttgccttatgcatttgttttggttttacaaaaaggaaacttgacagaggatcatgctgtacttaaaaaatacaacatcacagaggaagtagactgatattaacaatacttactaataataacgtgcctcatgaaataaagatccgaaaggaattggaataaaaatttcctgcatctcatgccaagggggaaacaccagaatcaagtgttccgcgtgattgaagacaccccctcgtccaagaatgcaaagcacatccaataaaatagctggattataactcctcttctttctctgggggccgtggggtgggagctggggcgagaggtgccgttggcccccgttgcttttcctctgggaaggatggcgcacgctgggagaacagggtacgataaccgggagatagtgatgaagtacatccattataagctgtcgcagaggggctacgagtgggatgcgggagatgtgggcgccgcgcccccgggggccgcccccgcaccgggcatcttctcctcccagcccgggcacacgccccatccagccgcatcccgggacccggtcgccaggacctcgccgctgcagaccccggctgcccccggcgccgccgcggggcctgcgctcagcccggtgccacctgtggtccacctgaccctccgccaggccggcgacgacttctcccgccgctaccgccgcgacttcgccgagatgtccagccagctgcacctgacgcccttcaccgcgcggggacgctttgccacggtggtggaggagctcttcagggacggggtgaactgggggaggattgtggccttctttgagttcggtggggtcatgtgtgtggagagcgtcaaccgggagatgtcgcccctggtggacaacatcgccctgtggatgactgagtacctgaaccggcacctgcacacctggatccaggataacggaggctgggatgcctttgtggaactgtacggccccagcatgcggcctctgtttgatttctcctggctgtctctgaagactctgctcagtttggccctggtgggagcttgcatcaccctgggtgcctatctgggccacaagtgaagtcaacatgcctgccccaaacaaatatgcaaaaggttcactaaagcagtagaaataatatgcattgtcagtgatgtaccatgaaacaaagctgcaggctgtttaagaaaaaataacacacatataaacatcacacacacagacagacacacacacacacaacaattaacagtcttcaggcaaaacgtcgaatcagctatttactgccaaagggaaatatcatttattttttacattattaagaaaaaaagatttatttatttaagacagtcccatcaaaactcctgtctttggaaatccgaccactaattgccaagcaccgcttcgtgtggctccacctggatgttctgtgcctgtaaacatagattcgctttccatgttgttggccggatcaccatctgaagagcagacggatggaaaaaggacctgatcattggggaagctggctttctggctgctggaggctggggagaaggtgttcattcacttgcatttctttgccctgggggctgtgatattaacagagggagggttcctgtggggggaagtccatgcctccctggcctgaagaagagactctttgcatatgactcacatgatgcatacctggtgggaggaaaagagttgggaacttcagatggacctagtacccactgagatttccacgccgaaggacagcgatgggaaaaatgcccttaaatcataggaaagtatttttttaagctaccaattgtgccgagaaaagcattttagcaatttatacaatatcatccagtaccttaagccctgattgtgtatattcatatattttggatacgcaccccccaactcccaatactggctctgtctgagtaagaaacagaatcctctggaacttgaggaagtgaacatttcggtgacttccgcatcaggaaggctagagttacccagagcatcaggccgccacaagtgcctgcttttaggagaccgaagtccgcagaacctgcctgtgtcccagcttggaggcctggtcctggaactgagccggggccctcactggcctcctccagggatgatcaacagggcagtgtggtctccgaatgtctggaagctgatggagctcagaattccactgtcaagaaagagcagtagaggggtgtggctgggcctgtcaccctggggccctccaggtaggcccgttttcacgtggagcatgggagccacgacccttcttaagacatgtatcactgtagagggaaggaacagaggccctgggcccttcctatcagaaggacatggtgaaggctgggaacgtgaggagaggcaatggccacggcccattttggctgtagcacatggcacgttggctgtgtggccttggcccacctgtgagtttaaagcaaggctttaaatgactttggagagggtcacaaatcctaaaagaagcattgaagtgaggtgtcatggattaattgacccctgtctatggaattacatgtaaaacattatcttgtcactgtagtttggttttatttgaaaacctgacaaaaaaaaagttccaggtgtggaatatgggggttatctgtacatcctggggcattaaaaaaaaaatcaatggtggggaactataaagaagtaacaaaagaagtgacatcttcagcaaataaactaggaaatttttttttcttccagtttagaatcagccttgaaacattgatggaataactctgtggcattattgcattatataccatttatctgtattaactttggaatgtactctgttcaatgtttaatgctgtggttgatatttcgaaagctgctttaaaaaaatacatgcatctcagcgtttttttgtttttaattgtatttagttatggcctatacactatttgtgagcaaaggtgatcgttttctgtttgagatttttatctcttgattcttcaaaagcattctgagaaggtgagataagccctgagtctcagctacctaagaaaaacctggatgtcactggccactgaggagctttgtttcaaccaagtcatgtgcatttccacgtcaacagaattgtttattgtgacagttatatctgttgtccctttgaccttgtttcttgaaggtttcctcgtccctgggcaattccgcatttaattcatggtattcaggattacatgcatgtttggttaaacccatgagattcattcagttaaaaatccagatggcaaatgaccagcagattcaaatctatggtggtttgacctttagagagttgctttacgtggcctgtttcaacacagacccacccagagccctcctgccctccttccgcgggggctttctcatggctgtccttcagggtcttcctgaaatgcagtggtgcttacgctccaccaagaaagcaggaaacctgtggtatgaagccagacctccccggcgggcctcagggaacagaatgatcagacctttgaatgattctaatttttaagcaaaatattattttatgaaaggtttacattgtcaaagtgatgaatatggaatatccaatcctgtgctgctatcctgccaaaatcattttaatggagtcagtttgcagtatgctccacgtggtaagatcctccaagctgctttagaagtaacaatgaagaacgtggacgtttttaatataaagcctgttttgtcttttgttgttgttcaaacgggattcacagagtatttgaaaaatgtatatatattaagaggtcacgggggctaattgctggctggctgccttttgctgtggggttttgttacctggttttaataacagtaaatgtgcccagcctcttggccccagaactgtacagtattgtggctgcacttgctctaagagtagttgatgttgcattttccttattgttaaaaacatgttagaagcaatgaatgtatataaaagcctcaactagtcatttttttctcctcttcttttttttcattatatctaattattttgcagttgggcaacagagaaccatccctattttgtattgaagagggattcacatctgcatcttaactgctctttatgaatgaaaaaacagtcctctgtatgtactcctctttacactggccagggtcagagttaaatagagtatatgcactttccaaattggggacaagggctctaaaaaaagccccaaaaggagaagaacatctgagaacctcctcggccctcccagtccctcgctgcacaaatactccgcaagagaggccagaatgacagctgacagggtctatggccatcgggtcgtctccgaagatttggcaggggcagaaaactctggcaggcttaagatttggaataaagtcacagaattaaggaagcacctcaatttagttcaaacaagacgccaacattctctccacagctcacttacctctctgtgttcagatgtggccttccatttatatgtgatctttgttttattagtaaatgcttatcatctaaagatgtagctctggcccagtgggaaaaattaggaagtgattataaatcgagaggagttataataatcaagattaaatgtaaataatcagggcaatcccaacacatgtctagctttcacctccaggatctattgagtgaacagaattgcaaatagtctctatttgtaattgaacttatcctaaaacaaatagtttataaatgtgaacttaaactctaattaattccaactgtacttttaaggcagtggctgtttttagactttcttatcacttatagttagtaatgtacacctactctatcagagaaaaacaggaaaggctcgaaatacaagccattctaaggaaattagggagtcagttgaaattctattctgatcttattctgtggtgtcttttgcagcccagacaaatgtggttacacactttttaagaaatacaattctacattgtcaagcttatgaaggttccaatcagatctttattgttattcaatttggatctttcagggattttttttttaaattattatgggacaaaggacatttgttggaggggtgggagggaggaagaatttttaaatgtaaaacattcccaagtttggatcagggagttggaagttttcagaataaccagaactaagggtatgaaggacctgtattggggtcgatgtgatgcctctgcgaagaaccttgtgtgacaaatgagaaacattttgaagtttgtggtacgacctttagattccagagacatcagcatggctcaaagtgcagctccgtttggcagtgcaatggtataaatttcaagctggatatgtctaatgggtatttaaacaataaatgtgcagttttaactaacaggatatttaatgacaaccttctggttggtagggacatctgtttctaaatgtttattatgtacaatacagaaaaaaattttataaaattaagcaatgtgaaactgaattggagagtgataatacaagtcctttagtcttacccagtgaatcattctgttccatgtctttggacaaccatgaccttggacaatcatgaaatatgcatctcactggatgcaaagaaaatcagatggagcatgaatggtactgtaccggttcatctggactgccccagaaaaataacttcaagcaaacatcctatcaacaacaaggttgttctgcataccaagctgagcacagaagatgggaacactggtggaggatggaaaggctcgctcaatcaagaaaattctgagactattaataaataagactgtagtgtagatactgagtaaatccatgcacctaaaccttttggaaaatctgccgtgggccctccagatagctcatttcattaagtttttccctccaaggtagaatttgcaagagtgacagtggattgcatttcttttggggaagctttcttttggtggttttgtttattataccttcttaagttttcaaccaaggtttgcttttgttttgagttactggggttatttttgttttaaataaaaataagtgtacaataagtgtttttgtattgaaagcttttgttatcaagattttcatacttttaccttccatggctctttttaagattgatacttttaagaggtggctgatattctgcaacactgtacacataaaaaatacggtaaggatactttacatggttaaggtaaagtaagtctccagttggccaccattagctataatggcactttgtttgtgttgttggaaaaagtcacattgccattaaactttccttgtctgtctagttaatattgtgaagaaaaataaagtacagtgtgagatactg

SEQ ID NO: 453 - DNA, 7461 bp, Homo sapiens
  source 1..7461: mol_type = genomic DNA
gcgcccgcccctccgcgccgcctgcccgcccgcccgccgcgctcccgcccgccgctctccgtggccccgccgcgctgccgccgccgccgctgccagcgaaggtgccggggctccgggccctccctgccggcggccgtcagcgctcggagcgggctgcgcggcgggagctccgggaggcggccgtagccagcgccgccgcgcaggaccaggaggaggagaaagggtgcgcagcccggaggcggggtgcgccggtggggtgcagcggaagagggggtccaggggggagaacttcgtagcagtcatcctttttaggaaaagagggaaaaaataaaaccctcccccaccacctccttctccccacccctcgccgcaccacacacagcgcgggcttctagcgctcggcaccggcgggccaggcgcgtcctgccttcatttatccagcagcttttcggaaaatgcatttgctgttcggagtttaatcagaagaggattcctgcctccgtccccggctccttcatcgtcccctctcccctgtctctctcctggggaggcgtgaagcggtcccgtggatagagattcatgcctgtgcccgcgcgtgtgtgcgcgcgtgtaaattgccgagaaggggaaaacatcacaggacttctgcgaataccggactgaaaattgtaattcatctgccgccgccgctgccttttttttttctcgagctcttgagatctccggttgggattcctgcggattgacatttctgtgaagcagaagtctgggaatcgatctggaaatcctcctaatttttactccctctccccgcgactcctgattcattgggaagtttcaaatcagctataactggagagtgctgaagattgatgggatcgttgccttatgcatttgttttggttttacaaaaaggaaacttgacagaggatcatgctgtacttaaaaaatacaagtaagttctctgcacaggaaattggtttaatgtaactttcaatggaaacctttgagattttttacttaaagtgcattcgagtaaatttaatttccaggcagcttaatacattctttttagccgtgttacttgtagtgtgtatgccctgctttcactcagtgtgtacagggaaacgcacctgattttttacttattagtttgttttttctttaacctttcagcatcacagaggaagtagactgatattaacaatacttactaataataacgtgcctcatgaaataaagatccgaaaggaattggaataaaaatttcctgcatctcatgccaagggggaaacaccagaatcaagtgttccgcgtgattgaagacaccccctcgtccaagaatgcaaagcacatccaataaaatagctggattataactcctcttctttctctgggggccgtggggtgggagctggggcgagaggtgccgttggcccccgttgcttttcctctgggaaggatggcgcacgctgggagaacagggtacgataaccgggagatagtgatgaagtacatccattataagctgtcgcagaggggctacgagtgggatgcgggagatgtgggcgccgcgcccccgggggccgcccccgcaccgggcatcttctcctcccagcccgggcacacgccccatccagccgcatcccgggacccggtcgccaggacctcgccgctgcagaccccggctgcccccggcgccgccgcggggcctgcgctcagcccggtgccacctgtggtccacctgaccctccgccaggccggcgacgacttctcccgccgctaccgccgcgacttcgccgagatgtccagccagctgcacctgacgcccttcaccgcgcggggacgctttgccacggtggtggaggagctcttcagggacggggtgaactgggggaggattgtggccttctttgagttcggtggggtcatgtgtgtggagagcgtcaaccgggagatgtcgcccctggtggacaacatcgccctgtggatgactgagtacctgaaccggcacctgcacacctggatccaggataacggaggctgggatgcctttgtggaactgtacggccccagcatgcggcctctgtttgatttctcctggctgtctctgaagactctgctcagtttggccctggtgggagcttgcatcaccctgggtgcctatctgggccacaagtgaagtcaacatgcctgccccaaacaaatatgcaaaaggttcactaaagcagtagaaataatatgcattgtcagtgatgtaccatgaaacaaagctgcaggctgtttaagaaaaaataacacacatataaacatcacacacacagacagacacacacacacacaacaattaacagtcttcaggcaaaacgtcgaatcagctatttactgccaaagggaaatatcatttattttttacattattaagaaaaaaagatttatttatttaagacagtcccatcaaaactcctgtctttggaaatccgaccactaattgccaagcaccgcttcgtgtggctccacctggatgttctgtgcctgtaaacatagattcgctttccatgttgttggccggatcaccatctgaagagcagacggatggaaaaaggacctgatcattggggaagctggctttctggctgctggaggctggggagaaggtgttcattcacttgcatttctttgccctgggggctgtgatattaacagagggagggttcctgtggggggaagtccatgcctccctggcctgaagaagagactctttgcatatgactcacatgatgcatacctggtgggaggaaaagagttgggaacttcagatggacctagtacccactgagatttccacgccgaaggacagcgatgggaaaaatgcccttaaatcataggaaagtatttttttaagctaccaattgtgccgagaaaagcattttagcaatttatacaatatcatccagtaccttaagccctgattgtgtatattcatatattttggatacgcaccccccaactcccaatactggctctgtctgagtaagaaacagaatcctctggaacttgaggaagtgaacatttcggtgacttccgcatcaggaaggctagagttacccagagcatcaggccgccacaagtgcctgcttttaggagaccgaagtccgcagaacctgcctgtgtcccagcttggaggcctggtcctggaactgagccggggccctcactggcctcctccagggatgatcaacagggcagtgtggtctccgaatgtctggaagctgatggagctcagaattccactgtcaagaaagagcagtagaggggtgtggctgggcctgtcaccctggggccctccaggtaggcccgttttcacgtggagcatgggagccacgacccttcttaagacatgtatcactgtagagggaaggaacagaggccctgggcccttcctatcagaaggacatggtgaaggctgggaacgtgaggagaggcaatggccacggcccattttggctgtagcacatggcacgttggctgtgtggccttggcccacctgtgagtttaaagcaaggctttaaatgactttggagagggtcacaaatcctaaaagaagcattgaagtgaggtgtcatggattaattgacccctgtctatggaattacatgtaaaacattatcttgtcactgtagtttggttttatttgaaaacctgacaaaaaaaaagttccaggtgtggaatatgggggttatctgtacatcctggggcattaaaaaaaaaatcaatggtggggaactataaagaagtaacaaaagaagtgacatcttcagcaaataaactaggaaatttttttttcttccagtttagaatcagccttgaaacattgatggaataactctgtggcattattgcattatataccatttatctgtattaactttggaatgtactctgttcaatgtttaatgctgtggttgatatttcgaaagctgctttaaaaaaatacatgcatctcagcgtttttttgtttttaattgtatttagttatggcctatacactatttgtgagcaaaggtgatcgttttctgtttgagatttttatctcttgattcttcaaaagcattctgagaaggtgagataagccctgagtctcagctacctaagaaaaacctggatgtcactggccactgaggagctttgtttcaaccaagtcatgtgcatttccacgtcaacagaattgtttattgtgacagttatatctgttgtccctttgaccttgtttcttgaaggtttcctcgtccctgggcaattccgcatttaattcatggtattcaggattacatgcatgtttggttaaacccatgagattcattcagttaaaaatccagatggcaaatgaccagcagattcaaatctatggtggtttgacctttagagagttgctttacgtggcctgtttcaacacagacccacccagagccctcctgccctccttccgcgggggctttctcatggctgtccttcagggtcttcctgaaatgcagtggtgcttacgctccaccaagaaagcaggaaacctgtggtatgaagccagacctccccggcgggcctcagggaacagaatgatcagacctttgaatgattctaatttttaagcaaaatattattttatgaaaggtttacattgtcaaagtgatgaatatggaatatccaatcctgtgctgctatcctgccaaaatcattttaatggagtcagtttgcagtatgctccacgtggtaagatcctccaagctgctttagaagtaacaatgaagaacgtggacgtttttaatataaagcctgttttgtcttttgttgttgttcaaacgggattcacagagtatttgaaaaatgtatatatattaagaggtcacgggggctaattgctggctggctgccttttgctgtggggttttgttacctggttttaataacagtaaatgtgcccagcctcttggccccagaactgtacagtattgtggctgcacttgctctaagagtagttgatgttgcattttccttattgttaaaaacatgttagaagcaatgaatgtatataaaagcctcaactagtcatttttttctcctcttcttttttttcattatatctaattattttgcagttgggcaacagagaaccatccctattttgtattgaagagggattcacatctgcatcttaactgctctttatgaatgaaaaaacagtcctctgtatgtactcctctttacactggccagggtcagagttaaatagagtatatgcactttccaaattggggacaagggctctaaaaaaagccccaaaaggagaagaacatctgagaacctcctcggccctcccagtccctcgctgcacaaatactccgcaagagaggccagaatgacagctgacagggtctatggccatcgggtcgtctccgaagatttggcaggggcagaaaactctggcaggcttaagatttggaataaagtcacagaattaaggaagcacctcaatttagttcaaacaagacgccaacattctctccacagctcacttacctctctgtgttcagatgtggccttccatttatatgtgatctttgttttattagtaaatgcttatcatctaaagatgtagctctggcccagtgggaaaaattaggaagtgattataaatcgagaggagttataataatcaagattaaatgtaaataatcagggcaatcccaacacatgtctagctttcacctccaggatctattgagtgaacagaattgcaaatagtctctatttgtaattgaacttatcctaaaacaaatagtttataaatgtgaacttaaactctaattaattccaactgtacttttaaggcagtggctgtttttagactttcttatcacttatagttagtaatgtacacctactctatcagagaaaaacaggaaaggctcgaaatacaagccattctaaggaaattagggagtcagttgaaattctattctgatcttattctgtggtgtcttttgcagcccagacaaatgtggttacacactttttaagaaatacaattctacattgtcaagcttatgaaggttccaatcagatctttattgttattcaatttggatctttcagggattttttttttaaattattatgggacaaaggacatttgttggaggggtgggagggaggaagaatttttaaatgtaaaacattcccaagtttggatcagggagttggaagttttcagaataaccagaactaagggtatgaaggacctgtattggggtcgatgtgatgcctctgcgaagaaccttgtgtgacaaatgagaaacattttgaagtttgtggtacgacctttagattccagagacatcagcatggctcaaagtgcagctccgtttggcagtgcaatggtataaatttcaagctggatatgtctaatgggtatttaaacaataaatgtgcagttttaactaacaggatatttaatgacaaccttctggttggtagggacatctgtttctaaatgtttattatgtacaatacagaaaaaaattttataaaattaagcaatgtgaaactgaattggagagtgataatacaagtcctttagtcttacccagtgaatcattctgttccatgtctttggacaaccatgaccttggacaatcatgaaatatgcatctcactggatgcaaagaaaatcagatggagcatgaatggtactgtaccggttcatctggactgccccagaaaaataacttcaagcaaacatcctatcaacaacaaggttgttctgcataccaagctgagcacagaagatgggaacactggtggaggatggaaaggctcgctcaatcaagaaaattctgagactattaataaataagactgtagtgtagatactgagtaaatccatgcacctaaaccttttggaaaatctgccgtgggccctccagatagctcatttcattaagtttttccctccaaggtagaatttgcaagagtgacagtggattgcatttcttttggggaagctttcttttggtggttttgtttattataccttcttaagttttcaaccaaggtttgcttttgttttgagttactggggttatttttgttttaaataaaaataagtgtacaataagtgtttttgtattgaaagcttttgttatcaagattttcatacttttaccttccatggctctttttaagattgatacttttaagaggtggctgatattctgcaacactgtacacataaaaaatacggtaaggatactttacatggttaaggtaaagtaagtctccagttggccaccattagctataatggcactttgtttgtgttgttggaaaaagtcacattgccattaaactttccttgtctgtctagttaatattgtgaagaaaaataaagtacagtgtgagatactg

SEQ ID NO: 454 - DNA, 1206 bp, Homo sapiens
  source 1..1206: mol_type = genomic DNA
tttctgtgaagcagaagtctgggaatcgatctggaaatcctcctaatttttactccctctccccgcgactcctgattcattgggaagtttcaaatcagctataactggagagtgctgaagattgatgggatcgttgccttatgcatttgttttggttttacaaaaaggaaacttgacagaggatcatgctgtacttaaaaaatacaacatcacagaggaagtagactgatattaacaatacttactaataataacgtgcctcatgaaataaagatccgaaaggaattggaataaaaatttcctgcatctcatgccaagggggaaacaccagaatcaagtgttccgcgtgattgaagacaccccctcgtccaagaatgcaaagcacatccaataaaatagctggattataactcctcttctttctctgggggccgtggggtgggagctggggcgagaggtgccgttggcccccgttgcttttcctctgggaaggatggcgcacgctgggagaacagggtacgataaccgggagatagtgatgaagtacatccattataagctgtcgcagaggggctacgagtgggatgcgggagatgtgggcgccgcgcccccgggggccgcccccgcaccgggcatcttctcctcccagcccgggcacacgccccatccagccgcatcccgggacccggtcgccaggacctcgccgctgcagaccccggctgcccccggcgccgccgcggggcctgcgctcagcccggtgccacctgtggtccacctgaccctccgccaggccggcgacgacttctcccgccgctaccgccgcgacttcgccgagatgtccagccagctgcacctgacgcccttcaccgcgcggggacgctttgccacggtggtggaggagctcttcagggacggggtgaactgggggaggattgtggccttctttgagttcggtggggtcatgtgtgtggagagcgtcaaccgggagatgtcgcccctggtggacaacatcgccctgtggatgactgagtacctgaaccggcacctgcacacctggatccaggataacggaggctgggtaggtgcacttggtgatgtgagtctgggctgaggccacaggtccgagatgcgggggttggagtgcgggtgggctcctggggcaatgggaggctgtggagccggcgaaataaaatcagagttgttgct

SEQ ID NO: 455 - DNA, 2710 bp, Homo sapiens
  source 1..2710: mol_type = genomic DNA
gccacttgtcatggtgaaatggcaaatctgggcttcctgtggttccagaagcctgcgactggaaatccacaagcgagctggtggttgaagctggttaaagaacagcctaggtattccagaagtgtttgaggatcccttccatgaaggaagagaggaaagtttttaagtaaacctcccactcccatgtgtcttcagctttcttttgcaaaggagaaaatccttgaagtttggtaaagaccgagttagtctatctctctttgcctatctcgagttgggctggggagaggaggagataggttcttttgtctttttctgtcttctcccttccccacttccttccctccagtccccactcactcacatgcacacactaaccttggagccgatgggattgagtgactggcacttgggaccacagagaaatgtcagagtgtttggttacagactcaaggaaacctctcattttagagtgctcatttggttttgagcaaaattttggactgtgaagcaaggcattggtgaagacaaaatggcctcgccggctgacagctgtatccagttcacccgccatgccagtgatgttcttctcaaccttaatcgtctccggagtcgagacatcttgactgatgttgtcattgttgtgagccgtgagcagtttagagcccataaaacggtcctcatggcctgcagtggcctgttctatagcatctttacagaccagttgaaatgcaaccttagtgtgatcaatctagatcctgagatcaaccctgagggattctgcatcctcctggacttcatgtacacatctcggctcaatttgcgggagggcaacatcatggctgtgatggccacggctatgtacctgcagatggagcatgttgtggacacttgccggaagtttattaaggccagtgaagcagagatggtttctgccatcaagcctcctcgtgaagagttcctcaacagccggatgctgatgccccaagacatcatggcctatcggggtcgtgaggtggtggagaacaacctgccactgaggagcgcccctgggtgtgagagcagagcctttgcccccagcctgtacagtggcctgtccacaccgccagcctcttattccatgtacagccacctccctgtcagcagcctcctcttctccgatgaggagtttcgggatgtccggatgcctgtggccaaccccttccccaaggagcgggcactcccatgtgatagtgccaggccagtccctggtgagtacagccggccgactttggaggtgtcccccaatgtgtgccacagcaatatctattcacccaaggaaacaatcccagaagaggcacgaagtgatatgcactacagtgtggctgagggcctcaaacctgctgccccctcagcccgaaatgccccctacttcccttgtgacaaggccagcaaagaagaagagagaccctcctcggaagatgagattgccctgcatttcgagccccccaatgcacccctgaaccggaagggtctggttagtccacagagcccccagaaatctgactgccagcccaactcgcccacagagtcctgcagcagtaagaatgcctgcatcctccaggcttctggctcccctccagccaagagccccactgaccccaaagcctgcaactggaagaaatacaagttcatcgtgctcaacagcctcaaccagaatgccaaaccagaggggcctgagcaggctgagctgggccgcctttccccacgagcctacacggccccacctgcctgccagccacccatggagcctgagaaccttgacctccagtccccaaccaagctgagtgccagcggggaggactccaccatcccacaagccagccggctcaataacatcgttaacaggtccatgacgggctctccccgcagcagcagcgagagccactcaccactctacatgcaccccccgaagtgcacgtcctgcggctctcagtccccacagcatgcagagatgtgcctccacaccgctggccccacgttccctgaggagatgggagagacccagtctgagtactcagattctagctgtgagaacggggccttcttctgcaatgagtgtgactgccgcttctctgaggaggcctcactcaagaggcacacgctgcagacccacagtgacaaaccctacaagtgtgaccgctgccaggcctccttccgctacaagggcaacctcgccagccacaagaccgtccataccggtgagaaaccctatcgttgcaacatctgtggggcccagttcaaccggccagccaacctgaaaacccacactcgaattcactctggagagaagccctacaaatgcgaaacctgcggagccagatttgtacaggtggcccacctccgtgcccatgtgcttatccacactggtgagaagccctatccctgtgaaatctgtggcacccgtttccggcaccttcagactctgaagagccacctgcgaatccacacaggagagaaaccttaccattgtgagaagtgtaacctgcatttccgtcacaaaagccagctgcgacttcacttgcgccagaagcatggcgccatcaccaacaccaaggtgcaataccgcgtgtcagccactgacctgcctccggagctccccaaagcctgctgaagcatggagtgttgatgctttcgtctccagccccttctcagaatctacccaaaggatact

SEQ ID NO: 456 - DNA, 3569 bp, Homo sapiens
  source 1..3569: mol_type = genomic DNA
ataccatcgtcttgggcccggggagggagagccaccttcaggcccctcgagcctcgaaccggaacctccaaatccgagacgctctgcttatgaggacctcgaaatatgccggccagtgaaaaaatcttgtggctttgagggcttttggttggccaggggcagtaaaaatctcggagagctgacaccaagtcctcccctgccacgtagcagtggtaaagtccgaagctcaaattccgagaattgagctctgttgattcttagaactggggttcttagaagtggtgatgcaagaagtttctaggaaaggccggacaccaggttttgagcaaaattttggactgtgaagcaaggcattggtgaagacaaaatggcctcgccggctgacagctgtatccagttcacccgccatgccagtgatgttcttctcaaccttaatcgtctccggagtcgagacatcttgactgatgttgtcattgttgtgagccgtgagcagtttagagcccataaaacggtcctcatggcctgcagtggcctgttctatagcatctttacagaccagttgaaatgcaaccttagtgtgatcaatctagatcctgagatcaaccctgagggattctgcatcctcctggacttcatgtacacatctcggctcaatttgcgggagggcaacatcatggctgtgatggccacggctatgtacctgcagatggagcatgttgtggacacttgccggaagtttattaaggccagtgaagcagagatggtttctgccatcaagcctcctcgtgaagagttcctcaacagccggatgctgatgccccaagacatcatggcctatcggggtcgtgaggtggtggagaacaacctgccactgaggagcgcccctgggtgtgagagcagagcctttgcccccagcctgtacagtggcctgtccacaccgccagcctcttattccatgtacagccacctccctgtcagcagcctcctcttctccgatgaggagtttcgggatgtccggatgcctgtggccaaccccttccccaaggagcgggcactcccatgtgatagtgccaggccagtccctggtgagtacagccggccgactttggaggtgtcccccaatgtgtgccacagcaatatctattcacccaaggaaacaatcccagaagaggcacgaagtgatatgcactacagtgtggctgagggcctcaaacctgctgccccctcagcccgaaatgccccctacttcccttgtgacaaggccagcaaagaagaagagagaccctcctcggaagatgagattgccctgcatttcgagccccccaatgcacccctgaaccggaagggtctggttagtccacagagcccccagaaatctgactgccagcccaactcgcccacagagtcctgcagcagtaagaatgcctgcatcctccaggcttctggctcccctccagccaagagccccactgaccccaaagcctgcaactggaagaaatacaagttcatcgtgctcaacagcctcaaccagaatgccaaaccagaggggcctgagcaggctgagctgggccgcctttccccacgagcctacacggccccacctgcctgccagccacccatggagcctgagaaccttgacctccagtccccaaccaagctgagtgccagcggggaggactccaccatcccacaagccagccggctcaataacatcgttaacaggtccatgacgggctctccccgcagcagcagcgagagccactcaccactctacatgcaccccccgaagtgcacgtcctgcggctctcagtccccacagcatgcagagatgtgcctccacaccgctggccccacgttccctgaggagatgggagagacccagtctgagtactcagattctagctgtgagaacggggccttcttctgcaatgagtgtgactgccgcttctctgaggaggcctcactcaagaggcacacgctgcagacccacagtgacaaaccctacaagtgtgaccgctgccaggcctccttccgctacaagggcaacctcgccagccacaagaccgtccataccggtgagaaaccctatcgttgcaacatctgtggggcccagttcaaccggccagccaacctgaaaacccacactcgaattcactctggagagaagccctacaaatgcgaaacctgcggagccagatttgtacaggtggcccacctccgtgcccatgtgcttatccacactggtgagaagccctatccctgtgaaatctgtggcacccgtttccggcaccttcagactctgaagagccacctgcgaatccacacaggagagaaaccttaccattgtgagaagtgtaacctgcatttccgtcacaaaagccagctgcgacttcacttgcgccagaagcatggcgccatcaccaacaccaaggtgcaataccgcgtgtcagccactgacctgcctccggagctccccaaagcctgctgaagcatggagtgttgatgctttcgtctccagccccttctcagaatctacccaaaggatactgtaacactttacaatgttcatcccatgatgtagtgcctctttcatccactagtgcaaatcatagctgggggttgggggtggtgggggtcggggcctgggggactgggagccgcagcagctccccctcccccactgccataaaacattaagaaaatcatattgcttcttctcctatgtgtaaggtgaaccatgtcagcaaaaagcaaaatcattttatatgtcaaagcaggggagtatgcaaaagttctgacttgactttagtctgcaaaatgaggaatgtatatgttttgtgggaacagatgtttcttttgtatgtaaatgtgcattcttttaaaagacaagacttcagtatgttgtcaaagagagggctttaatttttttaaccaaaggtgaaggaatatatggcagagttgtaaatatataaatatatatatatataaaataaatatatataaacctaaaaaagatatattaaaaatataaaactgcgttaaaggctcgattttgtatctgcaggcagacacggatctgagaatctttattgagaaagagcacttaagagaatattttaagtattgcatctgtataagtaagaaaatattttgtctaaaatgcctcagtgtatttgtatttttttgcaagtgaaggtttacaatttacaaagtgtgtattaaaaaaaacaaaaagaacaaaaaaatctgcagaaggaaaaatgtgtaattttgttctagttttcagtttgtatatacccgtacaacgtgtcctcacggtgccttttttcacggaagttttcaatgatgggcgagcgtgcaccatccctttttgaagtgtaggcagacacagggacttgaagttgttactaactaaactctctttgggaatgtttgtctcatcccattctgcgtcatgcttgtgttataactactccggagacagggtttggctgtgtctaaactgcattaccgcgttgtaaaatatagctgtacaaatataagaataaaatgttgaaaagtcaaactgg

SEQ ID NO: 457 - DNA, 454 bp, Homo sapiens
  source 1..454: mol_type = genomic DNA
gttaaatcaatttctgtttgctttcttctcttctctgtaggttttgagcaaaattttggactgtgaagcaaggcattggtgaagacaaaatggcctcgccggctgacagctgtatccagttcacccgccatgccagtgatgttcttctcaaccttaatcgtctccggagtcgagacatcttgactgatgttgtcattgttgtgagccgtgagcagtttagagcccataaaacggtcctcatggcctgcagtggcctgttctatagcatctttacagaccagttgaaatgcaaccttagtgtgatcaatctagatcctgagatcaaccctgagggattctgcatcctcctggacttcatgtacacatctcggctcaatttgcgggagggcaacatcatggctgtgatggccacggctatgtacctgcagatggagcatgttgtggacacttgccg

SEQ ID NO: 458 - DNA, 709 bp, Homo sapiens
  source 1..709: mol_type = genomic DNA
tcctggcggctgccggggccggcagcttcctggaaagttacttcttgttggagccggcaataggcaaagtgtgttctgtgaaatccgcagagccgagattgactacgttccgggaatgagagggctgtgtcattcccctcattgcctgctgcattgacggcgtaacaggaaaaaaaaaaaaaaaaaaaaaaaggcatacacacaatgttagctaccgaggtgcaccaaaagttttatttgaatgtaactaaattaagggccgccacggtcataccacaaagcctccgtcgcgccttgcggggggcttcgaggtggatcgcccaggggcgggcagtccctggaagacaggttttgagcaaaattttggactgtgaagcaaggcattggtgaagacaaaatggcctcgccggctgacagctgtatccagttcacccgccatgccagtgatgttcttctcaaccttaatcgtctccggagtcgagacatcttgactgatgttgtcattgttgtgagccgtgagcagtttagagcccataaaacggtcctcatggcctgcagtggcctgttctatagcatctttacagaccagttgaaatgcaaccttagtgtgatcaatctagatcctgagatcaaccctgagggattctgcatcctcctggacttcatgtacacatctcggctcaatttgcgggagggcaacatcatggct

SEQ ID NO: 459 - DNA, 2003 bp, Homo sapiens
  source 1..2003: mol_type = genomic DNA
aagcaaggcattggtgaagacaaaatggcctcgccggctgacagctgtatccagttcacccgccatgccagtgatgttcttctcaaccttaatcgtctccggagtcgagacatcttgactgatgttgtcattgttgtgagccgtgagcagtttagagcccataaaacggtcctcatggcctgcagtggcctgttctatagcatctttacagaccagttgaaatgcaaccttagtgtgatcaatctagatcctgagatcaaccctgagggattctgcatcctcctggacttcatgtacacatctcggctcaatttgcgggagggcaacatcatggctgtgatggccacggctatgtacctgcagatggagcatgttgtggacacttgccggaagtttattaaggccagtgaagcagagatggtttctgccatcaagcctcctcgtgaagagttcctcaacagccggatgctgatgccccaagacatcatggcctatcggggtcgtgaggtggtggagaacaacctgccactgaggagcgcccctgggtgtgagagcagagcctttgcccccagcctgtacagtggcctgtccacaccgccagcctcttattccatgtacagccacctccctgtcagcagcctcctcttctccgatgaggagtttcgggatgtccggatgcctgtggccaaccccttccccaaggagcgggcactcccatgtgatagtgccaggccagtccctggtgagtacagccggccgactttggaggtgtcccccaatgtgtgccacagcaatatctattcacccaaggaaacaatcccagaagaggcacgaagtgatatgcactacagtgtggctgagggcctcaaacctgctgccccctcagcccgaaatgccccctacttcccttgtgacaaggccagcaaagaagaagagagaccctcctcggaagatgagattgccctgcatttcgagccccccaatgcacccctgaaccggaagggtctggttagtccacagagcccccagaaatctgactgccagcccaactcgcccacagagtcctgcagcagtaagaatgcctgcatcctccaggcttctggctcccctccagccaagagccccactgaccccaaagcctgcaactggaagaaatacaagttcatcgtgctcaacagcctcaaccagaatgccaaaccagaggggcctgagcaggctgagctgggccgcctttccccacgagcctacacggccccacctgcctgccagccacccatggagcctgagaaccttgacctccagtccccaaccaagctgagtgccagcggggaggactccaccatcccacaagccagccggctcaataacatcgttaacaggtccatgacgggctctccccgcagcagcagcgagagccactcaccactctacatgcaccccccgaagtgcacgtcctgcggctctcagtccccacagcatgcagagatgtgcctccacaccgctggccccacgttccctgaggagatgggagagacccagtctgagtactcagattctagctgtggtgagaaaccctatcgttgcaacatctgtggggcccagttcaaccggccagccaacctgaaaacccacactcgaattcactctggagagaagccctacaaatgcgaaacctgcggagccagatttgtacaggtggcccacctccgtgcccatgtgcttatccacactggtgagaagccctatccctgtgaaatctgtggcacccgtttccggcaccttcagactctgaagagccacctgcgaatccacacaggagagaaaccttaccattgtgagaagtgtaacctgcatttccgtcacaaaagccagctgcgacttcacttgcgccagaagcatggcgccatcaccaacaccaaggtgcaataccgcgtgtcagccactgacctgcctccggagctccccaaagcctgctgaagcatggagtgttgatgctttcgtct

SEQ ID NO: 460 - DNA, 1347 bp, Homo sapiens
  source 1..1347: mol_type = genomic DNA
gaggcgattgcgattgggtgagacccagtaaggatggaaagtgtagaggagacaggaatccacggctttggaaaaaggaaggacaaaactcaccaaaccagagcagggcaggaagtaacaatgagaaactgaaaaagaaacggaatggaaagctatgagacaggatgaaatttggcatggggtctgcccaggcatgtccatgccaggtgcccagggctgcttccacgacgtgggtcccctgccagatttgtgagacaagaggagcagcagcggcaccgcccctcaccctggagggtcctgtacaatctcatcatgggactcctgcccttacccaggggccacagagcccccgagatggagcccaattaggtgcctgcacccgcccggtggacgtcagggactcggggggcaggcccctcccacctcctgacaccctggccagcgcgggggactttctctgcaccatgtagcatactggactcccagccctgcctgtcccgggggcgggccggggcagccactccagccccagcccagcctggggtgcactgacggagatgcggactcctgggtccctggccaagaagccaggagagggacggctgatggactcagcatcggaaggtggcggtgaccgagggggtggggactgagccgcccgcctctgccgcccaccaccatctcaggaaaggctgttgtgctggtgcccgttccagctgcaggggtgacactgggaggggggggctctcctctcggtgctccttcactctgggcctggcctcaggcccctggtgcttccccccctcctcctgggagggggcccgtgaagagcaaatgagccaaacgtgaccactagcctcctggagccagagagtggggctcgtttgccggttgctccagcccggcgcccagccatcttccctgagccagccggcgggtggtgggcatgcctgcctcaccttcatcagggggtggccaggaggggcccagactgtgaatcctgtgctctgcccgtgaccgccccccgccccatcaatcccattgcataggtttagagagagcacgtgtgaccactggcattcatttggggggtgggagattttggctgaagccgccccagccttagtccccagggccaagcgctggggggaagacggggagtcagggagggggggaaatctcggaagagggaggagtctgggagtggggagggatggcccagcctgtaagatactgtatatgcgctgctgtagataccggaatgaattttctgtacatgtttggttaattttttttgtacatgatttttgtatgtttccttttcaataaaatcagattggaacagtg

SEQ ID NO: 461 - DNA, 1538 bp, Homo sapiens
  source 1..1538: mol_type = genomic DNA
gaggcgattgcgattgggtgagacccagtaaggatggaaagtgtagaggagacaggaatccacggctttggaaaaaggaaggacaaaactcaccaaaccagagcagggcaggaagtaacaatgagaaactgaaaaagaaacggaatggaaagctatgagacaggatgaaatttggcatggggtctgcccaggcatgtccatgccaggtgcccagggctgcttccacgacgtgggtcccctgccagatttgtggtcctcagccctcgctctcgctggcggagcagcacctggagtcgcccgtgcccagcgccccgggggctctggcgggcggtcccacccaggcggccccgggagtccgcggggaggaggaacagtgggcccgggagatcggggcccagctgcggcggatggcggacgacctcaacgcacagtacgagcggcggagacaagaggagcagcagcggcaccgcccctcaccctggagggtcctgtacaatctcatcatgggactcctgcccttacccaggggccacagagcccccgagatggagcccaattaggtgcctgcacccgcccggtggacgtcagggactcggggggcaggcccctcccacctcctgacaccctggccagcgcgggggactttctctgcaccatgtagcatactggactcccagccctgcctgtcccgggggcgggccggggcagccactccagccccagcccagcctggggtgcactgacggagatgcggactcctgggtccctggccaagaagccaggagagggacggctgatggactcagcatcggaaggtggcggtgaccgagggggtggggactgagccgcccgcctctgccgcccaccaccatctcaggaaaggctgttgtgctggtgcccgttccagctgcaggggtgacactgggaggggggggctctcctctcggtgctccttcactctgggcctggcctcaggcccctggtgcttccccccctcctcctgggagggggcccgtgaagagcaaatgagccaaacgtgaccactagcctcctggagccagagagtggggctcgtttgccggttgctccagcccggcgcccagccatcttccctgagccagccggcgggtggtgggcatgcctgcctcaccttcatcagggggtggccaggaggggcccagactgtgaatcctgtgctctgcccgtgaccgccccccgccccatcaatcccattgcataggtttagagagagcacgtgtgaccactggcattcatttggggggtgggagattttggctgaagccgccccagccttagtccccagggccaagcgctggggggaagacggggagtcagggagggggggaaatctcggaagagggaggagtctgggagtggggagggatggcccagcctgtaagatactgtatatgcgctgctgtagataccggaatgaattttctgtacatgtttggttaattttttttgtacatgatttttgtatgtttccttttcaataaaatcagattggaacagtg

SEQ ID NO: 462 - DNA, 1843 bp, Homo sapiens
  source 1..1843: mol_type = genomic DNA
gcggcgcgagccacatgcgagcgggcgcctggcggcggcggcggcggcaccagcgatcccagcagcggccacgacgcggacgcgcctgcggcccggggagcagcagcagccacagccacagcagccgccactgcagttagagcggcagcagcagcgacagccacagcagcagccgccgcggagagcggcgctcggcgggcgcgccctcctgaaggaagccgcccgccccccaccgccgccccctccggcgtgttcatgcccccggggccccagggagcgccatggcccgcgcacgccaggagggcagctccccggagcccgtagagggcctggcccgcgacggcccgcgccccttcccgctcggccgcctggtgccctcggcagtgtcctgcggcctctgcgagcccggcctggctgccgcccccgccgcccccaccctgctgcccgctgcctacctctgcgcccccaccgccccacccgccgtcaccgccgccctggggggttcccgctggcctgggggtccccgcagccggccccgaggcccgcgcccggacggtcctcagccctcgctctcgctggcggagcagcacctggagtcgcccgtgcccagcgccccgggggctctggcgggcggtcccacccaggcggccccgggagtccgcggggaggaggaacagtgggcccgggagatcggggcccagctgcggcggatggcggacgacctcaacgcacagtacgagcggcggagacaagaggagcagcagcggcaccgcccctcaccctggagggtcctgtacaatctcatcatgggactcctgcccttacccaggggccacagagcccccgagatggagcccaattaggtgcctgcacccgcccggtggacgtcagggactcggggggcaggcccctcccacctcctgacaccctggccagcgcgggggactttctctgcaccatgtagcatactggactcccagccctgcctgtcccgggggcgggccggggcagccactccagccccagcccagcctggggtgcactgacggagatgcggactcctgggtccctggccaagaagccaggagagggacggctgatggactcagcatcggaaggtggcggtgaccgagggggtggggactgagccgcccgcctctgccgcccaccaccatctcaggaaaggctgttgtgctggtgcccgttccagctgcaggggtgacactgggaggggggggctctcctctcggtgctccttcactctgggcctggcctcaggcccctggtgcttccccccctcctcctgggagggggcccgtgaagagcaaatgagccaaacgtgaccactagcctcctggagccagagagtggggctcgtttgccggttgctccagcccggcgcccagccatcttccctgagccagccggcgggtggtgggcatgcctgcctcaccttcatcagggggtggccaggaggggcccagactgtgaatcctgtgctctgcccgtgaccgccccccgccccatcaatcccattgcataggtttagagagagcacgtgtgaccactggcattcatttggggggtgggagattttggctgaagccgccccagccttagtccccagggccaagcgctggggggaagacggggagtcagggagggggggaaatctcggaagagggaggagtctgggagtggggagggatggcccagcctgtaagatactgtatatgcgctgctgtagataccggaatgaattttctgtacatgtttggttaattttttttgtacatgatttttgtatgtttccttttcaataaaatcagattggaacagtgga

SEQ ID NO: 463 - DNA, 1827 bp, Homo sapiens
  source 1..1827: mol_type = genomic DNA
gaggcgattgcgattgggtgagacccagtaaggatggaaagtgtagaggagacaggaatccacggctttggaaaaaggaaggacaaaactcaccaaaccagagcagggcaggaagtaacaatgagaaactgaaaaagaaacggaatggaaagctatgagacaggatgaaatttggcatggggtctgcccaggcatgtccatgccaggtgcccagggctgcttccacgacgtgggtcccctgccagatttgtggccccagggagcgccatggcccgcgcacgccaggagggcagctccccggagcccgtagagggcctggcccgcgacggcccgcgccccttcccgctcggccgcctggtgccctcggcagtgtcctgcggcctctgcgagcccggcctggctgccgcccccgccgcccccaccctgctgcccgctgcctacctctgcgcccccaccgccccacccgccgtcaccgccgccctggggggttcccgctggcctgggggtccccgcagccggccccgaggcccgcgcccggacggtcctcagccctcgctctcgctggcggagcagcacctggagtcgcccgtgcccagcgccccgggggctctggcgggcggtcccacccaggcggccccgggagtccgcggggaggaggaacagtgggcccgggagatcggggcccagctgcggcggatggcggacgacctcaacgcacagtacgagcggcggagacaagaggagcagcagcggcaccgcccctcaccctggagggtcctgtacaatctcatcatgggactcctgcccttacccaggggccacagagcccccgagatggagcccaattaggtgcctgcacccgcccggtggacgtcagggactcggggggcaggcccctcccacctcctgacaccctggccagcgcgggggactttctctgcaccatgtagcatactggactcccagccctgcctgtcccgggggcgggccggggcagccactccagccccagcccagcctggggtgcactgacggagatgcggactcctgggtccctggccaagaagccaggagagggacggctgatggactcagcatcggaaggtggcggtgaccgagggggtggggactgagccgcccgcctctgccgcccaccaccatctcaggaaaggctgttgtgctggtgcccgttccagctgcaggggtgacactgggaggggggggctctcctctcggtgctccttcactctgggcctggcctcaggcccctggtgcttccccccctcctcctgggagggggcccgtgaagagcaaatgagccaaacgtgaccactagcctcctggagccagagagtggggctcgtttgccggttgctccagcccggcgcccagccatcttccctgagccagccggcgggtggtgggcatgcctgcctcaccttcatcagggggtggccaggaggggcccagactgtgaatcctgtgctctgcccgtgaccgccccccgccccatcaatcccattgcataggtttagagagagcacgtgtgaccactggcattcatttggggggtgggagattttggctgaagccgccccagccttagtccccagggccaagcgctggggggaagacggggagtcagggagggggggaaatctcggaagagggaggagtctgggagtggggagggatggcccagcctgtaagatactgtatatgcgctgctgtagataccggaatgaattttctgtacatgtttggttaattttttttgtacatgatttttgtatgtttccttttcaataaaatcagattggaacagtg

SEQ ID NO: 464 - DNA, 6325 bp, Homo sapiens
  source 1..6325: mol_type = genomic DNA
agtcgacgcgacgggtccgcccacaggcaaggaaggccgaccccgcgagtgcaggcgcgagcgctagcccgtgacgtctgagggggttggggggatgctgtgtgggtttcaagaagacgccacgcctccgccgccgccacgcccccgccgcctccaccgccggctgccgcgcccggaggaggtcgggatgttatcacttccgccggggcttctcactgtgtccgggtcagctgctgccgccgacgccgtaccgctgcggccgggggattgggccggggtctccaccgccgaccgaggggagcgggctccgctcggccctgctttttgcgacctggccgtcagccccacgtcgccggcctggaggggcgaagaggacgagggggccaaggcttcctccggggacattggctccctggattatcaagagtttgtagttgacattgaatccaggctgaggatggaaggtgtggaacttaaagaagaatggcaagatgaagattttccgatacctttaccagaagatgatagtattgaagcagatatactagctataactggaccagaggaccagcctggctcactagaagttaatggaaataaagtgagaaagaaactaatggctccagacattagcctgacactggatcctagtgatggctctgtattgtcagatgatttggatgaaagtggggagattgacttagatggcttagacacaccgtcagagaatagtaatgagtttgagtgggaagatgatcttccaaaacccaagactactgaagtaattaggaaaggctcaattactgaatacacagcagcagaggaaaaagaagatggacgacgctggcgtatgttcaggattggagaacaggaccacagggttgatatgaaggcaattgaaccctataaaaaagttatcagccatgggggatattatggggatggattaaatgccattgttgtgtttgctgtctgtttcatgcctgaaagtagtcagcctaactatagatacctgatggacaatctttttaaatatgttattggcactttggagctattagtagcagaaaactacatgatagtttatttaaatggtgcaacaactcgaagaaaaatgcccagtctgggatggctcaggaaatgttatcagcaaattgatagaaggttacggaaaaatctaaaatccctaatcattgtacatccttcttggtttatcagaacacttctggctgttacaagaccatttattagctcgaaattcagccaaaaaattagatacgtgtttaatttggcagaactagcagaacttgtccccatggaatacgttggcataccagaatgcataaaacaagttgatcaagaacttaatggaaaacaagatgaaccgaaaaatgaacagtaagtttggcatctagtccaaacaagactgaagaatgtgctgatggagcagtgctgtttctgcattcataatgcatttattggcccatatttttatgtaacctgttacaaaatagacttgactttttcataatggacttttgtattatacaagggactgttcactgctgtactggtttgcaaatttcttgaatttagctctttaatagctaactgtattattatcgttttatattttatattgctaaatagagaaccacactttatataaagtagtttttgcatttgtttattgaatgatgcatcttcttcggtgaaatatttatatgcataaatggcaaaggaaagaaataatatatatttttatgtcattgagcaatattttttaatgtgtacctgtcttatggaagaaatatgcaggtatataagaccacgattttctaaagtgcatattagaatttttgtttttgtaaatggttaaatacatttcctgggtaacttaggaaattaagtttttcataaggcaacagatggttaaactgattgtcatgaatacccaaagatcatgtatataatcgaagtgtattagtaccatcccaaggtttttttctcatttaacatatttgtttcataattcagcaagtacagatgcaagcgcattgcacactttttcctttctaaacttaaagacaagtcaaaaagccattcttagaactagaggatttaagagggtaggaattagggtttgtatatatgtatatatgggacattttatcttctggcccaaagtcagaactttataaaaatcttgagtttgttcactaatgtgaaataagctatgtgtccagggtattgctcccctgagtgtatatgagtgctgagtagtattgcagagaatgtgatgagttattcactgtcacaactttttctatagaaaacaggggctgctttttaaactctcactatgggcactttaccaaaatacttccatatcaattatttgaactcggtagttgtttgacctagttagatgtggtgtttattcaagtttgtatgaaatcatgtttgacaatactgtaaattaggttaattttgtaagtcttagcatcatcatattgtgctgttttggataacacgtttgttacaagcatttaaactgtttcatttggtagtacctttacattgaaataaattgtgtttgtgcctccaaacaaaaagtttaattaccgacaaaattatttctaaaacaacagattgatctgatattgtgtcatatacttgaaaggctcatacacagctggtaagcataataccttccaaatttgaaggtcatggctactcttcaacccttcctgtaaggtattttacaaaacagtggcctagagtagcaaaattgaagtggatgtgagctaacctttcaagatttagtctatcctagattgaacacacatgtggctgtgaccattctcatgtacttacaaaccttctgttacaaaagggaactttcctatattttttgtcctcctcagtcctaaacttggcatgctaacttaaaaccagttataggagagagatgctggaggattcccaggatgaaacattcctcagcagcctcctgacttaactcagatccagcagctcttggcagatcctgaactaatgtcattacagtgaattgagccaaaacgattattgcttgctcacattttaggaacacttgttgttgaagaagcaaactaacaataacaagttaggcattccttctgaatttaccatataaggattatgtataaacaattatattgaatttgtcattagattctatatttgtagacgatttaacgtagtctttcatctgtacatctttatcttgctcaaaatgggctgaggtttttaataggtggttttctaccacattaagtacttggttcttcagtttaaaaaatatgaagaataacttcaactcttttttgcattattttgatttttgattttgcagtcattgctcctaactgtagatacatgttgcaaaagtgatgtttttctgaattttttttaaaagtagaagactattctgttaaacattaaaattcagagacaacagtgataacacctgggatataatgaaaatgaggtgctgtgaatcagtaaactaaagggatacctgctttaacctgcaccttaatggaatctggtatagagatgtacccacaataaatgttttataagatttaagatcataatagtaggttagaggaagagcatttattaagtctgttgtttctaatctatagctaagttaacatttcccatattattccattttaatttcccattactgaccaaggtgaaagtatatgtgattgtacttttatctttctgttgggatcatggatctaatttaactggcttaatttgatgcttctgtcactaggctctaagtgccccttttttagtcagaagtttttcatgtgaaataatttgattctgtgttctgcttgatcatactcctaagcaagcaccaagggaagacgttctattcaccccacaatttaagcttaacaatctttaactcagagggagatatgaagaaatatgattctaagtagggtctagcagaggcattggaaagtgataaaagtaggaagtaagagaaagcaaacctttataaagagataaagacatagttgttacctaagatgccactgtatgtgtgccctctctttttttttttttttttttggagacagagactcactctgtcacccattctggagtgcagtggcgcaatcctggctcactgcaacctctgcctcccgggttcaagcatttctcctgcctcagcctcctgagtagctgggattacaggcacacgccacaatgcccggctaatttttgtatttttagtagagacggggtttcgccatgctaggctggtctcgaactcctgacctcatgatctgcctgtctcagcctcccaaatgcttggattacaggcttgagccaccacgcccggccatgtgtgtccttttaagggaagtaccatatgtgactgctgatggtaacatttcttgtatgcagcaggaaaacctgcaggctatacgcaaggtatgtgaataaagactgtggattgaagggggaaaagttgataatacatacccatgataagaattcatattttctctttctttgtctcttcatacagaagcaagttcgagcagagaaggttagcagttacagcacttaaaagtttaggattgagggtttttggttggtttttttgttttttcatatttcactgttgctgaacattgatttagtcttccaaaatggacatcactagtaagtgcactgaatactgaaatatgctgattggcaagcatatatctgtagctagaatttttttaaccgtaattccagaatttaaaaaggtaagagatctgctttttgatagaggccttttaaaaagactatataacatttctatttggctgtttatgtgaatgctcagggaatttggacatgtgttttatacagaagtggctttttatatttcttcaagtgataaattagcattaggacatatcagatagaacaggccagtttcctgatgagattggtagagatgttacggtaggttcatccttcctttttccatgttatatgtggagaagtgttaaacttgctcaagcaaatgggagtaggagataggctgaaaatagagattgctacaccattctattttgttttcatgcctgttttttctccaatcctatatggacatttgagaaatggaccacaaatctgagagggatagagtaaaaagaggcattaatgtatgtactcacaagttagacctattttgctgttaaaataggtctggtcttgttataggtcataggaattgtgtagtttgagttgctgcgagaaagagtcaagaacttagacttgaatgggaaggccaactggtgagggaagtggggtattatctactcaaatgttctaagctaatacaaaagaattacctggcaagcatccccctctgcccttcttgaaattctgaatgaacttagaatcagatcaatggtgagacccagttatgtaactttcctttgaagttctaaaggataattgaaaataaagtagtctggcatgtttaacagtaaggagtgacactaaaatttgaatataacagtatgttgcaactatttataatagacctatttatgttttgagaactaagtaaaatgctatgaaaaattcacataaagcacgtaagcaccaaatgaaaatcatttcgtgctttcaaattaatgatactaggcttgtaggatgtcttagaatcatgtttaacaagaagttaaaatatttgcattttgaaatttttatgcagtttggctaaggaggaacttggaaaataacattcatcagcttctacactgcactttttgtatgtggactttgtaaagtttaatgtccgtttaacagttgcttgtttatttgtgtaaacctagctagtaaatattgatgatgttcagggccactgacttgcacagcccttggagcactattcacacagaacacaattcagagtttgttaagacattaacacactttgatatctattccaaaaatacttttgttaccacaggttcattgctgtcatttagacaaaattaatgtactgtgatattttcctactcttaagatgatgttgcccagccgagtactgtcagaaattcagttctgatgtctgtgtgtgcaagatattaatgtggtccctgtaagaaataccagagttggtcatgatttactaaggagatgtaatattttctttgacctgttaggaatataacttgtgtcttgatttgttgcacatcatattttttgcaacattaatgaatttaaataaattaattggaacgtt

SEQ ID NO: 465 - DNA, 1509 bp, Homo sapiens
  source 1..1509: mol_type = genomic DNA
ctgtttgtatttggcagtttggccccccaccccgtcgcttttccgtttctggtagttgtgctcgggatggaaccttgcccctcctccgctcccccacccttttaccctggtgtgggtgaagtggctgggctacgatggttcagtatttatgaccagcgtccgtcctggtacagaacaaagaaacttggacttctggacattggctccctggattatcaagagtttgtagttgacattgaatccaggctgaggatggaaggtgtggaacttaaagaagaatggcaagatgaagattttccgatacctttaccagaagatgatagtattgaagcagatatactagctataactggaccagaggaccagcctggctcactagaagttaatggaaataaagtgagaaagaaactaatggctccagacattagcctgacactggatcctagtgatggctctgtattgtcagatgatttggatgaaagtggggagattgacttagatggcttagacacaccgtcagagaatagtaatgagtttgagtgggaagatgatcttccaaaacccaagactactgaagtaattaggaaaggctcaattactgaatacacagcagcagaggaaaaagaagatggacgacgctggcgtatgttcaggattggagaacaggaccacagggttgatatgaaggcaattgaaccctataaaaaagttatcagccatgggggatattatggggatggattaaatgccattgttgtgtttgctgtctgtttcatgcctgaaagtagtcagcctaactatagatacctgatggacaatctttttaaatatgttattggcactttggagctattagtagcagaaaactacatgatagtttatttaaatggtgcaacaactcgaagaaaaatgcccagtctgggatggctcaggaaatgttatcagcaaattgatagaaggttacggaaaaatctaaaatccctaatcattgtacatccttcttggtttatcagaacacttctggctgttacaagaccatttattagctcgaaattcagccaaaaaattagatacgtgtttaatttggcagaactagcagaacttgtccccatggaatacgttggcataccagaatgcataaaacaagttgatcaagaacttaatggaaaacaagatgaaccgaaaaatgaacagtaagtttggcatctagtccaaacaagactgaagaatgtgctgatggagcagtgctgtttctgcattcataatgcatttattggcccatatttttatgtaacctgttacaaaatagacttgactttttcataatggacttttgtattatacaagggactgttcactgctgtactggtttgcaaatttcttgaatttagctctttaatagctaactgtattattatcgttttatattttatattgctaaatagagaaccacactttatataaagtagtttttgcatttgtttattgaatgatgcatcttcttcggtg

SEQ ID NO: 466 - DNA, 1234 bp, Homo sapiens
  source 1..1234: mol_type = genomic DNA
ggactcggcttgttgtgttgctgcctgagtgccggagacggtcctgctgctgccgcagtcctgccagctgtccgacaatgtcgtcccacctagtcgagccgccgccgcccctgcacaacaacaacaacaactgcgaggaaaatgagcagtctctgcccccgccggccggcctcaacagttcctgggtggagctacccatgaacagcagcaatggcaatgataatggcaatgggaaaaatggggggctggaacacgtaccatcctcatcctccatccacaatggagacatggagaagattcttttggatgcacaacatgaatcaggacagagtagttccagaggcagttctcactgtgacagcccttcgccacaagaagatgggcagatcatgtttgatgtggaaatgcacaccagcagggaccatagctctcagtcagaagaagaagttgtagaaggagagaaggaagtcgaggctttgaagaaaagtgcggactgggtatcagactggtccagtagacccgaaaacattccacccaaggagttccacttcagacaccctaaacgttctgtgtctttaagcatgaggaaaagtggagccatgaagaaagggggtattttctccgcagaatttctgaaggtgttcattccatctctcttcctttctcatgttttggctttggggctaggcatctatattggaaagcgactgagcacaccctgccagcacctactgagggaaaggaaaagcccctggaaatgcgtgtgacctgtgaagtggtgtattgtcacagtagcttatttgaacttgagaccattgtaagcatgacccaacctaccaccctgtttttacatatccaattccagtaactctcaaattcaatattttattcaaactctgttgaggcattttactaaccttataccctttttggcctgaagacattttagaatttcctaacagagtttactgttgtttagaaatttgcaagggcttcttttccgcaaatgccaccagcagattataattttgtcagcaatgctattatctctaattagtgccaccagactagacctgtatcattcatggtataaattttactcttgcaacataactaccatctctctcttaaaacgagatcaggttagcaaatgatgtaaaagaagctttattgtctagttgttttttttcccccaagacaaaggcaagtttccctaagtttgagttgatagtta

SEQ ID NO: 467 - DNA, 3610 bp, Homo sapiens
  source 1..3610: mol_type = genomic DNA
gcgcgtcagcctgactcgagcgtctccacgtccggggcccgcaggggagcgcccctgccccgtccggtcgcttgttgtgttgtcatcacgtggcctgggcgggccctgacgtcaggggcaggggagggacggcgcaggcgcagaaaagggggcggcggactcggcttgttgtgttgctgcctgagtgccggagacggtcctgctgctgccgcagtcctgccagctgtccgacaatgtcgtcccacctagtcgagccgccgccgcccctgcacaacaacaacaacaactgcgaggaaaatgagcagtctctgcccccgccggccggcctcaacagttcctgggtggagctacccatgaacagcagcaatggcaatgataatggcaatgggaaaaatggggggctggaacacgtaccatcctcatcctccatccacaatggagacatggagaagattcttttggatgcacaacatgaatcaggacagagtagttccagaggcagttctcactgtgacagcccttcgccacaagaagatgggcagatcatgtttgatgtggaaatgcacaccagcagggaccatagctctcagtcagaagaagaagttgtagaaggagagaaggaagtcgaggctttgaagaaaagtgcggactgggtatcagactggtccagtagacccgaaaacattccacccaaggagttccacttcagacaccctaaacgttctgtgtctttaagcatgaggaaaagtggagccatgaagaaagggggtattttctccgcagaatttctgaaggtgttcattccatctctcttcctttctcatgttttggctttggggctaggcatctatattggaaagcgactgagcacaccctctgccagcacctactgagggaaaggaaaagcccctggaaatgcgtgtgacctgtgaagtggtgtattgtcacagtagcttatttgaacttgagaccattgtaagcatgacccaacctaccaccctgtttttacatatccaattccagtaactctcaaattcaatattttattcaaactctgttgaggcattttactaaccttataccctttttggcctgaagacattttagaatttcctaacagagtttactgttgtttagaaatttgcaagggcttcttttccgcaaatgccaccagcagattataattttgtcagcaatgctattatctctaattagtgccaccagactagacctgtatcattcatggtataaattttactcttgcaacataactaccatctctctcttaaaacgagatcaggttagcaaatgatgtaaaagaagctttattgtctagttgttttttttcccccaagacaaaggcaagtttccctaagtttgagttgatagttattaaaaagaaaacaaaacaaaaaaaaaaggcaaggcacaacaaaaaaatatcctgggcaataaaaaaaatattttaaaccagctttggagccacttttttgtctaagcctcctaatagcgtcttttaatttataggaggcaaactgtataaatgataggtatgaaatagaataagaagtaaaatacatcagcagattttcatactagtatgttgtaatgctgtcttttctatggtgtagaatctttctttctgataaggaacgtctcaggcttagaaatatatgaaattgctttttgagatttttgcgtgtgtgtttgatattttttacgataattagctgcatgtgaatttttcatgaccttctttacattttttattttttatttctttatttttttttctctaagaagaggctttggaatgagttccaatttgtgatgttaatacaggcttcttgttttaggaagcatcacctatactctgaagcctttaaactctgaagagaattgtttcagagttattccaagcacttgtgcaacttggaaaaacagacttgggttgtgggaacagttgacagcgttctgaaaagatgccatttgtttccttctgatctctcactgaataatgtttactgtacagtcttcccaaggtgattcctgcgactgcaggcactggtcattttctcatgtagctgtcttttcagttatggtaaactcttaaagttcagaacactcaacagattccttcagtgatatacttgttcgttcatttctaaaatgtgaagctttaggaccaaattgttagaaagcatcaggatgaccagttatctcgagtagattttcttggatttcagaacatctagcatgactctgaaggataccacatgttttatatataaataattactgtttatgatatagacattgatattgactatttagagaaccgttgttaattttaaaactagcaatctataaagtgcaccaggtcaacttgaataaaaacactatgacagacaggtttgccagtttgcagaaactaactcttttctcacatcaacatttgtaaaattgatgtgttatagtggaaaataacatatagattaaacaaaatttttatcttttttcaagaatatagctggctatctttaagaaagatgatatatcctagttttgaaagtaattttcttttttctttctagcatttgatgtctaaataattttggacatctttttcctagaccatgtttctgtcttactcttaaacctggtaacacttgatttgccttctataacctatttatttcaagtgttcatatttgaatttctttgggaagaaagtaaatctgatggctcactgatttttgaaaagcctgaataaaattggaaagactggaaagttaggagaactgactagctaaactgctacagtatgcaatttctattacaattggtattacaggggggaaaagtaaaattacactttacctgaaagtgacttcttacagctagtgcattgtgctctttccaagttcagcagcagttctatcagtggtgccactgaaactgggtatatttatgatttctttcagcgttaaaaagaaacatagtgttgccctttttcttaaagcatcagtgaaattatggaaaattacttaaaacgtgaatacatcatcacagtagaatttattatgagagcatgtagtatgtatctgtagccctaacacatgggatgaacgttttactgctacacccagatttgtgttgaacgaaaacattgtggtttggaaaggagaattcaacaattaatagttgaaattgtgaggttaatgtttaaaaagctttacacctgtttacaatttggggacaaaaaggcaggcttcatttttcatatgtttgatgaaaactggctcaagatgtttgtaaatagaatcaagagcaaaactgcacaaacttgcacattggaaagtgcaacaagttcccgtgattgcagtaaaaatatttactattctaaaaaaatgagaattgaagacttagccagtcagataagttttttcatgaacccgttgtggaaattattggaattaactgagccaaagtgattatgcattcttcatctattttagttagcactttgtatcgttatatacagtttacaatacatgtataacttgtagctataaacattttgtgccattaaagctctcacaaaactttt

SEQ ID NO: 468 - DNA, 1352 bp, Homo sapiens
  source 1..1352: mol_type = genomic DNA
gtggctccaccccttcaactttttgtccaagaaaacttttcgtgtttgcctgtagctgatgtgcagttgtttctgctcccaaatcaacagggtttaatgaaaaccctagaaagtagaaacccgtgggagagaaaagaaaaaagacaagttcacaaggttcctgggtggagctacccatgaacagcagcaatggcaatgataatggcaatgggaaaaatggggggctggaacacgtaccatcctcatcctccatccacaatggagacatggagaagattcttttggatgcacaacatgaatcaggacagagtagttccagaggcagttctcactgtgacagcccttcgccacaagaagatgggcagatcatgtttgatgtggaaatgcacaccagcagggaccatagctctcagtcagaagaagaagttgtagaaggagagaaggaagtcgaggctttgaagaaaagtgcggactgggtatcagactggtccagtagacccgaaaacattccacccaaggagttccacttcagacaccctaaacgttctgtgtctttaagcatgaggaaaagtggagccatgaagaaagggggtattttctccgcagaatttctgaaggtgttcattccatctctcttcctttctcatgttttggctttggggctaggcatctatattggaaagcgactgagcacaccctctgccagcacctactgagggaaaggaaaagcccctggaaatgcgtgtgacctgtgaagtggtgtattgtcacagtagcttatttgaacttgagaccattgtaagcatgacccaacctaccaccctgtttttacatatccaattccagtaactctcaaattcaatattttattcaaactctgttgaggcattttactaaccttataccctttttggcctgaagacattttagaatttcctaacagagtttactgttgtttagaaatttgcaagggcttcttttccgcaaatgccaccagcagattataattttgtcagcaatgctattatctctaattagtgccaccagactagacctgtatcattcatggtataaattttactcttgcaacataactaccatctctctcttaaaacgagatcaggttagcaaatgatgtaaaagaagctttattgtctagttgttttttttcccccaagacaaaggcaagtttccctaagtttgagttgatagttattaaaaagaaaacaaaacaaaaaaaaaaggcaaggcacaacaaaaaaatatcctgggcaataaaaaaaatattttaaaccagctttggagccacttttttgtctaagcctcctaatagcgtcttttaatttatagga

SEQ ID NO: 469 - DNA, 739 bp, Homo sapiens
  source 1..739: mol_type = genomic DNA
ctctgttgcctcctggggtcttgggcccggggccgtttgggctcgcggtccgggagcggcgcgggtagcgcggatccccctggttcctgggtggagctacccatgaacagcagcaatggcaatgataatggcaatgggaaaaatggggggctggaacacgtaccatcctcatcctccatccacaatggagacatggagaagattcttttggatgcacaacatgaatcaggacagagtagttccagaggcagttctcactgtgacagcccttcgccacaagaagatgggcagatcatgtttgatgtggaaatgcacaccagcagggaccatagctctcagtcagaagaagaagttgtagaaggagagaaggaagtcgaggctttgaagaaaagtgcggactgggtatcagactggtccagtagacccgaaaacattccacccaaggagttccacttcagacaccctaaacgttctgtgtctttaagcatgaggaaaagtggagccatgaagaaagggggtattttctccgcagaatttctgaaggtgttcattccatctctcttcctttctcatgttttggctttggggctaggcatctatattggaaagcgactgagcacaccctctgccagcacctactgagggaaaggaaaagcccctggaaatgcgtgtgacctgtgaagtggtgtattgtcacagtagcttatttgaacttgagaccattgtaagcatgacccaa

SEQ ID NO: 470 - DNA, 915 bp, Homo sapiens
  source 1..915: mol_type = genomic DNA
ctgtcaagaggaggggcgcctgccttgctccgggcctctctgttgcctcctggggtcttgggcccggggccgtttgggctcgcggtccgggagcggcgcgggttcctgggtggagctacccatgaacagcagcaatggcaatgataatggcaatgggaaaaatggggggctggaacacgtaccatcctcatcctccatccacaatggagacatggagaagattcttttggatgcacaacatgaatcaggacagagtagttccagaggcagttctcactgtgacagcccttcgccacaagaagatgggcagatcatgtttgatgtggaaatgcacaccagcagggaccatagctctcagtcagaagaagaagttgtagaaggagagaaggaagtcgaggctttgaagaaaagtgcggactgggtatcagactggtccagtagacccgaaaacattccacccaaggagttccacttcagacaccctaaacgttctgtgtctttaagcatgaggaaaagtggagccatgaagaaagggggtattttctccgcagaatttctgaaggtgttcattccatctctcttcctttctcatgttttggctttggggctaggcatctatattggaaagcgactgagcacaccctctgccagcacctactgagggaaaggaaaagcccctggaaatgcgtgtgacctgtgaagtggtgtattgtcacagtagcttatttgaacttgagaccattgtaagcatgacccaacctaccaccctgtttttacatatccaattccagtaactctcaaattcaatattttattcaaactctgttgaggcattttactaaccttataccctttttggcctgaagacattttagaatttcctaacagagtttactgttgtttagaaatttgcaa

SEQ ID NO: 471 - DNA, 1321 bp, Homo sapiens
  source 1..1321: mol_type = genomic DNA
atgatcactggagtctcgcgggtccctcgggctgcacagggacaagtaaaggctacatccagatgccgggaatgcactgacgcccattcctggaaactgggctcccactcagcccctgggagcagcagccgccagcccctcgggacctccatctccaccctgctgagccacccgggttgggccaggatcccggcagacttcactgggacccatgctggagtaagaataaaaagtcccagaggaggccaggcacggtggctcacacctgtaatcccagcactgtggatggccgaggcagactcacgaggctgatcccgtcctccactgagacctgaaaaatggcttcggggcaaggcccaggtcctcccaggcaggagtgcggagagcctgccctgccctctgcttctgaggagcaggtagcccaggacacagaggaggttttccgcagctacgttttttaccgccatcagcaggaacaggaggctgaaggggtggctgcccctgccgacccagagatggtcaccttacctctgcaacctagcagcaccatggggcaggtgggacggcagctcgccatcatcggggacgacatcaaccgacgctatgactcagagttccagaccatgttgcagcacctgcagcccacggcagagaatgcctatgagtacttcaccaagattgccaccagcctgtttgagagtggcatcaattggggccgtgtggtggctcttctgggcttcggctaccgtctggccctacacgtctaccagcatggcctgactggcttcctaggccaggtgacccgcttcgtggtcgacttcatgctgcatcactgcattgcccggtggattgcacagaggggtggctgggtggcagccctgaacttgggcaatggtcccatcctgaacgtgctggtggttctgggtgtggttctgttgggccagtttgtggtacgaagattcttcaaatcatgactcccaagggtgccctttggggtcccggttcagacccctgcctggacttaagcgaagtctttgccttctctgttcccttgcaggggtcccccctcaagagtacagaagctttagcaagtgtgcactccagcttcggagggcccctgcgtgggggccagtcaggctgcagaggcacctcaacattgcatggtgctagtgggccctctctctgggcccaggggctgtggccgtctcctccctcagctctctgggacctccttagccctgtctgctaggcgctggggagactgataacttggggaggcaagagactgggagccacttctccccagaaagtgtttaacggt

SEQ ID NO: 472 - DNA, 2132 bp, Homo sapiens
  source 1..2132: mol_type = genomic DNA
gtctgcatccggtggccacagagcaacttcctctagagggagctgattggagccgggtgccgctggcacctctatgatcactggagtctcgcgggtccctcgggctgcacagggacaagtaaaggctacatccagatgccgggaatgcactgacgcccattcctggaaactgggctcccactcagcccctgggagcagcagccgccagcccctcgggacctccatctccaccctgctgagccacccgggttgggccaggatcccggcaggctgatcccgtcctccactgagacctgaaaaatggcttcggggcaaggcccaggtcctcccaggcaggagtgcggagagcctgccctgccctctgcttctgaggagcaggtagcccaggacacagaggaggttttccgcagctacgttttttaccgccatcagcagcaacctagcagcaccatggggcaggtgggacggcagctcgccatcatcggggacgacatcaaccgacgctatgactcagagttccagaccatgttgcagcacctgcagcccacggcagagaatgcctatgagtacttcaccaagattgccaccagcctgtttgagagtggcatcaattggggccgtgtggtggctcttctgggcttcggctaccgtctggccctacacgtctaccagcatggcctgactggcttcctaggccaggtgacccgcttcgtggtcgacttcatgctgcatcactgcattgcccggtggattgcacagaggggtggctgggtggcagccctgaacttgggcaatggtcccatcctgaacgtgctggtggttctgggtgtggttctgttgggccagtttgtggtacgaagattcttcaaatcatgactcccaagggtgccctttggggtcccggttcagacccctgcctggacttaagcgaagtctttgccttctctgttcccttgcaggggtcccccctcaagagtacagaagctttagcaagtgtgcactccagcttcggagggcccctgcgtgggggccagtcaggctgcagaggcacctcaacattgcatggtgctagtgggccctctctctgggcccaggggctgtggccgtctcctccctcagctctctgggacctccttagccctgtctgctaggcgctggggagactgataacttggggaggcaagagactgggagccacttctccccagaaagtgtttaacggttttagctttttataatacccttgtgagagcccattcccaccattctacctgaggccaggacgtctggggtgtggggattggtgggtctatgttccccaggattcagctattctggaagatcagcaccctaagagatgggactaggacctgagcctggtcctggccgtccctaagcatgtgtcccaggagcaggacctactaggagaggggggccaaggtcctgctcaactctacccctgctcccattcctccctccggccatactgcctttgcagttggactctcagggattctgggcttggggtgtggggtggggtggagtcgcagaccagagctgtctgaactcacgtgtcagaagcctccaagcctgcctcccaaggtcctctcagttctctcccttcctctctccttatagacacttgctcccaacccattcactacaggtgaaggctctcacccccatccctgggggccttgggtgagtggcctgctaaggctcctccttgcccagactacagggcttaggacttggtttgttatatcagggaaaaggagtagggagttcatctggagggttctaagtgggagaaggactatcaacaccactaggaatcccagaggtgggatcctccctcatggctctggcacagtgtaatccaggggtgtagatgggggaactgtgaatacttgaactctgttcccccaccctccatgctcctcacctgtctaggtctcctcagggtggggggtgacagtgccttctctattgggcacagcctagggtcttgggggtcaggggggagaagttcttgattcagccaaatgcagggaggggaggcagatggagcccataggccaccccctatcctctgagtgtttggaaataaactgtgcaatcccctcaccctg

SEQ ID NO: 473 - DNA, 2136 bp, Homo sapiens
  source 1..2136: mol_type = genomic DNA
gccgggtgccgctggcacctctatgatcactggagtctcgcgggtccctcgggctgcacagggacaagtaaaggctacatccagatgccgggaatgcactgacgcccattcctggaaactgggctcccactcagcccctgggagcagcagccgccagcccctcgggacctccatctccaccctgctgagccacccgggttgggccaggatcccggcaggctgatcccgtcctccactgagacctgaaaaatggcttcggggcaaggcccaggtcctcccaggcaggagtgcggagagcctgccctgccctctgcttctgaggagcaggtagcccaggacacagaggaggttttccgcagctacgttttttaccgccatcagcaggaacaggaggctgaaggggtggctgcccctgccgacccagagatggtcaccttacctctgcaacctagcagcaccatggggcaggtgggacggcagctcgccatcatcggggacgacatcaaccgacgctatgactcagagttccagaccatgttgcagcacctgcagcccacggcagagaatgcctatgagtacttcaccaagattgccaccagcctgtttgagagtggcatcaattggggccgtgtggtggctcttctgggcttcggctaccgtctggccctacacgtctaccagcatggcctgactggcttcctaggccaggtgacccgcttcgtggtcgacttcatgctgcatcactgcattgcccggtggattgcacagaggggtggctgggtggcagccctgaacttgggcaatggtcccatcctgaacgtgctggtggttctgggtgtggttctgttgggccagtttgtggtacgaagattcttcaaatcatgactcccaagggtgccctttggggtcccggttcagacccctgcctggacttaagcgaagtctttgccttctctgttcccttgcaggggtcccccctcaagagtacagaagctttagcaagtgtgcactccagcttcggagggcccctgcgtgggggccagtcaggctgcagaggcacctcaacattgcatggtgctagtgggccctctctctgggcccaggggctgtggccgtctcctccctcagctctctgggacctccttagccctgtctgctaggcgctggggagactgataacttggggaggcaagagactgggagccacttctccccagaaagtgtttaacggttttagctttttataatacccttgtgagagcccattcccaccattctacctgaggccaggacgtctggggtgtggggattggtgggtctatgttccccaggattcagctattctggaagatcagcaccctaagagatgggactaggacctgagcctggtcctggccgtccctaagcatgtgtcccaggagcaggacctactaggagaggggggccaaggtcctgctcaactctacccctgctcccattcctccctccggccatactgcctttgcagttggactctcagggattctgggcttggggtgtggggtggggtggagtcgcagaccagagctgtctgaactcacgtgtcagaagcctccaagcctgcctcccaaggtcctctcagttctctcccttcctctctccttatagacacttgctcccaacccattcactacaggtgaaggctctcacccccatccctgggggccttgggtgagtggcctgctaaggctcctccttgcccagactacagggcttaggacttggtttgttatatcagggaaaaggagtagggagttcatctggagggttctaagtgggagaaggactatcaacaccactaggaatcccagaggtgggatcctccctcatggctctggcacagtgtaatccaggggtgtagatgggggaactgtgaatacttgaactctgttcccccaccctccatgctcctcacctgtctaggtctcctcagggtggggggtgacagtgccttctctattgggcacagcctagggtcttgggggtcaggggggagaagttcttgattcagccaaatgcagggaggggaggcagatggagcccataggccaccccctatcctctgagtgtttggaaataaactgtgcaatcccctca

SEQ ID NO: 474 - DNA, 2117 bp, Homo sapiens
  source 1..2117: mol_type = genomic DNA
cgcgggtccctcgggctgcacagggacaagtaaaggctacatccagatgccgggaatgcactgacgcccattcctggaaactgggctcccactcagcccctgggagcagcagccgccagcccctcgggacctccatctccaccctgctgagccacccgggttgggccaggatcccggcaggctgatcccgtcctccactgagacctgaaaaatggcttcggggcaaggcccaggtcctcccaggcaggagtgcggagagcctgccctgccctctgcttctgaggagcaggtagcccaggacacagaggaggttttccgcagctacgttttttaccgccatcagcaggaacaggaggctgaaggggtggctgcccctgccgacccagagatggtcaccttacctctgcaacctagcagcaccatggggcaggtgggacggcagctcgccatcatcggggacgacatcaaccgacgctatgactcagagttccagaccatgttgcagcacctgcagcccacggcagagaatgcctatgagtacttcaccaagattgccaccaggccagcagcaacacccacagcctgtttgagagtggcatcaattggggccgtgtggtggctcttctgggcttcggctaccgtctggccctacacgtctaccagcatggcctgactggcttcctaggccaggtgacccgcttcgtggtcgacttcatgctgcatcactgcattgcccggtggattgcacagaggggtggctgggtggcagccctgaacttgggcaatggtcccatcctgaacgtgctggtggttctgggtgtggttctgttgggccagtttgtggtacgaagattcttcaaatcatgactcccaagggtgccctttggggtcccggttcagacccctgcctggacttaagcgaagtctttgccttctctgttcccttgcaggggtcccccctcaagagtacagaagctttagcaagtgtgcactccagcttcggagggcccctgcgtgggggccagtcaggctgcagaggcacctcaacattgcatggtgctagtgggccctctctctgggcccaggggctgtggccgtctcctccctcagctctctgggacctccttagccctgtctgctaggcgctggggagactgataacttggggaggcaagagactgggagccacttctccccagaaagtgtttaacggttttagctttttataatacccttgtgagagcccattcccaccattctacctgaggccaggacgtctggggtgtggggattggtgggtctatgttccccaggattcagctattctggaagatcagcaccctaagagatgggactaggacctgagcctggtcctggccgtccctaagcatgtgtcccaggagcaggacctactaggagaggggggccaaggtcctgctcaactctacccctgctcccattcctccctccggccatactgcctttgcagttggactctcagggattctgggcttggggtgtggggtggggtggagtcgcagaccagagctgtctgaactcacgtgtcagaagcctccaagcctgcctcccaaggtcctctcagttctctcccttcctctctccttatagacacttgctcccaacccattcactacaggtgaaggctctcacccccatccctgggggccttgggtgagtggcctgctaaggctcctccttgcccagactacagggcttaggacttggtttgttatatcagggaaaaggagtagggagttcatctggagggttctaagtgggagaaggactatcaacaccactaggaatcccagaggtgggatcctccctcatggctctggcacagtgtaatccaggggtgtagatgggggaactgtgaatacttgaactctgttcccccaccctccatgctcctcacctgtctaggtctcctcagggtggggggtgacagtgccttctctattgggcacagcctagggtcttgggggtcaggggggagaagttcttgattcagccaaatgcagggaggggaggcagatggagcccataggccaccccctatcctctgagtgtttggaaataaactgtgcaatcccctc

SEQ ID NO: 475 - DNA, 929 bp, Homo sapiens
  source 1..929: mol_type = genomic DNA
cggcaggcccgggtcaggggcctcgagatcgggcttgggcccagagcatgttccagatcccagagtttgagccgagtgagcaggaagactccagctctgcagagaggggcctgggccccagccccgcaggggacgggccctcaggctccggcaagcatcatcgccaggccccaggcctcctgtgggacgccagtcaccagcaggagcagccaaccagcagcagccatcatggaggcgctggggctgtggagatccggagtcgccacagctcctaccccgcggggacggaggacgacgaagggatgggggaggagcccagcccctttcggggccgctcgcgctcggcgccccccaacctctgggcagcacagcgctatggccgcgagctccggaggatgagtgacgagtttgtggactcctttaagaagggacttcctcgcccgaagagcgcgggcacagcaacgcagatgcggcaaagctccagctggacgcgagtcttccagtcctggtgggatcggaacttgggcaggggaagctccgccccctcccagtgaccttcgctccacatcccgaaactccacccgttcccactgccctgggcagccatcttgaatatgggcggaagtacttccctcaggcctatgcaaaaagaggatccgtgctgtctcctttggagggagggctgacccagattcccttccggtgcgtgtgaagccacggaaggcttggtcccatcggaagttttgggttttccgcccacagccgccggaagtggctccgtggccccgccctcaggctccgggctttcccccaggcgcctgcgctaagtcgcgagccaggtttaaccgttgcgtcaccgggacccgagcccccgcgatgccctgggggccgtgctcactaccaaatgttaataaagcccgcgtctgtgc

SEQ ID NO: 476 - DNA, 1157 bp, Homo sapiens
  source 1..1157: mol_type = genomic DNA
gggcttggggtgagacctgtgcgccgtcaccacgggcggggcggggcctgggtccaccggggttctgaggggagactgaggtcctgagccgacagcctcagctccctgccaggccagacccggcagacagatgagggcccaggaggcctggcgggcctgggggcgctacggtgggagaggaagccaggggtacctgcctctgccttccagggccaccgttggccccagctgtgccttgactacgtaacatcttgtcctcacagcccagagcatgttccagatcccagagtttgagccgagtgagcaggaagactccagctctgcagagaggggcctgggccccagccccgcaggggacgggccctcaggctccggcaagcatcatcgccaggccccaggcctcctgtgggacgccagtcaccagcaggagcagccaaccagcagcagccatcatggaggcgctggggctgtggagatccggagtcgccacagctcctaccccgcggggacggaggacgacgaagggatgggggaggagcccagcccctttcggggccgctcgcgctcggcgccccccaacctctgggcagcacagcgctatggccgcgagctccggaggatgagtgacgagtttgtggactcctttaagaagggacttcctcgcccgaagagcgcgggcacagcaacgcagatgcggcaaagctccagctggacgcgagtcttccagtcctggtgggatcggaacttgggcaggggaagctccgccccctcccagtgaccttcgctccacatcccgaaactccacccgttcccactgccctgggcagccatcttgaatatgggcggaagtacttccctcaggcctatgcaaaaagaggatccgtgctgtctcctttggagggagggctgacccagattcccttccggtgcgtgtgaagccacggaaggcttggtcccatcggaagttttgggttttccgcccacagccgccggaagtggctccgtggccccgccctcaggctccgggctttcccccaggcgcctgcgctaagtcgcgagccaggtttaaccgttgcgtcaccgggacccgagcccccgcgatgccctgggggccgtgctcactaccaaatgttaataaagcccgcgtctgtgccgcc

SEQ ID NO: 477 - DNA, 634 bp, Homo sapiens
  source 1..634: mol_type = genomic DNA
actagggcccggagcccggggtgctggagggaggcggcaggcccgggtcaggggcctcgagatcgggcttgggcccagagcatgttccagatcccagagtttgagccgagtgagcaggaagactccagctctgcagagaggggcctgggccccagccccgcaggggacgggccctcaggctccggcaagcatcatcgccaggccccaggcctcctgtgggacgccagtcaccagcaggagcagccaaccagcagcagccatcatggaggcgctggggctgtggagatccggagtcgccacagctcctaccccgcggggacggaggacgacgaagggatgggggaggagcccagcccctttcggggccgctcgcgctcggcgccccccaacctctgggcagcacagcgctatggccgcgagctccggaggatgagtgacgagtttgtggactcctttaagaagggacttcctcgcccgaagagcgcgggcacagcaacgcagatgcggcaaagctccaggcgcctgcgctaagtcgcgagccaggtttaaccgttgcgtcaccgggacccgagcccccgcgatgccctgggggccgtgctcactaccaaatgttaataaagcccgcgtctgtgcc

SEQ ID NO: 478 - DNA, 1038 bp, Homo sapiens
  source 1..1038: mol_type = genomic DNA
tagtcgggcggggttgtgagacgccgcgctcagcttccatcgctgggcggtcaacaagtgcgggcctggctcagcgcgggggggcgcggagaccgcgaggcgaccgggagcggctgggttcccggctgcgcgcccttcggccaggccgggagccgcgccagtcggagcccccggcccagcgtggtccgcctccctctgggcgtccacctgcccggagtactgccagcgggcatgaccgacccaccaggggcgccgccgccggcgctcgcaggccgcggatgaagaagaaaacccggcgccgctcgacccggagcgaggagttgacccggagcgaggagttgaccctgagtgaggaagcgacctggagtgaagaggcgacccagagtgaggaggcgacccagggcgaagagatgaatcggagccaggaggtgacccgggacgaggagtcgacccggagcgaggaggtgaccagggaggaaatggcggcagctgggctcaccgtgactgtcacccacagcaatgagaagcacgaccttcatgttacctcccagcagggcagcagtgaaccagttgtccaagacctggcccaggttgttgaagaggtcataggggttccacagtcttttcagaaactcatatttaagggaaaatctctgaaggaaatggaaacaccgttgtcagcacttggaatacaagatggttgccgggtcatgttaattgggaaaaagaacagtccacaggaagaggttgaactaaagaagttgaaacatttggagaagtctgtggagaagatagctgaccagctggaagagttgaataaagagcttactggaatccagcagggttttctgcccaaggatttgcaagctgaagctctctgcaaacttgataggagagtaaaagccacaatagagcagtttatgaagatcttggaggagattgacacactgatcctgccagaaaattttcctactctcacactggttctcaatgaaaaatagtgtctttgtgattttgagtaaagctcctatctgtttt

SEQ ID NO: 479 - DNA, 1268 bp, Homo sapiens
  source 1..1268: mol_type = genomic DNA
gcaggccggggcggggctgggaagtagtcgggcggggttgtgagacgccgcgctcagcttccatcgctgggcggtcaacaagtgcgggcctggctcagcgcgggggggcgcggagaccgcgaggcgaccgggagcggctgggttcccggctgcgcgcccttcggccaggccgggagccgcgccagtcggagcccccggcccagcgtggtccgcctccctctgggcgtccacctgcccggagtactgccagcgggcatgaccgacccaccaggggcgccgccgccggcgctcgcaggccgcggatgaagaagaaaacccggcgccgctcgacccggagcgaggagttgacccggagcgaggagttgaccctgagtgaggaagcgacctggagtgaagaggcgacccagagtgaggaggcgacccagggcgaagagatgaatcggagccaggaggtgacccgggacgaggagtcgacccggagcgaggaggtgaccagggaggaaatggcggcagctgggctcaccgtgactgtcacccacagcaatgagaagcacgaccttcatgttacctcccagcagggcagcagtgaaccagttgtccaagacctggcccaggttgttgaagaggtcataggggttccacagtcttttcagaaactcatatttaagggaaaatctctgaaggaaatggaaacaccgttgtcagcacttggaatacaagatggttgccgggtcatgttaattgggaaaaagaacagtccacaggaagaggttgaactaaagaagttgaaacatttggagaagtctgtggagaagatagctgaccagctggaagagttgaataaagagcttactggaatccagcagggttttctgcccaaggatttgcaagctgaagctctctgcaaacttgataggagagtaaaagccacaatagagcagtttatgaagatcttggaggagattgacacactgatcctgccagaaaatttcaaagacagtagattgaaaaggaaaggcttggtaaaaaaggttcaggcattcctagccgagtgtgacacagtggagcagaacatctgccaggagactgagcggctgcagtctacaaactttgccctggccgagtgaggtgtagcagaaaaaggctgtgctgccctgaagaatggcgccaccagctctgccgtctctggagcggaatttacctgatttcttcagggctgctgggggcaactggccatttgccaattttcctactctcacactggttct

SEQ ID NO: 480 - DNA, 3865 bp, Homo sapiens
  source 1..3865: mol_type = genomic DNA
aggccggggcggggctgggaagtagtcgggcggggttgtgagacgccgcgctcagcttccatcgctgggcggtcaacaagtgcgggcctggctcagcgcgggggggcgcggagaccgcgaggcgaccgggagcggctgggttcccggctgcgcgcccttcggccaggccgggagccgcgccagtcggagcccccggcccagcgtggtccgcctccctctgggcgtccacctgcccggagtactgccagcgggcatgaccgacccaccaggggcgccgccgccggcgctcgcaggccgcggatgaagaagaaaacccggcgccgctcgacccggagcgaggagttgacccggagcgaggagttgaccctgagtgaggaagcgacctggagtgaagaggcgacccagagtgaggaggcgacccagggcgaagagatgaatcggagccaggaggtgacccgggacgaggagtcgacccggagcgaggaggtgaccagggaggaaatggcggcagctgggctcaccgtgactgtcacccacagcaatgagaagcacgaccttcatgttacctcccagcagggcagcagtgaaccagttgtccaagacctggcccaggttgttgaagaggtcataggggttccacagtcttttcagaaactcatatttaagggaaaatctctgaaggaaatggaaacaccgttgtcagcacttggaatacaagatggttgccgggtcatgttaattgggaaaaagaacagtccacaggaagaggttgaactaaagaagttgaaacatttggagaagtctgtggagaagatagctgaccagctggaagagttgaataaagagcttactggaatccagcagggttttctgcccaaggatttgcaagctgaagctctctgcaaacttgataggagagtaaaagccacaatagagcagtttatgaagatcttggaggagattgacacactgatcctgccagaaaatttcaaagacagtagattgaaaaggaaaggcttggtaaaaaaggttcaggcattcctagccgagtgtgacacagtggagcagaacatctgccaggagactgagcggctgcagtctacaaactttgccctggccgagtgaggtgtagcagaaaaaggctgtgctgccctgaagaatggcgccaccagctctgccgtctctggagcggaatttacctgatttcttcagggctgctgggggcaactggccatttgccaattttcctactctcacactggttctcaatgaaaaatagtgtctttgtgattttgagtaaagctcctatctgttttctccttctgtctctgtggttgtactgtccagcaatccaccttttctggagagggccacctctgcccaaattttcccagctgtttggacctctgggtgctttctttgggctggtgagagctctaatttgccttgggccagtttcaggtttataggccccctcagtcttcagatacatgagggcttctttgctcttgtgatcgtgtagtcccatagctgtaaaaccagaatcaccaggaggttgcacctagtcaggaatattgggaatggcctagaacaaggtgtttggcacataagtagaccacttatccctcattgtgacctaattccagagcatctggctgggttgttgggttctagactttgtcctcacctcccagtgaccctgactagccacaggccatgagataccagggggccgttccttggatggagcctgtggttgatgcaaggcttccttgtccccaagcaagtcttcagaaggttagaacccagtgttgactgagtctgtgcttgaaaccaggccagagccatggattaggaagggcaaagagaaggcaccagaatgagtaaagcaggcaggtggtgaagccaaccataaacttctcaggagtgacatgtgcttccttcaaaggcatttttgttaaccatatccttctgagttctatgtttccttcacagctgttctatccattttgtggactgtcccccacccccaccccatcattgtttttaaaaaattaaggcctggcgcagcagctcatgcctataatcccagcactttgggaggctgaggcgggcggatcacttgaggccaggagtttgagaccagcccaggcaacatagcaaaaccccattctgctttaaaaaaaaaaaaaaaaaaaattagcttggcgtagtggcatgtgcctataatcccagctactggggaggctgaggcacaagaatcatttgaacctgggaggtagaggttgctgtgagccgagattacgcccctgcactccagcctgggtcacagagtgagactccatctcagaaaaaaaaaaaattgagtcaggtgcagtagctccttcctgtagtcccagctacttgggaggctgaggctagaggatcacttgagcccaggagtttgagtctagtctgggcaacatagcaagaccccatctctaaaatttaagtaagtaaaagtagataaataaaaagaaaaaaaaactgtttatgtgctcatcataaagtagaagagtggtttgcttttttttttttttttggattaatgaggaaatcattctgtggctctagtcataatttatgcttaataacattgatagtagccctttgcgctataactctacctaaagactcacatcatttggcagagagagagtcgttgaagtcccaggaattcaggactgggcaggttaagacctcagacaaggtagtagaggtagacttgtggacaaggctcgggtcccagcccaccgcaccccaactttaatcagagtggttcactattgatctatttttgtgtgatagctgtgtggcgtgggccacaacatttaatgagaagttactgtgcaccaaactgccgaacaccattctaaactattcatatatattagtcatttaattcttacataacttgagaggtagacagatatccttattttagagatgaggaaaccaagagaacttaggtcattagcgcaaggttgtagagtaagcggcaaagccaagacacaaagctgggtggtttggtttcagagccagtgcttttcccctctactgtactgcctctcaaccaacacagggttgcacaggcccattctctgatttttttcctcttgtcctctgcctctccctctagctcccacttcctctctgctctagttcattttctttagagcagcccgagtgatcatgaagtgcaaatcttgccatgtcagtcccctgcttagaaccctccaatggctcactttctctttaggcaaaagtctttaccccatgccttctcccatctcatctcaaccccctcatttgttggctgtctgctgtcagccactcttctttcaggtcctcagatgcactgcaccctctcctgcctgggggtctttgctcctgctactacctctgcttgaacagctcctcaccttccttcctccaaccctacccttgtataggtgacttttgttcatccttcagaattcaactcacatgtctcttgcatggagaaccctcacctactgtgttgagaccctgtccagcccccaggtgggatcctctctcgacttcccatacatttctttcacagcatttacatagtccatgatagtttacttgtgggattatttggttaatctttgcctttaacaccagggttccttgggtgaaggagcttctttatcttggtaacagcattatttcaagcataacttgtaatatagttatattacatatataacatatatatatataacataacatatataacatatataacaagcataacttgttatatagtcttgtatatagtaagacctcaataaatatttgg

SEQ ID NO: 481 - DNA, 2571 bp, Homo sapiens
  source 1..2571: mol_type = genomic DNA
gcggagctccgcatccaaccccgggccgcggccaacttctctggactggaccagaagtttctagccggccagttgctacctccctttatctcctccttcccctctggcagcgaggaggctatttccagacacttccacccctctctggccacgtcacccccgcctttaattcataaaggtgcccggcgccggcttcccggacacgtcggcggcggagaggggcccacggcggcggcccggccagagactcggcgcccggagccagcgccccgcacccgcgccccagcgggcagaccccaacccagcatgagcgccgccacccactcgcccatgatgcaggtggcgtccggcaacggtgaccgcgaccctttgccccccggatgggagatcaagatcgacccgcagaccggctggcccttcttcgtggaccacaacagccgcaccactacgtggaacgacccgcgcgtgccctctgagggccccaaggagactccatcctctgccaatggcccttcccgggagggctctaggctgccgcctgctagggaaggccaccctgtgtacccccagctccgaccaggctacattcccattcctgtgctccatgaaggcgctgagaaccggcaggtgcaccctttccatgtctatccccagcctgggatgcagcgattccgaactgaggcggcagcagcggctcctcagaggtcccagtcacctctgcggggcatgccagaaaccactcagccagataaacagtgtggacaggtggcagcggcggcggcagcccagcccccagcctcccacggacctgagcggtcccagtctccagctgcctctgactgctcatcctcatcctcctcggccagcctgccttcctccggcaggagcagcctgggcagtcaccagctcccgcgggggtacatctccattccggtgatacacgagcagaacgttacccggccagcagcccagccctccttccaccaagcccagaagacgcactacccagcgcagcagggggagtaccagacccaccagcctgtgtaccacaagatccagggggatgactgggagccccggcccctgcgggcggcatccccgttcaggtcatctgtccagggtgcatcgagccgggagggctcaccagccaggagcagcacgccactccactccccctcgcccatccgtgtgcacaccgtggtcgacaggcctcagcagcccatgacccatcgagaaactgcacctgtttcccagcctgaaaacaaaccagaaagtaagccaggcccagttggaccagaactccctcctggacacatcccaattcaagtgatccgcaaagaggtggattctaaacctgtttcccagaagcccccacctccctctgagaaggtagaggtgaaagttccccctgctccagttccttgtcctcctcccagccctggcccttctgctgtcccctcttcccccaagagtgtggctacagaagagagggcagcccccagcactgcccctgcagaagctacacctccaaaaccaggagaagccgaggctcccccaaaacatccaggagtgctgaaagtggaagccatcctggagaaggtacaggggctggagcaggctgtagacaactttgaaggcaagaagactgacaaaaagtacctgatgatcgaagagtatttgaccaaagagctgctggccctggattcagtggaccccgagggacgagccgatgtgcgtcaggccaggagagacggtgtcaggaaggttcagaccatcttggaaaaacttgaacagaaagccattgatgtcccaggtcaagtccaggtctatgaactccagcccagcaaccttgaagcagatcagccactgcaggcaatcatggagatgggtgccgtggcagcagacaagggcaagaaaaatgctggaaatgcagaagatccccacacagaaacccagcagccagaagccacagcagcagcgacttcaaaccccagcagcatgacagacacccctggtaacccagcagcaccgtagcctctgccctgtaaaaatcagactcggaaccgatgtgtgctttagggaattttaagttgcatgcatttcagagactttaagtcagttggtttttattagctgcttggtatgcagtaacttgggtggaggcaaaacactaataaaagggctaaaaaggaaaatgatgcttttcttctatattcttactctgtacaaataaagaagttgcttgttgtttgagaagtttaaccccgttgcttgttgttctgcagccctgtctacttgggcacccccaccacctgttagctgtggttgtgcactgtcttttgtagctctggactggaggggtagatggggagtcaattacccatcacataaatatgaaacatttatcagaaatgttgccattttaatgagatgattttcttcatctcataattaaaatacctgactttagagagagtaaaatgtgccaggagccataggaatatctgtatgttggatgactttaatgctacattttaaaaaaagaaaataaagtaataatataactcaaaa

SEQ ID NO: 482 - DNA, 1146 bp, Homo sapiens
  source 1..1146: mol_type = genomic DNA
tcatgtggcacatgtgataccatgtgaggtatctggtgttactaagtcgtcacgtatttcgatgaagggtccacaggctcagaaaagatggaacgagtgactgtggagaagggtagaacatgggcctgcccagagcgcgaaggcagatacagaagagctgcccgtgaaggatgcaggagactccatcctctgccaatggcccttcccgggagggctctaggctgccgcctgctagggaaggccaccctgtgtacccccagctccgaccaggctacattcccattcctgtgctccatgaaggcgctgagaaccggcaggtgcaccctttccatgtctatccccagcctgggatgcagcgattccgaactgaggcggcagcagcggctcctcagaggtcccagtcacctctgcggggcatgccagaaaccactcagccagataaacagtgtggacaggtggcagcggcggcggcagcccagcccccagcctcccacggacctgagcggtcccagtctccagctgcctctgactgctcatcctcatcctcctcggccagcctgccttcctccggcaggagcagcctgggcagtcaccagctcccgcgggggtacatctccattccggtgatacacgagcagaacgttacccggccagcagcccagccctccttccaccaagcccagaagacgcactacccagcgcagcagggggagtaccagacccaccagcctgtgtaccacaagatccagggggatgactgggagccccggcccctgcgggcggcatccccgttcaggtcatctgtccagggtgcatcgagccgggagggctcaccagccaggagcagcacgccactccactccccctcgcccatccgtgtgcacaccgtggtcgacaggcctcagcccatgacccatcgagaaactgcacctgtttcccagcctgaaaacaaaccagaaagtaagccaggcccagttggaccagaactccctcctggacacatcccaattcaagtgatccgcaaagaggtggattctaaacctgtttcccagaagcccccacctccctctgagaaggtagaggtgaaagttccccctgctccagttccttgtcctcctcccagccctggcccttctgctgtcccct

SEQ ID NO: 483 - DNA, 1358 bp, Homo sapiens
  source 1..1358: mol_type = genomic DNA
atggacgggtccggggagcagcccagaggcggggggcccaccagctctgagcagatcatgaagacaggggcccttttgcttcagggtttcatccaggatcgagcagggcgaatggggggggaggcacccgagctggccctggacccggtgcctcaggatgcgtccaccaagaagctgagcgagtgtctcaagcgcatcggggacgaactggacagtaacatggagctgcagaggatgattgccgccgtggacacagactccccccgagaggtctttttccgagtggcagctgacatgttttctgacggcaacttcaactggggccgggttgtcgcccttttctactttgccagcaaactggtgctcaaggccctgtgcaccaaggtgccggaactgatcagaaccatcatgggctggacattggacttcctccgggagcggctgttgggctggatccaagaccagggtggttgggtgagactcctcaagcctcctcacccccaccaccgcgccctcaccaccgcccctgccccaccgtccctgccccccgccactcctctgggaccctgggccttctggagcaggtcacagtggtgccctctccccatcttcagatcatcagatgtggtctataatgcgttttccttacgtgtctgatcaatccccgattcatctaccctgctgacctcccagtgacccctgacctcactgtgaccttgacttgattagtgccttctgccctccctggagcctccactgcctctggaattgctcaagttcattgatgaccctctgaccctagctctttcctttttttttttttccccactgagaaggggtctcgctatgttgcccaggttggtctcgaactcctggcctcaagcgatcctcccgcctcagcctctcaaagtgctgggattacaggtgtgagccaccatgcctggcctgagtccagctctttaatgcccgttcatctcagtcccctgcccgcaatcctgccttctggcctcctccgtccctgatcccgcctctgcctgcccaggggctgcccctggccgagtcactgaagcgactgatgtccctgtctccaggacggcctcctctcctactttgggacgcccacgtggcagaccgtgaccatctttgtggcgggagtgctcaccgcctcactcaccatctggaagaagatgggctgaggcccccagctgccttggactgtgtttttcctccataaattatggcatttttctgggaggggtggggattgggggacgtgggcatttttcttacttttgtaattattggggggtgtggggaagagtggtcttgagggggtaataaacctccttcgggacaca

SEQ ID NO: 484 - DNA, 793 bp, Homo sapiens
  source 1..793: mol_type = genomic DNA
gctgcggccgcccgcgcggacccggcgagaggcggcggcgggagcggcggtgatggacgggtccggggagcagcccagaggcggggggcccaccagctctgagcagatcatgaagacaggggcccttttgcttcagggtttcatccaggatcgagcagggcgaatggggggggaggcacccgagctggccctggacccggtgcctcaggatgcgtccaccaagaagctgagcgagtgtctcaagcgcatcggggacgaactggacagtaacatggagctgcagaggatgattgccgccgtggacacagactccccccgagaggtctttttccgagtggcagctgacatgttttctgacggcaacttcaactggggccgggttgtcgcccttttctactttgccagcaaactggtgctcaaggccctgtgcaccaaggtgccggaactgatcagaaccatcatgggctggacattggacttcctccgggagcggctgttgggctggatccaagaccagggtggttgggacggcctcctctcctactttgggacgcccacgtggcagaccgtgaccatctttgtggcgggagtgctcaccgcctcactcaccatctggaagaagatgggctgaggcccccagctgccttggactgtgtttttcctccataaattatggcatttttctgggaggggtggggattgggggacgtgggcatttttcttacttttgtaattattggggggtgtggggaagagtggtcttgagggggtaataaacctccttcgggacaca

SEQ ID NO: 485 - DNA, 433 bp, Homo sapiens
  source 1..433: mol_type = genomic DNA
atggacgggtccggggagcagcccagaggcggggggcccaccagctctgagcagatcatgaagacaggggcccttttgcttcaggggatgattgccgccgtggacacagactccccccgagaggtctttttccgagtggcagctgacatgttttctgacggcaacttcaactggggccgggttgtcgcccttttctactttgccagcaaactggtgctcaaggccctgtgcaccaaggtgccggaactgatcagaaccatcatgggctggacattggacttcctccgggagcggctgttgggctggatccaagaccagggtggttgggacggcctcctctcctactttgggacgcccacgtggcagaccgtgaccatctttgtggcgggagtgctcaccgcctcactcaccatctggaagaagatgggctgag

SEQ ID NO: 486 - DNA, 735 bp, Homo sapiens
  source 1..735: mol_type = genomic DNA
gcggccgcccgcgcggacccggcgagaggcggcggcgggagcggcggtgatggacgggtccggggagcagcccagaggcggggtttcatccaggatcgagcagggcgaatggggggggaggcacccgagctggccctggacccggtgcctcaggatgcgtccaccaagaagctgagcgagtgtctcaagcgcatcggggacgaactggacagtaacatggagctgcagaggatgattgccgccgtggacacagactccccccgagaggtctttttccgagtggcagctgacatgttttctgacggcaacttcaactggggccgggttgtcgcccttttctactttgccagcaaactggtgctcaaggccctgtgcaccaaggtgccggaactgatcagaaccatcatgggctggacattggacttcctccgggagcggctgttgggctggatccaagaccagggtggttgggacggcctcctctcctactttgggacgcccacgtggcagaccgtgaccatctttgtggcgggagtgctcaccgcctcactcaccatctggaagaagatgggctgaggcccccagctgccttggactgtgtttttcctccataaattatggcatttttctgggaggggtggggattgggggacgtgggcatttttcttacttttgtaattattggggggtgtggggaagagtggtcttgagggggtaataaacctccttcgggac

SEQ ID NO: 487 - DNA, 540 bp, Homo sapiens
  source 1..540: mol_type = genomic DNA
atggacgggtccggggagcagcccagaggcggggggcccaccagctctgagcagatcatgaagacaggggcccttttgcttcagggtttcatccaggatcgagcagggcgaatggggggggaggcacccgagctggccctggacccggtgcctcaggatgcgtccaccaagaagctgagcgagtgtctcaagcgcatcggggacgaactggacagtaacatggagctgcagaggatgattgccgccgtggacacagactccccccgagaggtctttttccgagtggcagctgacatgttttctgacggcaacttcaactggggccgggttgtcgcccttttctactttgccagcaaactggtgctcaaggccctgtgcaccaaggtgccggaactgatcagaaccatcatgggctggacattggacttcctccgggagcggctgttgggctggatccaagaccagggtggttggaccgtgaccatctttgtggcgggagtgctcaccgcctcactcaccatctggaagaagatgggctga

SEQ ID NO: 488 - DNA, 866 bp, Homo sapiens
  source 1..866: mol_type = genomic DNA
tcacgtgacccgggcgcgctgcggccgcccgcgcggacccggcgagaggcggcggcgggagcggcggtgatggacgggtccggggagcagcccagaggcggggggcccaccagctctgagcagatcatgaagacaggggcccttttgcttcagggtttcatccaggatcgagcagggcgaatggggggggaggcacccgagctggccctggacccggtgcctcaggatgcgtccaccaagaagctgagcgagtgtctcaagcgcatcggggacgaactggacagtaacatggagctgcagaggatgattgccgccgtggacacagactccccccgagaggtctttttccgagtggcagctgacatgttttctgacggcaacttcaactggggccgggttgtcgcccttttctactttgccagcaaactggtgctcaaggctggcgtgaaatggcgtgatctgggctcactgcaacctctgcctcctgggttcaagcgattcacctgcctcagcatcccaaggagctgggattacaggccctgtgcaccaaggtgccggaactgatcagaaccatcatgggctggacattggacttcctccgggagcggctgttgggctggatccaagaccagggtggttggaccgtgaccatctttgtggcgggagtgctcaccgcctcactcaccatctggaagaagatgggctgaggcccccagctgccttggactgtgtttttcctccataaattatggcatttttctgggaggggtggggattgggggacgtgggcatttttcttacttttgtaattattggggggtgtggggaagagtggtcttgagggggtaataaacctccttcgggac

SEQ ID NO: 489 - DNA, 953 bp, Homo sapiens
  source 1..953: mol_type = genomic DNA
gcagacacgaagcctcccgggtggcttacagacgctgccagcatcgccgccgccagaggagaaatgtctgaagtaagacccctctccagagacatcttgatggagaccctcctgtatgagcagctcctggaacccccgaccatggaggttcttggcatgactgactctgaagaggacctggaccctatggaggacttcgattctttggaatgcatggagggcagtgacgcattggccctgcggctggcctgcatcggggacgagatggacgtgagcctcagggccccgcgcctggcccagctctccgaggtggccatgcacagcctgggtctggctttcatctacgaccagactgaggacatcagggatgttcttagaagtttcatggacggtttcaccacacttaaggagaacataatgaggttctggagatccccgaaccccgggtcctgggtgtcctgcgaacaggtgctgctggcgctgctgctgctgctggcgctgctgctgccgctgctcagcgggggcctgcacctgctgctcaagtgaggccccggcggctcagggcggggctggccccacccccatgaccactgccctggaggtggcggcctgctgctgttatctttttaactgttttctcatgatgcctttttatatttaaaccccgagatagtgctggaacactgctgaggttttatactcaggttttttgttttttttttattccagttttcgttttttctaaaagatgaattcctatggctctgcaattgtcaccggttaactgtggcctgtgcccaggaagagccattcactcctgcccctgcccacacggcaggtagcagggggagtgctggtcacacccctgtgtgatatgtgatgccctcggcaaagaatctactggaatagattccgaggagcaggagtgctcaataaaatgttggtttccagca

SEQ ID NO: 490 - DNA, 2610 bp, Homo sapiens
  source 1..2610: mol_type = genomic DNA
gcaggaggccgcggctgcggagcggccgccctcgatccgggcgatggaggaggaagcaagcgagggggctggttcctgagcttcgcaattcctgtgtcgccttctgggctcccagcctgccgggtcgcatgatccctccggccggagctggtttttttgccagccaccgcgaggccggctgagttaccggcatccccgcagccacctcctctcccgacctgtgatacaaaagatcttccgggggctgcacctgcctgcctttgcctaaggcggatttgaatctctttctctcccttcagaatcttatcttggctttggatcttagaagagaatcactaaccagagacgagactcagtgagtgagcaggtgttttggacaatggactggttgagcccatccctattataaaaatgtctcagagcaaccgggagctggtggttgactttctctcctacaagctttcccagaaaggatacagctggagtcagtttagtgatgtggaagagaacaggactgaggccccagaagggactgaatcggagatggagacccccagtgccatcaatggcaacccatcctggcacctggcagacagccccgcggtgaatggagccactggccacagcagcagtttggatgcccgggaggtgatccccatggcagcagtaaagcaagcgctgagggaggcaggcgacgagtttgaactgcggtaccggcgggcattcagtgacctgacatcccagctccacatcaccccagggacagcatatcagagctttgaacaggtagtgaatgaactcttccgggatggggtaaactggggtcgcattgtggcctttttctccttcggcggggcactgtgcgtggaaagcgtagacaaggagatgcaggtattggtgagtcggatcgcagcttggatggccacttacctgaatgaccacctagagccttggatccaggagaacggcggctgggatacttttgtggaactctatgggaacaatgcagcagccgagagccgaaagggccaggaacgcttcaaccgctggttcctgacgggcatgactgtggccggcgtggttctgctgggctcactcttcagtcggaaatgaccagacactgaccatccactctaccctcccacccccttctctgctccaccacatcctccgtccagccgccattgccaccaggagaaccactacatgcagcccatgcccacctgcccatcacagggttgggcccagatctggtcccttgcagctagttttctagaatttatcacacttctgtgagacccccacacctcagttcccttggcctcagaattcacaaaatttccacaaaatctgtccaaaggaggctggcaggtatggaagggtttgtggctgggggcaggagggccctacctgattggtgcaacccttaccccttagcctccctgaaaatgtttttctgccagggagcttgaaagttttcagaacctcttccccagaaaggagactagattgcctttgttttgatgtttgtggcctcagaattgatcattttccccccactctccccacactaacctgggttccctttccttccatccctaccccctaagagccatttaggggccacttttgactagggattcaggctgcttgggataaagatgcaaggaccaggactccctcctcacctctggactggctagagtcctcactcccagtccaaatgtcctccagaagcctctggctagaggccagccccacccaggagggagggggctatagctacaggaagcaccccatgccaaagctagggtggcccttgcagttcagcaccaccctagtcccttcccctccctggctcccatgaccatactgagggaccaactgggcccaagacagatgccccagagctgtttatggcctcagctgcctcacttcctacaagagcagcctgtggcatctttgccttgggctgctcctcatggtgggttcaggggactcagccctgaggtgaaagggagctatcaggaacagctatgggagccccagggtcttccctacctcaggcaggaagggcaggaaggagagcctgctgcatggggtggggtagggctgactagaagggccagtcctgcctggccaggcagatctgtgccccatgcctgtccagcctgggcagccaggctgccaaggccagagtggcctggccaggagctcttcaggcctccctctctcttctgctccacccttggcctgtctcatccccaggggtcccagccaccccgggctctctgctgtacatatttgagactagtttttattccttgtgaagatgatatactatttttgttaagcgtgtctgtatttatgtgtgaggagctgctggcttgcagtgcgcgtgcacgtggagagctggtgcccggagattggacggcctgatgctccctcccctgccctggtccagggaagctggccgagggtcctggctcctgaggggcatctgcccctcccccaacccccaccccacacttgttccagctctttgaaatagtctgtgtgaaggtgaaagtgcagttcagtaataaactgtgtttactcagtgaacaaaga

SEQ ID NO: 491 - DNA, 2383 bp, Homo sapiens
  source 1..2383: mol_type = genomic DNA
gggcgatggaggaggaagcaagcgagggggctggttcctgagcttcgcaattcctgtgtcgccttctgggctcccagcctgccgggtcgcatgatccctccggccggagctggtttttttgccagccaccgcgaggccggctgagttaccggcatccccgcagccacctcctctcccgacctgtgatacaaaagatcttccgggggctgcacctgcctgcctttgcctaaggcggatttgaatctctttctctcccttcagaatcttatcttggctttggatcttagaagagaatcactaaccagagacgagactcagtgagtgagcaggtgttttggacaatggactggttgagcccatccctattataaaaatgtctcagagcaaccgggagctggtggttgactttctctcctacaagctttcccagaaaggatacagctggagtcagtttagtgatgtggaagagaacaggactgaggccccagaagggactgaatcggagatggagacccccagtgccatcaatggcaacccatcctggcacctggcagacagccccgcggtgaatggagccactggccacagcagcagtttggatgcccgggaggtgatccccatggcagcagtaaagcaagcgctgagggaggcaggcgacgagtttgaactgcggtaccggcgggcattcagtgacctgacatcccagctccacatcaccccagggacagcatatcagagctttgaacaggatacttttgtggaactctatgggaacaatgcagcagccgagagccgaaagggccaggaacgcttcaaccgctggttcctgacgggcatgactgtggccggcgtggttctgctgggctcactcttcagtcggaaatgaccagacactgaccatccactctaccctcccacccccttctctgctccaccacatcctccgtccagccgccattgccaccaggagaaccactacatgcagcccatgcccacctgcccatcacagggttgggcccagatctggtcccttgcagctagttttctagaatttatcacacttctgtgagacccccacacctcagttcccttggcctcagaattcacaaaatttccacaaaatctgtccaaaggaggctggcaggtatggaagggtttgtggctgggggcaggagggccctacctgattggtgcaacccttaccccttagcctccctgaaaatgtttttctgccagggagcttgaaagttttcagaacctcttccccagaaaggagactagattgcctttgttttgatgtttgtggcctcagaattgatcattttccccccactctccccacactaacctgggttccctttccttccatccctaccccctaagagccatttaggggccacttttgactagggattcaggctgcttgggataaagatgcaaggaccaggactccctcctcacctctggactggctagagtcctcactcccagtccaaatgtcctccagaagcctctggctagaggccagccccacccaggagggagggggctatagctacaggaagcaccccatgccaaagctagggtggcccttgcagttcagcaccaccctagtcccttcccctccctggctcccatgaccatactgagggaccaactgggcccaagacagatgccccagagctgtttatggcctcagctgcctcacttcctacaagagcagcctgtggcatctttgccttgggctgctcctcatggtgggttcaggggactcagccctgaggtgaaagggagctatcaggaacagctatgggagccccagggtcttccctacctcaggcaggaagggcaggaaggagagcctgctgcatggggtggggtagggctgactagaagggccagtcctgcctggccaggcagatctgtgccccatgcctgtccagcctgggcagccaggctgccaaggccagagtggcctggccaggagctcttcaggcctccctctctcttctgctccacccttggcctgtctcatccccaggggtcccagccaccccgggctctctgctgtacatatttgagactagtttttattccttgtgaagatgatatactatttttgttaagcgtgtctgtatttatgtgtgaggagctgctggcttgcagtgcgcgtgcacgtggagagctggtgcccggagattggacggcctgatgctccctcccctgccctggtccagggaagctggccgagggtcctggctcctgaggggcatctgcccctcccccaacccccaccccacacttgttccagctctttgaaatagtctgtgtgaaggtgaaagtgcagttcagtaataaactgtgtttactcagtgaacaaaga

SEQ ID NO: 492 - DNA, 2578 bp, Homo sapiens
  source 1..2578: mol_type = genomic DNA
ggagtggggcgggggggactgcccagggagtgactttccgaggaaggcatttcggagaagacgggggtagaaaaggctggtgggagattcagagtccactggtgctttcgatttgacttaagtgaagtatcttggaacctagacccagaccttcgtaagacccacaaagaaaccagttctggtacctggagggggaatggaatttttagggtaaatggcatgcatattaattatttttttttcctgaagctctttctctcccttcagaatcttatcttggctttggatcttagaagagaatcactaaccagagacgagactcagtgagtgagcaggtgttttggacaatggactggttgagcccatccctattataaaaatgtctcagagcaaccgggagctggtggttgactttctctcctacaagctttcccagaaaggatacagctggagtcagtttagtgatgtggaagagaacaggactgaggccccagaagggactgaatcggagatggagacccccagtgccatcaatggcaacccatcctggcacctggcagacagccccgcggtgaatggagccactggccacagcagcagtttggatgcccgggaggtgatccccatggcagcagtaaagcaagcgctgagggaggcaggcgacgagtttgaactgcggtaccggcgggcattcagtgacctgacatcccagctccacatcaccccagggacagcatatcagagctttgaacaggtagtgaatgaactcttccgggatggggtaaactggggtcgcattgtggcctttttctccttcggcggggcactgtgcgtggaaagcgtagacaaggagatgcaggtattggtgagtcggatcgcagcttggatggccacttacctgaatgaccacctagagccttggatccaggagaacggcggctgggatacttttgtggaactctatgggaacaatgcagcagccgagagccgaaagggccaggaacgcttcaaccgctggttcctgacgggcatgactgtggccggcgtggttctgctgggctcactcttcagtcggaaatgaccagacactgaccatccactctaccctcccacccccttctctgctccaccacatcctccgtccagccgccattgccaccaggagaaccactacatgcagcccatgcccacctgcccatcacagggttgggcccagatctggtcccttgcagctagttttctagaatttatcacacttctgtgagacccccacacctcagttcccttggcctcagaattcacaaaatttccacaaaatctgtccaaaggaggctggcaggtatggaagggtttgtggctgggggcaggagggccctacctgattggtgcaacccttaccccttagcctccctgaaaatgtttttctgccagggagcttgaaagttttcagaacctcttccccagaaaggagactagattgcctttgttttgatgtttgtggcctcagaattgatcattttccccccactctccccacactaacctgggttccctttccttccatccctaccccctaagagccatttaggggccacttttgactagggattcaggctgcttgggataaagatgcaaggaccaggactccctcctcacctctggactggctagagtcctcactcccagtccaaatgtcctccagaagcctctggctagaggccagccccacccaggagggagggggctatagctacaggaagcaccccatgccaaagctagggtggcccttgcagttcagcaccaccctagtcccttcccctccctggctcccatgaccatactgagggaccaactgggcccaagacagatgccccagagctgtttatggcctcagctgcctcacttcctacaagagcagcctgtggcatctttgccttgggctgctcctcatggtgggttcaggggactcagccctgaggtgaaagggagctatcaggaacagctatgggagccccagggtcttccctacctcaggcaggaagggcaggaaggagagcctgctgcatggggtggggtagggctgactagaagggccagtcctgcctggccaggcagatctgtgccccatgcctgtccagcctgggcagccaggctgccaaggccagagtggcctggccaggagctcttcaggcctccctctctcttctgctccacccttggcctgtctcatccccaggggtcccagccaccccgggctctctgctgtacatatttgagactagtttttattccttgtgaagatgatatactatttttgttaagcgtgtctgtatttatgtgtgaggagctgctggcttgcagtgcgcgtgcacgtggagagctggtgcccggagattggacggcctgatgctccctcccctgccctggtccagggaagctggccgagggtcctggctcctgaggggcatctgcccctcccccaacccccaccccacacttgttccagctctttgaaatagtctgtgtgaaggtgaaagtgcagttcagtaataaactgtgtttactcagtgaacaaaga

SEQ ID NO: 493 - DNA, 820 bp, Homo sapiens
  source 1..820: mol_type = genomic DNA
ctttgcgtctcgggctcgcgcgcgttgccgcggcaccggaagtgactgagcttgcaagttcccctgtctcttcaggggaaactgaggccggcttgttcgggagagacggcgcgagcagtcagccagctctttctctcccttcagaatcttatcttggctttggatcttagaagagaatcactaaccagagacgagactcagtgagtgagcaggtgttttggacaatggactggttgagcccatccctattataaaaatgtctcagagcaaccgggagctggtggttgactttctctcctacaagctttcccagaaaggatacagctggagtcagtttagtgatgtggaagagaacaggactgaggccccagaagggactgaatcggagatggagacccccagtgccatcaatggcaacccatcctggcacctggcagacagccccgcggtgaatggagccactggccacagcagcagtttggatgcccgggaggtgatccccatggcagcagtaaagcaagcgctgagggaggcaggcgacgagtttgaactgcggtaccggcgggcattcagtgacctgacatcccagctccacatcaccccagggacagcatatcagagctttgaacaggtagtgaatgaactcttccgggatggggtaaactggggtcgcattgtggcctttttctccttcggcggggcactgtgcgtggaaagcgtagacaaggagatgcaggtattggtgagtcggatcgcagcttggatggccacttacctgaatgaccacctagagccttggatccaggagaacggcggctgg

SEQ ID NO: 494 - DNA, 2588 bp, Homo sapiens
  source 1..2588: mol_type = genomic DNA
ggtggcaggaggccgcggctgcggagcggccgccctcgatccgggcgatggaggaggaagcaagcgagggggctggttcctgagcttcgcaattcctgtgtcgccttctgggctcccagcctgccgggtcgcatgatccctccggccggagctggtttttttgccagccaccgcgaggccggctgagttaccggcatccccgcagccacctcctctcccgacctgtgatacaaaagatcttccgggggctgcacctgcctgcctttgcctaaggcggatttgaataatcttatcttggctttggatcttagaagagaatcactaaccagagacgagactcagtgagtgagcaggtgttttggacaatggactggttgagcccatccctattataaaaatgtctcagagcaaccgggagctggtggttgactttctctcctacaagctttcccagaaaggatacagctggagtcagtttagtgatgtggaagagaacaggactgaggccccagaagggactgaatcggagatggagacccccagtgccatcaatggcaacccatcctggcacctggcagacagccccgcggtgaatggagccactggccacagcagcagtttggatgcccgggaggtgatccccatggcagcagtaaagcaagcgctgagggaggcaggcgacgagtttgaactgcggtaccggcgggcattcagtgacctgacatcccagctccacatcaccccagggacagcatatcagagctttgaacaggtagtgaatgaactcttccgggatggggtaaactggggtcgcattgtggcctttttctccttcggcggggcactgtgcgtggaaagcgtagacaaggagatgcaggtattggtgagtcggatcgcagcttggatggccacttacctgaatgaccacctagagccttggatccaggagaacggcggctgggatacttttgtggaactctatgggaacaatgcagcagccgagagccgaaagggccaggaacgcttcaaccgctggttcctgacgggcatgactgtggccggcgtggttctgctgggctcactcttcagtcggaaatgaccagacactgaccatccactctaccctcccacccccttctctgctccaccacatcctccgtccagccgccattgccaccaggagaaccactacatgcagcccatgcccacctgcccatcacagggttgggcccagatctggtcccttgcagctagttttctagaatttatcacacttctgtgagacccccacacctcagttcccttggcctcagaattcacaaaatttccacaaaatctgtccaaaggaggctggcaggtatggaagggtttgtggctgggggcaggagggccctacctgattggtgcaacccttaccccttagcctccctgaaaatgtttttctgccagggagcttgaaagttttcagaacctcttccccagaaaggagactagattgcctttgttttgatgtttgtggcctcagaattgatcattttccccccactctccccacactaacctgggttccctttccttccatccctaccccctaagagccatttaggggccacttttgactagggattcaggctgcttgggataaagatgcaaggaccaggactccctcctcacctctggactggctagagtcctcactcccagtccaaatgtcctccagaagcctctggctagaggccagccccacccaggagggagggggctatagctacaggaagcaccccatgccaaagctagggtggcccttgcagttcagcaccaccctagtcccttcccctccctggctcccatgaccatactgagggaccaactgggcccaagacagatgccccagagctgtttatggcctcagctgcctcacttcctacaagagcagcctgtggcatctttgccttgggctgctcctcatggtgggttcaggggactcagccctgaggtgaaagggagctatcaggaacagctatgggagccccagggtcttccctacctcaggcaggaagggcaggaaggagagcctgctgcatggggtggggtagggctgactagaagggccagtcctgcctggccaggcagatctgtgccccatgcctgtccagcctgggcagccaggctgccaaggccagagtggcctggccaggagctcttcaggcctccctctctcttctgctccacccttggcctgtctcatccccaggggtcccagccaccccgggctctctgctgtacatatttgagactagtttttattccttgtgaagatgatatactatttttgttaagcgtgtctgtatttatgtgtgaggagctgctggcttgcagtgcgcgtgcacgtggagagctggtgcccggagattggacggcctgatgctccctcccctgccctggtccagggaagctggccgagggtcctggctcctgaggggcatctgcccctcccccaacccccaccccacacttgttccagctctttgaaatagtctgtgtgaaggtgaaagtgcagttcagtaataaactgtgtttactcagtg

SEQ ID NO: 495 - DNA, 1157 bp, Homo sapiens
  source 1..1157: mol_type = genomic DNA
gaaaccttgaaccccattgagaagtccctttagggtttcggacgcctccacctcaccctgggctggtgcttaaatagaaaaaagaaaaacaaaaaccaactaaatccataccagccacctccgggagagtactcctggctcccagtaggaggcggagagccaaggggcgtgcaagagagagggggctgggctcccgggtggcaggaggccgcggctgcggagcggccgccctcgatccgggcgatggaggaggaagcaagcgagggggctggttcctgagcttcgcaattcctgtgtcgccttctgggctcccagcctgccgggtcgcatgatccctccggccggagctggtttttttgccagccaccgcgaggccggctgagttaccggcatccccgcagccacctcctctcccgacctgtgatacaaaagatcttccgggggctgcacctgcctgcctttgcctaaggcggatttgaataatcttatcttggctttggatcttagaagagaatcactaaccagagacgagactcagtgagtgagcaggtgttttggacaatggactggttgagcccatccctattataaaaatgtctcagagcaaccgggagctggtggttgactttctctcctacaagctttcccagaaaggatacagctggagtcagtttagtgatgtggaagagaacaggactgaggccccagaagggactgaatcggagatggagacccccagtgccatcaatggcaacccatcctggcacctggcagacagccccgcggtgaatggagccactggccacagcagcagtttggatgcccgggaggtgatccccatggcagcagtaaagcaagcgctgagggaggcaggcgacgagtttgaactgcggtaccggcgggcattcagtgacctgacatcccagctccacatcaccccagggacagcatatcagagctttgaacaggtagtgaatgaactcttccgggatggggtaaactggggtcgcattgtggcctttttctccttcggcggggcactgtgcgtggaaagcgtagacaaggagatgcaggtattggtgagtcggatcgcagcttggatggccacttacctgaatgaccacctagagccttggatccaggagaacggcggctgg

SEQ ID NO: 496 - DNA, 381 bp, Homo sapiens
  source 1..381: mol_type = genomic DNA
tttcggagaagacgggggtagaaaaggctggtgggagattcagagtccactggtgctttcgatttgacttaagtgaagtatcttggaacctagacccagaccttcctctttctctcccttcagaatcttatcttggctttggatcttagaagagaatcactaaccagagacgagactcagtgagtgagcaggtgttttggacaatggactggttgagcccatccctattataaaaatgtctcagagcaaccgggagctggtggttgactttctctcctacaagctttcccagaaaggatacagctggagtcagtttagtgatgtggaagagaacaggactgaggccccagaagggactgaatcggagatggagacccccag

SEQ ID NO: 497 - DNA, 781 bp, Homo sapiens
  source 1..781: mol_type = genomic DNA
ctttgcgtctcgggctcgcgcgcgttgccgcggcaccggaagtgactgagcttgcaagttcccctgtctcttcaggggaaactgaggccggcttgttcgggagagacggcgcgagcagtcagccagaatcttatcttggctttggatcttagaagagaatcactaaccagagacgagactcagtgagtgagcaggtgttttggacaatggactggttgagcccatccctattataaaaatgtctcagagcaaccgggagctggtggttgactttctctcctacaagctttcccagaaaggatacagctggagtcagtttagtgatgtggaagagaacaggactgaggccccagaagggactgaatcggagatggagacccccagtgccatcaatggcaacccatcctggcacctggcagacagccccgcggtgaatggagccactggccacagcagcagtttggatgcccgggaggtgatccccatggcagcagtaaagcaagcgctgagggaggcaggcgacgagtttgaactgcggtaccggcgggcattcagtgacctgacatcccagctccacatcaccccagggacagcatatcagagctttgaacaggtagtgaatgaactcttccgggatggggtaaactggggtcgcattgtggcctttttctccttcggcggggcactgtgcgtggaaagcgtagacaaggagatgcaggtattggtgagtcggatcgcagcttggatggccacttacctgaatgaccacctagagccttgg

SEQ ID NO: 498 - DNA, 894 bp, Homo sapiens
  source 1..894: mol_type = genomic DNA
ggcttgttcgggagagacggcgcgagcagtcagccaggtaggccggcagccaggtaggccggcccgggtccgcggcgcggaactcggccgcgaagagctcttgcgtctggaagctaccgggccgatgaagggggatgtggccccccacggctcgcggggctcgcagaatcttatcttggctttggatcttagaagagaatcactaaccagagacgagactcagtgagtgagcaggtgttttggacaatggactggttgagcccatccctattataaaaatgtctcagagcaaccgggagctggtggttgactttctctcctacaagctttcccagaaaggatacagctggagtcagtttagtgatgtggaagagaacaggactgaggccccagaagggactgaatcggagatggagacccccagtgccatcaatggcaacccatcctggcacctggcagacagccccgcggtgaatggagccactggccacagcagcagtttggatgcccgggaggtgatccccatggcagcagtaaagcaagcgctgagggaggcaggcgacgagtttgaactgcggtaccggcgggcattcagtgacctgacatcccagctccacatcaccccagggacagcatatcagagctttgaacaggtagtgaatgaactcttccgggatggggtaaactggggtcgcattgtggcctttttctccttcggcggggcactgtgcgtggaaagcgtagacaaggagatgcaggtattggtgagtcggatcgcagcttggatggccacttacctgaatgaccacctagagccttggatccaggagaacggcggctgggatacttttgtggaactctatgggaacaatgcagcagccgagagccgaaagg

SEQ ID NO: 499 - DNA, 914 bp, Homo sapiens
  source 1..914: mol_type = genomic DNA
ccggaagtgactgagcttgcaagttcccctgtctcttcaggggaaactgaggccggcttgttcgggagagacggcgcgagcagtcagccaggtaggccggcagccaggtaggccggcccgggtccgcggcgcggaactcggccgcgaagagctcttgcgtctggaagctaccgggccgatgaagggggatgtggccccccacggctcgcggggctcgcagctctttctctcccttcagaatcttatcttggctttggatcttagaagagaatcactaaccagagacgagactcagtgagtgagcaggtgttttggacaatggactggttgagcccatccctattataaaaatgtctcagagcaaccgggagctggtggttgactttctctcctacaagctttcccagaaaggatacagctggagtcagtttagtgatgtggaagagaacaggactgaggccccagaagggactgaatcggagatggagacccccagtgccatcaatggcaacccatcctggcacctggcagacagccccgcggtgaatggagccactggccacagcagcagtttggatgcccgggaggtgatccccatggcagcagtaaagcaagcgctgagggaggcaggcgacgagtttgaactgcggtaccggcgggcattcagtgacctgacatcccagctccacatcaccccagggacagcatatcagagctttgaacaggtagtgaatgaactcttccgggatggggtaaactggggtcgcattgtggcctttttctccttcggcggggcactgtgcgtggaaagcgtagacaaggagatgcaggtattggtgagtcggatcgcagcttggatggccacttacctgaatgaccacctagagccttggatccaggagaacggcggctgg

SEQ ID NO: 500 - DNA, 1249 bp, Homo sapiens
  source 1..1249: mol_type = genomic DNA
cgggccaagaaaaccagcgaaggcccggccccccagcagaggccggaccatggttgaccagttgcgggagcgcaccaccatggccgacccgctgcgggagcgcaccgagctgttgctggccgactacctggggtactgcgcccgggaacccggcacccccgagccggcgccatccacgcccgaggccgccgtgctgcgctccgcggccgccaggttacggcagattcaccggtcctttttctccgcctacctcggctaccccgggaaccgcttcgagctggtggcgctgatggcggattccgtgctctccgacagccccggccccacctggggcagagtggtgacgctcgtgaccttcgcagggacgctgctggagagagggccgctggtgaccgcccggtggaagaagtggggcttccagccgcggctaaaggagcaggagggcgacgtcgcccgggactgccagcgcctggtggccttgctgagctcgcggctcatggggcagcaccgcgcctggctgcaggctcagggcggctgggatggcttttgtcacttcttcaggaccccctttccactggctttttggagaaaacagctggtccaggcttttctgtcatgcttgttaacaacagccttcatttatctctggacacgattattatgagttttaaaacttttaacccgcttctacctgcccaactgtgaccaactaaatgacagatgtgtgagaacaagaactgagggaaagcaccttcccccaccccagacgtttttatctgaatgcatacaaggagtcctgaggtggtgatttggccagtgttttaacttgtgacaagtactcaggtgtgaggacaagaatgcaaatggctcttccttgagtgaaagaaatggggagtctagagcctctttatgccaaagaaccgcagaagaaactgcattccattaaatgggaaatacagtgctatttgctaaaacttggataagagtgcgaacctctcatctctccacaacttcatgtgctgctgactaattttaaacatggccacagctggggcaaaataatccccaaagtagaaaaagtcccagtttaacaaagaatgtaatgttaaaatcacttataaggaattctttgaaaccaaatcctttgaaatctaattcctgggacttctaggtttttatagttaacatactaatttcttcaataattgttaactgcaaagttttaataaatttgtacctttaaaaaaaa

SEQ ID NO: 501 - DNA, 1522 bp, Homo sapiens
  source 1..1522: mol_type = genomic DNA
acttcgctccgcgcagccgcctggtctgcagtttgttggagctctgcgtccagcgccgctgccgctgccgccgccgccgccgccgccgccgccgccgccgccgccgccactaccaccacttgattcttgcagccaccctgcgaaccctgccacactgcgatcgcatcatcgcggtattcggttcgctgcgttcccgccgccaccgcctcggcgccctttcttggcccttgttcccccaaatgtctgactctgactctcggactgagaaacgcaagaaaaaaagaccaaatggcaaagcaaccttctgatgtaagttctgagtgtgaccgagaaggtagacaattgcagcctgcggagaggcctccccagctcagacctggggcccctacctccctacagacagagccacaagacaggagcccagcacccatgagttgtgacaaatcaacacaaaccccaagtcctccttgccaggccttcaaccactatctcagtgcaatggcttccatgaggcaggctgaacctgcagatatgcgcccagagatatggatcgcccaagagttgcggcgtattggagacgagtttaacgcttactatgcaaggagggtatttttgaataattaccaagcagccgaagaccacccacgaatggttatcttacgactgttacgttacattgtccgcctggtgtggagaatgcattgacaggttctttgcggagccgagataccatgcagacattttgcttgttcaaaccaacaagacccagcaccgcggtctcctggtgccattattatgcagccagcggttctcttgtggagggggcaggtgacgtttcagaagacaccgagctggatgggactacctttctgttcatcaccacacagcagaatttctaatggaagtttgttgtgaatgtaaaggagggagcattctttgctttttaatatacaaaccatggttttttggagcaggattttgtgtaagaatggtgtttacatgcagtgtgttttccccctcaccttcaataaggtttttcaaaaaggaaatggaaactttttaaccaatttgtgaataacttttgtattaaaattttaagaacctacggcctattctcagaggattatgtaacccctgcagtggaaactgagccagctaacttaaaaagctgccttagtttatttttagagattacagaatttttaaacagggagacgtgtgatatactccctcccttccctactattgcctctctgacctttttaaattatttttaataccaaaagagttcttttgaaatggaactgattaaaagggcagagggtctgttgccagcctgcattgatataccagtcccatttgtaaatatttacgtacctttataaattcagttgcatctgtggcaaaatttcagactatttttgcgtctttcctcatcactttttgtgatgcaactccagtctggactcagatgcatagatttggtccagtgtattttcatgataaagtgaaattgagtcag

SEQ ID NO: 502 - DNA, 722 bp, Homo sapiens
  source 1..722: mol_type = genomic DNA
acttcgctccgcgcagccgcctggtctgcagtttgttggagctctgcgtccagcgccgctgccgctgccgccgccgccgccgccgccgccgccgccgccgccgccgccactaccaccacttgattcttgcagccaccctgcgaaccctgccacactgcgatcgcatcatcgcggtattcggttcgctgcgttcccgccgccaccgcctcggcgccctttcttggcccttgttcccccaaatgtctgactctgactctcggactgagaaacgcaagaaaaaaagaccaaatggcaaagcaaccttctgatgtaagttctgagtgtgaccgagaaggtagacaattgcagcctgcggagaggcctccccagctcagacctggggcccctacctccctacagacagagccacaagacaggagcccagcacccatgagttgtgacaaatcaacacaaaccccaagtcctccttgccaggccttcaaccactatctcagtgcaatggtagtcatcctagaggatataggtgatctttcactgtgctttggatttatatttactggcttagatttgtatggccaccaccatagtcaagatacagaacaactcaaccacaaggatttctcatgatacctttttatagccacagccacctctctccctcttccttgagcattttgtcatatggtcattggtgattaaataaaatgtattttaatattgac

SEQ ID NO: 503 - DNA, 807 bp, Homo sapiens
  source 1..807: mol_type = genomic DNA
acttcgctccgcgcagccgcctggtctgcagtttgttggagctctgcgtccagcgccgctgccgctgccgccgccgccgccgccgccgccgccgccgccgccgccgccactaccaccacttgattcttgcagccaccctgcgaaccctgccacactgcgatcgcatcatcgcggtattcggttcgctgcgttcccgccgccaccgcctcggcgccctttcttggcccttgttcccccaaatgtctgactctgactctcggactgagaaacgcaagaaaaaaagaccaaatggcaaagcaaccttctgatgtaagttctgagtgtgaccgagaaggtagacaattgcagcctgcggagaggcctccccagctcagacctggggcccctacctccctacagacagagccacaaggtaatcctgaaggcaatcacggaggtgaaggggacagctgcccccacggcagccctcagggcccgctggccccacctgccagccctggcccttttgctaccagatccccgcttttcatctttatgagaagatcctccctgctgtctcgatcctccagtgggtatttctcttttgacacagacaggagcccagcacccatgagttgtgacaaatcaacacaaaccccaagtcctccttgccaggccttcaaccactatctcagtgcaatggcttccatgaggcaggctgaacctgcagatatgcgcccagagatatggatcgcccaagagttgcggcgtattggagacgagtttaacgcttactatgcaaggaggatgcctcttccacctgattaa

SEQ ID NO: 504 - DNA, 482 bp, Homo sapiens
  source 1..482: mol_type = genomic DNA
gcggccggggcagcgcgggccagaggcgcggcgtgcggagccctcggctgcccggcggagcgcggcggcgggctggcgggaaggcgcgggctttgcgctgcgccggggactctgaacccgagtcccgggctttgtctcctgcgctgctttcgtggtgacggtcagggggcgcccggtcggcgaagggcgcgggccggacgccgcggggcttggtccctggcccggacgctgcgctctgaagggaaggcgcggacaaaaaaagaccaaatggcaaagcaaccttctgatgtaagttctgagtgtgaccgagaaggtagacaattgcagcctgcggagaggcctccccagctcagacctggggcccctacctccctacagacagagccacaaggtaatcctgaaggcaatcacggaggtgaaggggacagctgcccccacggcagccctcagggcccgctggccccacctgccagccctggccc

SEQ ID NO: 505 - DNA, 546 bp, Homo sapiens
  source 1..546: mol_type = genomic DNA
acttcgctccgcgcagccgcctggtctgcagtttgttggagctctgcgtccagcgccgctgccgctgccgccgccgccgccgccgccgccgccgccgccgccgccgccactaccaccacttgattcttgcagccaccctgcgaaccctgccacactgcgatcgcatcatcgcggtattcggttcgctgcgttcccgccgccaccgcctcggcgccctttcttggcccttgttcccccaaatgtctgactctgactctcggactgagaaacgcaagaaaaaaagaccaaatggcaaagcaaccttctgatgtaagttctgagtgtgaccgagaaggtagacaattgcagcctgcggagaggcctccccagctcagacctggggcccctacctccctacagacagagccacaagcttccatgaggcaggctgaacctgcagatatgcgcccagagatatggatcgcccaagagttgcggcgtattggagacgagtttaacgcttactatgcaaggaggctggcaaaactcctggcatcctccacctga

SEQ ID NO: 506 - DNA, 3649 bp, Homo sapiens
  source 1..3649: mol_type = genomic DNA
gccgcctggtctgcagtttgttggagctctgcgtccagcgccgctgccgctgccgccgccgccgccgccgccgccgccgccgccgccgccgccactaccaccacttgattcttgcagccaccctgcgaaccctgccacactgcgatcgcatcatcgcggtattcggttcgctgcgttcccgccgccaccgcctcggcgccctttcttggcccttgttcccccaaatgtctgactctgactctcggactgagaaacgcaagaaaaaaagaccaaatggcaaagcaaccttctgatgtaagttctgagtgtgaccgagaaggtagacaattgcagcctgcggagaggcctccccagctcagacctggggcccctacctccctacagacagagccacaaggtaatcctgaaggcaatcacggaggtgaaggggacagctgcccccacggcagccctcagggcccgctggccccacctgccagccctggcccttttgctaccagatccccgcttttcatctttatgagaagatcctccctgctgtctcgatcctccagtgggtatttctcttttgacacagacaggagcccagcacccatgagttgtgacaaatcaacacaaaccccaagtcctccttgccaggccttcaaccactatctcagtgcaatggcttccatgaggcaggctgaacctgcagatatgcgcccagagatatggatcgcccaagagttgcggcgtattggagacgagtttaacgcttactatgcaaggagggtatttttgaataattaccaagcagccgaagaccacccacgaatggttatcttacgactgttacgttacattgtccgcctggtgtggagaatgcattgacaggttctttgcggagccgagataccatgcagacattttgcttgttcaaaccaacaagacccagcaccgcggtctcctggtgccattattatgcagccagcggttctcttgtggagggggcaggtgacgtttcagaagacaccgagctggatgggactacctttctgttcatcaccacacagcagaatttctaatggaagtttgttgtgaatgtaaaggagggagcattctttgctttttaatatacaaaccatggttttttggagcaggattttgtgtaagaatggtgtttacatgcagtgtgttttccccctcaccttcaataaggtttttcaaaaaggaaatggaaactttttaaccaatttgtgaataacttttgtattaaaattttaagaacctacggcctattctcagaggattatgtaacccctgcagtggaaactgagccagctaacttaaaaagctgccttagtttatttttagagattacagaatttttaaacagggagacgtgtgatatactccctcccttccctactattgcctctctgacctttttaaattatttttaataccaaaagagttcttttgaaatggaactgattaaaagggcagagggtctgttgccagcctgcattgatataccagtcccatttgtaaatatttacgtacctttataaattcagttgcatctgtggcaaaatttcagactatttttgcgtctttcctcatcactttttgtgatgcaactccagtctggactcagatgcatagatttggtccagtgtattttcatgataaagtgaaattgagtcagaacaagagttaatatctgcctgtatcttgcacagttcgagcgatctgttattaactgggaagcatttggtgttggttttcattccatttcgacgagcatgttattgggaagtattctgaagaggcaatagcagtaataacaacagacttaagtgctacgcccctttgtgctgctggcttttctggttgcaggctttcccatggtcacaggatgcactgtcagcatcaggtcccagagggccaccgtgtccattacagcagagtccagctgcagcatccagctcacgccctcatgggaattggcacaggcctggggcagggcttctgatggccatttgcttggcctcctgcattttagtccaactcacagtccactagcttcactcctttaaattcactttgaaacaggcctcatcccacttccaccagcaccatagaagaataattctgggcagaagtctgttttttttcatttttccaggacagttggatattgtcaggccacttgtgaccccagccatgtagtgagggtgctctttctctgtgcctgctccttatgagtgcagtggaaggaagccacacactggtcagtcatttcagaggcagcagatgcccagggagacccaagaaagagtcaggttagggagcagtgaaagtgaggagggaagacaattctgtgaactctgtaactcttaaaatttttgaaaactccatcgttaaacaacttttaaaagaaataactaaattttcaaatgagtaagcagtgccaccaactagtgttttgcccgatagaagagccagcatgttcacgttatttaaattaggtggaaaaatctaaacatttttatcttcataatttaaaaaatatatatgtatatattgcatattcactttttcctttaggtagagatgatttcaatccaaatactcttactttaaaaaatttcctttccccaagaatctccttgggactttgacttatttttaaagctgtgttggagctcatcttgttccctgatgtgtctcgagcccattggtagggtcatacaaagcccacggttacaagcagtggtaggattgcagccgtgggcctgctggacacacacatacaccaaagatgtatttggatctgggcaccccctcccaggatccctgtactcacgtgccagtctcctgactagagcactttactctgtttcctcagccctgcagcccctgggagcacacactgggtgcagccctgggccaggcacgggaggccctgccctgtgctgcccaggggctgtgtgcaccacatgagcacatttccctctggcctggcggcctccaggctggctgtggaaacagttcctgaggaaattagagattctatgaattgtaggagtattaaagaccaggctgttggcaccagaacttaaagcgatgactggatgtctctgtactgtatgtatctggttatcaagatgcctctgtgcagaaagtatgcctcccgtgggtatacgtttttaccttttttaaaaaacatttttgtagaaaaaataattaaatcccctttttggaaacttactgcaggttttgtgccttgacaacctctccctatgtgaggtttgtaaaaagtgtcctgtgacttaacacagaaacgcaataaacacacacaaaatagtttcatgagtgattcttcagatgcccttcccaactggttagttgatcaagaattttgggggtgggggttgcggagaaatcaagtttaaaattccttctgattaaaaaaatatagtggaatacaattgtctgccgtttccccttcttaatgtatatattgtgagtatttattagattcgtaggtcatattacttatcaactgagccaaatgtctgtgtgcaattgtgtttcctttaccttgtaaaattttgtacagcataaataagtaaaaaaatcactgtttttctcaactttttcaaaa

SEQ ID NO: 507 - DNA, 572 bp, Homo sapiens
  source 1..572: mol_type = genomic DNA
gacgcgcgtcctccagcgactccgggaacccaaggcctccttcacctcgctcaaaattcacccgaaaatgcgctgagactttggcatggggctgcgctgtgtcccactgacgttacagaagcgcttatgaatttaaaaactgctccaggcggccggacggcgggacaacgcctcctcacttgctcctctacgaaaaaaagaccaaatggcaaagcaaccttctgatgtaagttctgagtgtgaccgagaaggtagacaattgcagcctgcggagaggcctccccagctcagacctggggcccctacctccctacagacagagccacaaggtaatcctgaaggcaatcacggaggtgaaggggacagctgcccccacggcagccctcagggcccgctggccccacctgccagccctggcccttttgctaccagatccccgcttttcatctttatgagaagatcctccctgctgtctcgatcctccagtgggtatttctcttttgacacagacaggagcccagcacccatgagttgtgacaaatcaacacaaaccccaagtcctccttgccagg

SEQ ID NO: 508 - DNA, 2030 bp, Homo sapiens
  source 1..2030: mol_type = genomic DNA
gtgagatgggcttgcctctagagacttatctttggaactttcccagtgatctgtggaccacaatgtgatttttgttttgttttgttctgatgcagcttccatgaggcaggctgaacctgcagatatgcgcccagagatatggatcgcccaagagttgcggcgtattggagacgagtttaacgcttactatgcaaggagggtaatgatgttttctttacccgcttttctgctcacaccctccccttccacactatatttttttaaaaagacagtgacttcttgtaactacatgctaattctggaaatgattactgttgcctagttgtgacctttcattgtttctcctttcccatttttcatttgttttatgactaagtaatggcacttaaataaaataatacagtaggaggcagcaaaggaattttatgagcacagactttaaaacaatgctaaaaaagggattatttatagactttgagatagtctagaaatactattaacataggtttcaatccatgtagtgtgtttctgtactccccttgtgcattttaggtcaaagttaaaggtaatttttaaacaacatcttttgtcacttagcgcatgggagcgatgccagcactcatgtaaaagactctcctgcaatttgcagggtggcccgaggaagcagggagccattgcccttgcagagcccattgctgtctttggacatttaattgttgaaatgtattaggaggccgctaatcaatagcctgtaatttgggctgtaaaaactttatattatagataattgccacttattttgagctatgttcttgattttttaaaaattttagcctatgtcatcttctgtagttagtagaagcggtgttttttgtttgttttacctgggggcaatgtaggtgaccatttggacacctttttcacatgggacacttttgtttgtttgtttgtttgtttgtgtgtgtgtttgtttttgagacggagtcttgctctgtcaccaggctgaaagattgcaccattgcactctagcctccacaagagcgaaactccatctaaaaaaaaaaatagttcaaaacactggatgatgctgtggatagtgacaccgtgatcttcaaagccacagacacccgtcttgatacttgttagattaaaaacagtccattgtctggaatcacacttaatggtccattgttaaatattgggggcagaaatctgggaaggtaatgggaggccgttttgggaaataatgaattcaaattacctgctgtcttcacaagggaattatcctctcttggcaagcgagtgtatctcactgtgctgctttaggatggatattaaccttttaaatgttgagtgtctttatttgcttaatgctattacaatgccttgtctaaagtgttagtcttttattgccacgagccttgcaaagcctgacaggatattttcccgtttttccagttagagaaatagaggaagttgtcgtgtagttgtcatgtattcagtccacttaagggcagtggggaagcgtttgagacggagctgtggaggctgaatccttgaaggaggaggtgagagaggcacaggtgagcgcaaagtcccagtgcatgtcccctcttctctcccgatgcagtgtcattcccaggtgaacctgccgggctgaacggcctggcccctctattcagtcggagttttactactccagtggattttggtaacttcatttggaaataatttcagacttacaaaaatgttgcaagaatgacacaaagaaccacccttttatatctgccccacttgttttcatgttttccctctttgcacacatgtacaatttatttcagaaaaaactacagacatgatactgcttttcctacactaaaaatacttcagtgtatatttcccaaaaataggagtaatcccttatgtaaccacagtgtaattatcaaaattcacaaatagtgttacaaaactattatctgatctatggaccttattcagattttaccacttgtcccaacaatgcccttctc

SEQ ID NO: 509 - DNA, 438 bp, Homo sapiens
  source 1..438: mol_type = genomic DNA
atggcaaagcaaccttctgatgtaagttctgagtgtgaccgagaaggtagacaattgcagcctgcggagaggcctccccagctcagacctggggcccctacctccctacagacagagccacaagacaggagcccagcacccatgagttgtgacaaatcaacacaaaccccaagtcctccttgccaggccttcaaccactatctcagtgcaatggttagagaaatagaggaagttgtcgtgtagttgtcatgtattcagtccacttaagggcagtggggaagcgtttgagacggagctgtggaggctgaatccttgaaggaggaggtgagagaggcacaggtatttttgaataattaccaagcagccgaagaccacccacgaatggttatcttacgactgttacgttacattgtccgcctggtgtggagaatgcattga

SEQ ID NO: 510 - DNA, 883 bp, Homo sapiens
  source 1..883: mol_type = genomic DNA
atggcaaagcaaccttctgatgtaagttctgagtgtgaccgagaaggtagacaattgcagcctgcggagaggcctccccagctcagacctggggcccctacctccctacagacagagccacaaggtaatcctgaaggcaatcacggaggtgaaggggacagctgcccccacggcagccctcagggcccgctggccccacctgccagccctggcccttttgctaccagatccccgcttttcatctttatgagaagatcctccctgctgtctcgatcctccagtgggtatttctcttttgacacagacaggagcccagcacccatgagttgtgacaaatcaacacaaaccccaagtcctccttgccaggccttcaaccactatctcagtgcaatggctaactgggactagaaacagctccatcacccagcttccatgaggcaggctgaacctgcagatatgcgcccagagatatggatcgcccaagagttgcggcgtattggagacgagtttaacgcttactatgcaaggaggatgcctcttccacctgattaagaaccactgtagcagacgcagacttattggacactaggcgggaggccagctctgcagacagcaggtctcaggaagacggtcaaggcatggctgctgatgatccgcttatgggtatttttgaataattaccaagcagccgaagaccacccacgaatggttatcttacgactgttacgttacattgtccgcctggtgtggagaatgcattgacaggttctttgcggagccgagataccatgcagacattttgcttgttcaaaccaacaagacccagcaccgcggtctcctggtgccattattatgcagccagcggttctcttgtggagggggc

SEQ ID NO: 511 - DNA, 618 bp, Homo sapiens
  source 1..618: mol_type = genomic DNA
atggcaaagcaaccttctgatgtaagttctgagtgtgaccgagaaggtagacaattgcagcctgcggagaggcctccccagctcagacctggggcccctacctccctacagacagagccacaaggtaatcctgaaggcaatcacggaggtgaaggggacagctgcccccacggcagccctcagggcccgctggccccacctgccagccctggcccttttgctaccagatccccgcttttcatctttatgagaagatcctccctgctgtctcgatcctccagtgggtatttctcttttgacacagacaggagcccagcacccatgagttgtgacaaatcaacacaaaccccaagtcctccttgccaggccttcaaccactatctcagtgcaatggttagagaaatagaggaagttgtcgtgtagttgtcatgtattcagtccacttaagggcagtggggaagcgtttgagacggagctgtggaggctgaatccttgaaggaggaggtgagagaggcacaggtatttttgaataattaccaagcagccgaagaccacccacgaatggttatcttacgactgttacgttacattgtccgcctggtgtggagaatgcattga

SEQ ID NO: 512 - DNA, 656 bp, Homo sapiens
  source 1..656: mol_type = genomic DNA
aagcaaccttctgatgtaagttctgagtgtgaccgagaaggtagacaattgcagcctgcggagaggcctccccagctcagacctggggcccctacctccctacagacagagccacaagacaggagcccagcacccatgagttgtgacaaatcaacacaaaccccaagtcctccttgccaggccttcaaccactatctcagtgcaatggatgactccgctggatcctccctcagaattgcccttcatagggaagttcagtggccactcaagtggttagcaaaatcaagctaactgggactagaaacagctccatcacccagtaaagagaaagaaaacatggatctgcctaggaagtcacctctgcctgagtctgctacttgcaggattggagcttttgctgcagattacagctttgaagtcactttacctcaagagcagtttatattttattgtgctttaaaaaaaaaatttagtgccaggtttatggagtgaagtgctttcataaatgctgaaactacattttctgtgggtaaaaatgcagctcatcagaatttcccctttgaagaattttttatgttcacataaaattgccaagttaaaaatttgatctccctacagagtaagagctttcatttcaaataaaaccattttataga

SEQ ID NO: 513 - DNA, 459 bp, Homo sapiens
  source 1..459: mol_type = genomic DNA
atggcaaagcaaccttctgatgtaagttctgagtgtgaccgagaaggtagacaattgcagcctgcggagaggcctccccagctcagacctggggcccctacctccctacagacagagccacaagcttccatgaggcaggctgaacctgcagatatgcgcccagagatatggatcgcccaagagttgcggcgtattggagacgagtttaacgcttactatgcaaggaggatgcctcttccacctgattaagaaccactgtagcagacgcagacttattggacactaggcgggaggccagctctgcagacagcaggtctcaggaagacggtcaaggcatggctgctgatgatccgcttatgggtatttttgaataattaccaagcagccgaagaccacccacgaatggttatcttacgactgttacgttacattgtccgcctggtgtggagaatgcattga

SEQ ID NO: 514 - DNA, 3605 bp, Homo sapiens
  source 1..3605: mol_type = genomic DNA
atcacccggcgccgggccctccctctgcccccccctttctcctccctccttccttccctcccttcctccctctctccctccctcccagctcctgcaccaggaaacggcccggatcccggcagcggcctgacccggctccacgctggccaggaggatgaaaggccccagctgggggctccttgccaccagtgctgtgtcttaagagctgccatcccggctggccgcccggatggcgaccccagcctcggccccagacacacgggctctggtggcagactttgtaggttataagctgaggcagaagggttatgtctgtggagctggccccggggagggcccagcagctgacccgctgcaccaagccatgcgggcagctggagatgagttcgagacccgcttccggcgcaccttctctgatctggcggctcagctgcatgtgaccccaggctcagcccaacaacgcttcacccaggtctccgatgaactttttcaagggggccccaactggggccgccttgtagccttctttgtctttggggctgcactgtgtgctgagagtgtcaacaaggagatggaaccactggtgggacaagtgcaggagtggatggtggcctacctggagacgcagctggctgactggatccacagcagtgggggctgggcggagttcacagctctatacggggacggggccctggaggaggcgcggcgtctgcgggaggggaactgggcatcagtgaggacagtgctgacgggggccgtggcactgggggccctggtaactgtaggggccttttttgctagcaagtgaaagtccagggccaggtggggctaggtgtggctgggggccaggagagcaggaacagaacagagaaatgcccttggaagaagtggagttggtggatgggtgggcatggaacaggatgggcagagaaagggtagtgtgtgagggagctgagtaggccaggtaggcgattggaagagtgagcaggacacagaggggaggggaatgttttggcaagtttaggggcacaggagatgtagtcgttccagggctgggggaggtgggagggatcacgcctataggtgtgggcacatgaaacgacctggaacttgcttcacagccctgaggaaggtggacttacataagcagctgtattccattagatgagtgggatttagggaacgcagaaggcacatccctttggaatggaagcttaggggttctcaggtgatagggagaggtggctgttaacagtgggctgcttggacacgcgtgtgcatgtgcacgcatgctggtgtgcatgctgggctgcctggcaaatctggtggtgatgggattcctcaaggagaaaacattccctcttgcaatggcaagaactaggggcagttctctgtccctcctcccaacccctcctttcccctgcccttgtcctgatgcctcaaggcttagagagaaacattgtatccagaccgagggctctgctgcttctttccagaaagtgattggcaaggctttggagagaagagcagttctgcagctggccttgttccttcatcatcccccttccttgtgcattatgcacttgctgctgcctcctgggctctgatagaagggcagggctgttgagcctggatgggtggaggcttaggtagccggacctgcctgccaccctcctctcccactcaggcacaatggtgcctaaagtgtttccaatctctgggacctctgtacccaaactgaaactctaaattggggccctaactaattttccttttgaggttgtgggcataagtgctgatctagaatacagtctgggtcccacactgtgtctcagtgagactgttgatgccttgagatgaccatttcagatctgaatcccatgggtgtgagggtgatgggtactccaggactggcctatgctgtgttgtgggctttggttcggctttatcaggggccaggcatatgggttctagagtacctaccatgacctagaagcatttatgatttatttgaagccacactgtttgcatgggtgttacttgtctgtacctcagagtctgaggatgttaactttggaactcgcagtcctctagaacagcttcagattatggctttttcttttgaggaagaaattattcactccagatgcatgccctgagccagacctcactgctgcactttccaaggtgctaagattgctgctctccaatgctaactttctgacacagtgctctagaaccctgcctgtggtcctgagcactgatcaccttagctagaccatggttgactcttcttggagattttcacttggtcctagaatgtggcaacgtagttgtgctcgccagaacgtgggaccaaattggcctcaggtgttgagtccagacttctgcttttgagagagggctgcactttttcatggtatttctaggggaggtggtaggctgcatgtgccacttggtcttgttgtgagtatgctgacaccagaaactcagagccagcttgtggcaagcagttggggtggggggtctctgacttgctcaggacaaactaggccagtggttttcaaactgcttggcagagccctgaagtttcctaggggttgcctcaggagtccttggggagatgaagggggtggggagctgagcaggctgggcaatttgccctcaaacagaacagctccccttgtagctgtcttacatattggggttcagggtaagattttatttgcattaaggggtttgctgctgaaaaaaagttggaaaaccactgactagaccatcggctccaaattggagtctgtgcttccttccccaggtatggagcacactcttcaccctaccctctaccacaggacacatatccctgttagcattccccgggacctttagccaagaggagctgcagggaccatggccaggttaccaaaatgccctgctctgaagccttgacacctgggtggaaagagaggctgttttctgaaagggtaaagggcttggtctggattcccagaagcatagcttagatgggaccacagtgggcaattttgacctgtcctgcccttcttagcttgaagggaaaccccagagactcttctgtcagggaaaactagggactctcttctagagccatatagttccttgggattagctcttggccaagaaggctgagtatggttcccaatttttaaatccatttcattttttaaaaaataagggaaataaatgtaattgccatttttcaaagattaagtaggaggagaggggtttcttgctctccagagcccaaagggacaaatagggactttgtttaggccaaggaaggagcggaagtagggcaactcggtcctgcgattattaatcccactccccacttattctagggcacacaaacactattttacttttttaaaatcataaaacggcagaacagatttggttagtttagaagaaaagaaagctctataaatataaatctatattcctgtatttttatttaataatttataaataccaagttcatttgacttttatttttgtgtaatatgtaatgatcgtattaaaaacaataaataaagcccagaagtttaatgagaaggactgaa

SEQ ID NO: 515 - DNA, 548 bp, Homo sapiens
  source 1..548: mol_type = genomic DNA
gatccacatggtacatgacattcttcctgttttcttcacaagacaaggatgatgtttaaatgggcatttgtttgcggaatgacttggagagttcctctctttcagccatcttttctcaaagactaaggctgtggacaggatgggcatgaagactgtcaaggagcccgagtgagggaagcagaccaaccatggtcttggagaaaagaaaatagggtttccatcccttctggagggagaaggaatagcagagatgaacatgaatgaagaaggaaacaaatggaaataaacaaaatgaagggctccacgctggccaggaggatgaaaggccccagctgggggctccttgccaccagtgctgtgtcttaagagctgccatcccggctggccgcccggatggcgaccccagcctcggccccagacacacgggctctggtggcagactttgtaggttataagctgaggcagaagggttatgtctgtggagctggccccggggagggcccagcagctgacccgctgcaccaagccatgcgggcagctggagatga

SEQ ID NO: 516 - DNA, 545 bp, Homo sapiens
  source 1..545: mol_type = genomic DNA
agctgggcctttgggctgcactagggggaaccgggaatagagatggtgtcggcaggaagcccttggccttgggtttcccgggaggacagtcattaaacatggattcggccacacagctggtagagcgttgggggcaggggcctaggcccagagctgcaaccctagcccttcccaggccagaacctgatccctggccttcccctcctggttctgatctccccctcccctttccagggctccacgctggccaggaggatgaaaggccccagctgggggctccttgccaccagtgctgtgtcttaagagctgccatcccggctggccgcccggatggcgaccccagcctcggccccagacacacgggctctggtggcagactttgtaggttataagctgaggcagaagggttatgtctgtggagctggccccggggagggcccagcagctgacccgctgcaccaagccatgcgggcagctggagatgagttcgagacccgcttccggcgcaccttctctgatctggcggctcagctgcatgtgacccc

SEQ ID NO: 517 - DNA, 631 bp, Homo sapiens
  source 1..631: mol_type = genomic DNA
aggaaacggcccggatcccggcagcggcctgacccgtgagatccctaacctggcaggcgggcggggttggagactggctgaggtggggggctccacgctggccaggaggatgaaaggccccagctgggggctccttgccaccagtgctgtgtcttaagagctgccatcccggctggccgcccggatggcgaccccagcctcggccccagacacacgggctctggtggcagactttgtaggttataagctgaggcagaagggttatgtctgtggagctggccccggggagggcccagcagctgacccgctgcaccaagccatgcgggcagctggagatgagttcgagacccgcttccggcgcaccttctctgatctggcggctcagctgcatgtgaccccaggctcagcccaacaacgcttcacccaggtctccgatgaactttttcaagggggccccaactggggccgccttgtagccttctttgtctttggggctgcactgtgtgctgagagtgtcaacaaggagatggaaccactggtgggacaagtgcaggagtggatggtggcctacctggagacgcagctggctgactggatccacagcagtgggggctgggcggagttcacagct

SEQ ID NO: 518 - DNA, 596 bp, Homo sapiens
  source 1..596: mol_type = genomic DNA
atcccggcagcggcctgacccgtgagatccctaacctggcaggcgggcggggttggagactggctgagggctccacgctggccaggaggatgaaaggccccagctgggggctccttgccaccagtgctgtgtcttaagagctgccatcccggctggccgcccggatggcgaccccagcctcggccccagacacacgggctctggtggcagactttgtaggttataagctgaggcagaagggttatgtctgtggagctggccccggggagggcccagcagctgacccgctgcaccaagccatgcgggcagctggagatgagttcgagacccgcttccggcgcaccttctctgatctggcggctcagctgcatgtgaccccaggctcagcccaacaacgcttcacccaggtctccgatgaactttttcaagggggccccaactggggccgccttgtagccttctttgtctttggggctgcactgtgtgctgagagtgtcaacaaggagatggaaccactggtgggacaagtgcaggagtggatggtggcctacctggagacgcagctggctgactggatccacagcagtgggggctgg

SEQ ID NO: 519 - DNA, 1033 bp, Homo sapiens
  source 1..1033: mol_type = genomic DNA
gcaatctacaaggattctaatttctccacatcctgcatttaagacttgcaaagctgaattaatcacaggatgaggaagtggcttctctgaaacattttcctctttcacattttaaactttctctttcatacatgacatgaaacacagcctacgcacgaaagtgactaggaggaaggatattataaagtgatgcaaacagaaattccaccagcctccatgtatcatcatgtgtcataactcagtcaagctcagtgagcattctcagcacattgcctcaacagcttcaaggtgagccagctcaagactttgctctccaccaggcagaagatgacagactgtgaatttggatatatttacaggctggctcaggactatctgcagtgcgtcctacagataccacaacctggatcaggtccaagcaaaacgtccagagtgctacaaaatgttgcgttctcagtccaaaaagaagtggaaaagaatctgaagtcatgcttggacaatgttaatgttgtgtccgtagacactgccagaacactattcaaccaagtgatggaaaaggagtttgaagacggcatcattaactggggaagaattgtaaccatatttgcatttgaaggtattctcatcaagaaacttctacgacagcaaattgccccggatgtggatacctataaggagatttcatattttgttgcggagttcataatgaataacacaggagaatggataaggcaaaacggaggctgggaaaatggctttgtaaagaagtttgaacctaaatctggctggatgacttttctagaagttacaggaaagatctgtgaaatgctatctctcctgaagcaatactgttgaccagaaaggacactccatattgtgaaaccggcctaatttttctgactgatatggaaacgattgccaacacatacttctacttttaaataaacaactttgatgatgtaacttgaccttccagagttatggaaattttgtccccatgtaatgaataaattgtatgtatttttctctatat

SEQ ID NO: 520 - DNA, 809 bp, Homo sapiens
  source 1..809: mol_type = genomic DNA
acagcttcaaggtgagccagctcaagactttgctctccaccaggcagaagatgacagactgtgaatttggatatatttacaggctggctcaggactatctgcagtgcgtcctacagataccacaacctggatcaggtccaagcaaaacgtccagagtgctacaaaatgttgcgttctcagtccaaaaagaagtggaaaagaatctgaagtcatgcttggacaatgttaatgttgtgtccgtagacactgccagaacactattcaaccaagtgatggaaaaggagtttgaagacggcatcattaactggggaagaattgtaaccatatttgcatttgaaggtattctcatcaagaaacttctacgacagcaaattgccccggatgtggatacctataaggagatttcatattttgttgcggagttcataatgaataacacaggagaatggataaggcaaaacggaggctgggggaaatggcacaatcacacacctatgctggtagagtcagtggcccacaagaagaggaaaatggctttgtaaagaagtttgaacctaaatctggctggatgacttttctagaagttacaggaaagatctgtgaaatgctatctctcctgaagcaatactgttgaccagaaaggacactccatattgtgaaaccggcctaatttttctgactgatatggaaacgattgccaacacatacttctacttttaaataaacaactttgatgatgtaacttgaccttccagagttatggaaattttgtccccatgtaatgaataaattgtatgtatttttctcta

SEQ ID NO: 521 - DNA, 2493 bp, Homo sapiens
  source 1..2493: mol_type = genomic DNA
gagaaaacccgcgggcctggccgggtgcaggccacccttgccggcggatcggaatccccgcccacaccgtggtctttccagcaccgcagacacctgccggctcctcccgagcggagctcagggctgacaaagcgcggtcagagcggccgcttactggggctcgcccgctccttagagcactggcaatgatgtgcggatcctcgctgctgctgctgggaaactgttgagtggctgaatgaccccaggggaccctgggagagctctgaagccctcagccaccaagtggctgggctggcaagggttcattcattcattcaacaaatacgaatgtgcagcggtgctggggtcatgatggctcggtgggcagcgaggggccgggccggctggaggagcacagtgcggattctgtcgccactgggacactgtgaaccaggagtgagtcggagctgccgcgctgcccaggccatggactgtgaggtcaacaacggttccagcctcagggatgagtgcatcacaaacctactggtgtttggcttcctccaaagctgttctgacaacagcttccgcagagagctggacgcactgggccacgagctgccagtgctggctccccagtgggagggctacgatgagctgcagactgatggcaaccgcagcagccactcccgcttgggaagaatagaggcagattctgaaagtcaagaagacatcatccggaatattgccaggcacctcgcccaggtcggggacagcatggaccgtagcatccctccgggcctggtgaacggcctggccctgcagctcaggaacaccagccggtcggaggaggaccggaacagggacctggccactgccctggagcagctgctgcaggcctaccctagagacatggagaaggagaagaccatgctggtgctggccctgctgctggccaagaaggtggccagtcacacgccgtccttgctccgtgatgtctttcacacaacagtgaattttattaaccagaacctacgcacctacgtgaggagcttagccagaaatgggatggactgaacggacagttccagaagtgtgactggctaaagctcgatgtggtcacagctgtatagctgcttccagtgtagacggagccctggcatgtcaacagcgttcctagagaagacaggctggaagatagctgtgacttctattttaaagacaatgttaaacttataacccactttaaaatatctacattaatatacttgaatgaaaatgtccatttacacgtatttgaatggccttcatatcatccacacatgaatctgcacatctgtaaatctacacacggtgcctttatttccactgtgcaggttcccacttaaaaattaaattggaaagcaggtttcaaggaagtagaaacaaaatacaatttttttggtaaaaaaaaattactgtttattaaagtacaaccatagaggatggtcttacagcaggcagtatcctgtttgaggaaagcaagaatcagagaaggaacataccccttacaaatgaaaaattccactcaaaatagggactatctatcttaatactaaggaaccaacaatcttcctgtttaaaaaaccacatggcacagagattctgaactaaagtgctgcactcaaatgatgggaagtccggccccagtacacaggggcttgactttttcaacttcgtttcctttgttggagtcaaaaagaaccacttgtggttctaaaaggtgtgaaggtgatttaagggcccaggtcagccactgtttgtttacaaaatcaggtaactaactgcatacactttttctctttccatgacatcaagactttgctaaagacatgaagccacgggtgccagaagctactgcgatgccccgggagttagccccctggtaatagctgtaaacttccaatttctagccatacgctcagctcatccatgcctcagaagtgcatctggagagaacaggtttctaagcataaaagatgaaagagcagttggactttttaaaaattcagcaaagtggttccctctcttagggacagtcaaaaccaagtcacttaggtagtaccaaaataaataaggaaaagcttagctttagaaacagtgcaacactggtctgctgttccagtggtaagctatgtcccaggaatcagtttaaaagcacgacagtggatgctgggtccatatcacacacattgctgtgaacaggaaactcctgtgaccacaacatgaggccactggagacgcatatgagtaagggcactgacggactcatgatttcttcttaccagatgctttcctgttctttaagagtttaaaatcatcagaaaggaaaaacaaactctatattgttcagcatgcaatacataccacgctagggctggctcaattgaaagtgggcaaaagcttacaaatactaaaaagaagtgctgccgcgcagtgtggaggccactgtttggaaataaatcttcctaacactac

SEQ ID NO: 522 - DNA, 854 bp, Homo sapiens
  source 1..854: mol_type = genomic DNA
ggacgcgcccgcgcccccgcggctggagggtggtcgccactgggacactgtgaaccaggagtgagtcggagctgccgcgctgcccaggccatggactgtgaggtcaacaacggttccagcctcagggatgagtgcatcacaaacctactggtgtttggcttcctccaaagctgttctgacaacagcttccgcagagagctggacgcactgggccacgagctgccagtgctggctccccagtgggagggctacgatgagctgcagactgatggcaaccgcagcagccactcccgcttgggaagaatagaggcaggggcgtcagacaataacacagcaagtgctgaggaagaaacggaggcggcagggagcgtggcagttgagcgtggccttcatggagctgcgacagtgattctgaaagtcaagaagacatcatccggaatattgccaggcacctcgcccaggtcggggacagcatggaccgtagcatccctccgggcctggtgaacggcctggccctgcagctcaggaacaccagccggtcggaggaggaccggaacagggacctggccactgccctggagcagctgctgcaggcctaccctagagacatggagaaggagaagaccatgctggtgctggccctgctgctggccaagaaggtggccagtcacacgccgtccttgctccgtgatgtctttcacacaacagtgaattttattaaccagaacctacgcacctacgtgaggagcttagccagaaatgggatggactgaacggacagttccagaagtgtgactggctaaagctcgatgtggtcacagctgtatagctgcttccagtgtagacggagccct

SEQ ID NO: 523 - DNA, 1879 bp, Homo sapiens
  source 1..1879: mol_type = genomic DNA
ggaagcgcgcggggcgccataaggaggaagcgggtagtcgaccgtgtccgcgcgcctgggagacgctgcctcggcccggacgcgcccgcgcccccgcggctggagggtgattctgaaagtcaagaagacatcatccggaatattgccaggcacctcgcccaggtcggggacagcatggaccgtagcatccctccgggcctggtgaacggcctggccctgcagctcaggaacaccagccggtcggaggaggaccggaacagggacctggccactgccctggagcagctgctgcaggcctaccctagagacatggagaaggagaagaccatgctggtgctggccctgctgctggccaagaaggtggccagtcacacgccgtccttgctccgtgatgtctttcacacaacagtgaattttattaaccagaacctacgcacctacgtgaggagcttagccagaaatgggatggactgaacggacagttccagaagtgtgactggctaaagctcgatgtggtcacagctgtatagctgcttccagtgtagacggagccctggcatgtcaacagcgttcctagagaagacaggctggaagatagctgtgacttctattttaaagacaatgttaaacttataacccactttaaaatatctacattaatatacttgaatgaaaatgtccatttacacgtatttgaatggccttcatatcatccacacatgaatctgcacatctgtaaatctacacacggtgcctttatttccactgtgcaggttcccacttaaaaattaaattggaaagcaggtttcaaggaagtagaaacaaaatacaatttttttggtaaaaaaaaattactgtttattaaagtacaaccatagaggatggtcttacagcaggcagtatcctgtttgaggaaagcaagaatcagagaaggaacataccccttacaaatgaaaaattccactcaaaatagggactatctatcttaatactaaggaaccaacaatcttcctgtttaaaaaaccacatggcacagagattctgaactaaagtgctgcactcaaatgatgggaagtccggccccagtacacaggggcttgactttttcaacttcgtttcctttgttggagtcaaaaagaaccacttgtggttctaaaaggtgtgaaggtgatttaagggcccaggtcagccactgtttgtttacaaaatcaggtaactaactgcatacactttttctctttccatgacatcaagactttgctaaagacatgaagccacgggtgccagaagctactgcgatgccccgggagttagccccctggtaatagctgtaaacttccaatttctagccatacgctcagctcatccatgcctcagaagtgcatctggagagaacaggtttctaagcataaaagatgaaagagcagttggactttttaaaaattcagcaaagtggttccctctcttagggacagtcaaaaccaagtcacttaggtagtaccaaaataaataaggaaaagcttagctttagaaacagtgcaacactggtctgctgttccagtggtaagctatgtcccaggaatcagtttaaaagcacgacagtggatgctgggtccatatcacacacattgctgtgaacaggaaactcctgtgaccacaacatgaggccactggagacgcatatgagtaagggcactgacggactcatgatttcttcttaccagatgctttcctgttctttaagagtttaaaatcatcagaaaggaaaaacaaactctatattgttcagcatgcaatacataccacgctagggctggctcaattgaaagtgggcaaaagcttacaaatactaaaaagaagtgctgccgcgcagtgtgga

SEQ ID NO: 524 - DNA, 2126 bp, Homo sapiens
  source 1..2126: mol_type = genomic DNA
ggaggaagcgcgcggggcgccataaggaggaagcgggtagtcgaccgtgtccgcgcgcctgggagacgctgcctcggcccggacgcgcccgcgcccccgcggctggagggtggtcaacaacggttccagcctcagggatgagtgcatcacaaacctactggtgtttggcttcctccaaagctgttctgacaacagcttccgcagagagctggacgcactgggccacgagctgccagtgctggctccccagtgggagggctacgatgagctgcagactgatggcaaccgcagcagccactcccgcttgggaagaatagaggcagattctgaaagtcaagaagacatcatccggaatattgccaggcacctcgcccaggtcggggacagcatggaccgtagcatccctccgggcctggtgaacggcctggccctgcagctcaggaacaccagccggtcggaggaggaccggaacagggacctggccactgccctggagcagctgctgcaggcctaccctagagacatggagaaggagaagaccatgctggtgctggccctgctgctggccaagaaggtggccagtcacacgccgtccttgctccgtgatgtctttcacacaacagtgaattttattaaccagaacctacgcacctacgtgaggagcttagccagaaatgggatggactgaacggacagttccagaagtgtgactggctaaagctcgatgtggtcacagctgtatagctgcttccagtgtagacggagccctggcatgtcaacagcgttcctagagaagacaggctggaagatagctgtgacttctattttaaagacaatgttaaacttataacccactttaaaatatctacattaatatacttgaatgaaaatgtccatttacacgtatttgaatggccttcatatcatccacacatgaatctgcacatctgtaaatctacacacggtgcctttatttccactgtgcaggttcccacttaaaaattaaattggaaagcaggtttcaaggaagtagaaacaaaatacaatttttttggtaaaaaaaaattactgtttattaaagtacaaccatagaggatggtcttacagcaggcagtatcctgtttgaggaaagcaagaatcagagaaggaacataccccttacaaatgaaaaattccactcaaaatagggactatctatcttaatactaaggaaccaacaatcttcctgtttaaaaaaccacatggcacagagattctgaactaaagtgctgcactcaaatgatgggaagtccggccccagtacacaggggcttgactttttcaacttcgtttcctttgttggagtcaaaaagaaccacttgtggttctaaaaggtgtgaaggtgatttaagggcccaggtcagccactgtttgtttacaaaatcaggtaactaactgcatacactttttctctttccatgacatcaagactttgctaaagacatgaagccacgggtgccagaagctactgcgatgccccgggagttagccccctggtaatagctgtaaacttccaatttctagccatacgctcagctcatccatgcctcagaagtgcatctggagagaacaggtttctaagcataaaagatgaaagagcagttggactttttaaaaattcagcaaagtggttccctctcttagggacagtcaaaaccaagtcacttaggtagtaccaaaataaataaggaaaagcttagctttagaaacagtgcaacactggtctgctgttccagtggtaagctatgtcccaggaatcagtttaaaagcacgacagtggatgctgggtccatatcacacacattgctgtgaacaggaaactcctgtgaccacaacatgaggccactggagacgcatatgagtaagggcactgacggactcatgatttcttcttaccagatgctttcctgttctttaagagtttaaaatcatcagaaaggaaaaacaaactctatattgttcagcatgcaatacataccacgctagggctggctcaattgaaagtgggcaaaagcttacaaatactaaaaagaagtgctgccgcgcagtgtggaggccactgtttggaaataaatcttcctaacact

SEQ ID NO: 525 - DNA, 2167 bp, Homo sapiens
  source 1..2167: mol_type = genomic DNA
ggaggaagcgcgcggggcgccataaggaggaagcgggtagtcgaccgtgtccgcgcgcctgggagacgctgcctcggcccggacgcgcccgcgcccccgcggctggagggtggtcgccactgggacactgtgaaccaggagtgagtcggagctgccgcgctgcccaggccatggactgtgaggtcaacaacggttccagcctcagggatgagtgcatcacaaacctactggtgtttggcttcctccaaagctgttctgacaacagcttccgcagagagctggacgcactgggccacgagctgccagtgctggctccccagtgggagggctacgatgagctgcagactgatggcaaccgcagcagccactcccgcttgggaagaatagaggcagattctgaaagtcaagaagacatcatccggaatattgccaggcacctcgcccaggtcggggacagcatggaccgtagcatccctccgggcctggtgaacggcctggccctgcagctcaggaacaccagccggtcggaggaggaccggaacagggacctggccactgccctggagcagctgctgcaggcctaccctagagacatggagaaggagaagaccatgctggtgctggccctgctgctggccaagaaggtggccagtcacacgccgtccttgctccgtgatgtctttcacacaacagtgaattttattaaccagaacctacgcacctacgtgaggagcttagccagaaatgggatggactgaacggacagttccagaagtgtgactggctaaagctcgatgtggtcacagctgtatagctgcttccagtgtagacggagccctggcatgtcaacagcgttcctagagaagacaggctggaagatagctgtgacttctattttaaagacaatgttaaacttataacccactttaaaatatctacattaatatacttgaatgaaaatgtccatttacacgtatttgaatggccttcatatcatccacacatgaatctgcacatctgtaaatctacacacggtgcctttatttccactgtgcaggttcccacttaaaaattaaattggaaagcaggtttcaaggaagtagaaacaaaatacaatttttttggtaaaaaaaaattactgtttattaaagtacaaccatagaggatggtcttacagcaggcagtatcctgtttgaggaaagcaagaatcagagaaggaacataccccttacaaatgaaaaattccactcaaaatagggactatctatcttaatactaaggaaccaacaatcttcctgtttaaaaaaccacatggcacagagattctgaactaaagtgctgcactcaaatgatgggaagtccggccccagtacacaggggcttgactttttcaacttcgtttcctttgttggagtcaaaaagaaccacttgtggttctaaaaggtgtgaaggtgatttaagggcccaggtcagccactgtttgtttacaaaatcaggtaactaactgcatacactttttctctttccatgacatcaagactttgctaaagacatgaagccacgggtgccagaagctactgcgatgccccgggagttagccccctggtaatagctgtaaacttccaatttctagccatacgctcagctcatccatgcctcagaagtgcatctggagagaacaggtttctaagcataaaagatgaaagagcagttggactttttaaaaattcagcaaagtggttccctctcttagggacagtcaaaaccaagtcacttaggtagtaccaaaataaataaggaaaagcttagctttagaaacagtgcaacactggtctgctgttccagtggtaagctatgtcccaggaatcagtttaaaagcacgacagtggatgctgggtccatatcacacacattgctgtgaacaggaaactcctgtgaccacaacatgaggccactggagacgcatatgagtaagggcactgacggactcatgatttcttcttaccagatgctttcctgttctttaagagtttaaaatcatcagaaaggaaaaacaaactctatattgttcagcatgcaatacataccacgctagggctggctcaattgaaagtgggcaaaagcttacaaatactaaaaagaagtgctgccgcgcagtgtggaggcc

SEQ ID NO: 526 - DNA, 700 bp, Homo sapiens
  source 1..700: mol_type = genomic DNA
cactgtctgaaacagtcgcgtaaggggtcgccactgggacactgtgaaccaggagtgagtcggagctgccgcgctgcccaggccatggactgtgaggtcaacaacggttccagcctcagggatgagtgcatcacaaacctactggtgtttggcttcctccaaagctgttctgacaacagcttccgcagagagctggacgcactgggccacgagctgccagtgctggctccccagtgggagggctacgatgagctgcagactgatggcaaccgcagcagccactcccgcttgggaagaatagaggcagattctgaaagtcaagaagacatcatccggaatattgccaggcacctcgcccaggtcggggacagcatggaccgtagcatccctccgggcctggtgaacggcctggccctgcagctcaggaacaccagccggtcggaggaggaccggaacagggacctggccactgccctggagcagctgctgcaggcctaccctagagacatggagaaggagaagaccatgctggtgctggccctgctgctggccaagaaggtggccagtcacacgccgtccttgctccgtgatgtctttcacacaacagtgaattttattaaccagaacctacgcacctacgtgaggagcttagccagaaatgggatggactgaacggacagttccagaagtgtgactggct

SEQ ID NO: 527 - DNA, 3039 bp, Homo sapiens
  source 1..3039: mol_type = genomic DNA
gtggccgctctaggcagcggggaggtcgcggggttgaggggggttgtgaaaggagagcggcctctcctctatggtcacggggccggggcacgcttcccccactctgtcttgttacttccggtagcgaagcctctccctcttcctctgctcccgcggggtctgtgctgagaataatggcccggttggcccgggacgagtggaatgattaatgatgttttgcagcagttttctacgtctgaaattttttatgtctctggaacccagaatttgctaagagatggaggaacctcagaaaagctatgtgaacacaatggaccttgagagagatgaacctctcaaaagcaccggccctcagatttctgttagtgaattttcttgccactgctgctacgacatcctggttaaccccaccaccttgaactgtgggcacagcttctgccgtcactgccttgctttatggtgggcatcttcaaagaaaacagaatgtccagaatgcagagaaaaatgggaaggtttccccaaagtcagtattctcctcagggatgccattgaaaagttatttcctgatgccattagactgagatttgaagacattcagcagaataatgacatagtccaaagtcttgcagcctttcagaaatatgggaatgatcagattcctttagctcctaacacaggccgagcgaatcagcagatgggagggggattcttttccggtgtgctcacagctttaactggagtggcagtggtcctgctcgtctatcactggagcagcagggaatctgaacacgacctcctggtccacaaggctgtggccaaatggacggcggaagaagttgtcctctggctggagcagctgggcccttgggcatctctttacagggaaaggtttttatctgaacgagtaaatggaaggttgcttttaactttgacagaggaagaattttccaagacgccctataccatagaaaacagcagccacaggagagccatcctcatggagctagaacgtgtcaaagcattaggcgtgaagcccccccagaatctctgggaatataaggctgtgaacccaggcaggtccctgttcctgctatacgccctcaagagctcccccaggctgagtctgctctacctgtacctgtttgactacaccgacaccttcctacctttcatccacaccatctgccctctgcaagaagacagctctggggaggacatcgtcaccaagcttctggatcttaaggagcctacgtggaagcagtggagagagttcctggtcaaatactccttccttccataccagctgattgctgagtttgcttgggactggttggaggtccattactggacatcacggtttctcatcatcaatgctatgttactctcagttctggaattattctccttttggagaatctggtcgagaagtgaactgaagaccgtgcctcagaggatgtggagccatttctggaaagtatcaacgcaggggctttttgtggccatgttctggcccctcatccctcagtttgtttgcaactgtttgttttactgggccctgtactttaacccaattattaacattgatcttgtggtcaaggaactccggcggctggaaacccaggtgttgtgactggcactgcccaggctgagactcttcaagtcccgctgacgtctgagctttgatgcttaagaggggtgaggcagggagcggacttcctattttctaccctcagtaaaacaaggtgctgctttgtatatcaaaagctccaaccatgtcctctccccctcagcctgtgggtggcacgagcaaggactgacatccgcacagggaggattgtctgtttggctgacacagcagcagcccttcccacccagccaccttcctcacagggactaggaggctcagtccccaacggctggcaagactcagggtcctcagtggacatggtgtgggtgacatcagaagggtgccacatcagtcccctccccaacctcagtgactgacagaggatccggatctcagagcctgagaccaggtttattggggcctggcctgtcctctaagtcaagtttaggaaaacaaggataagattctgtcataggcatagagagttgcacataaaaaataccgaagaaaacccaaaattcaatcaacaattctgtcttattgaagagttgctaggattcagagtaaaactcaaaggattcagtttgagcctagaatgatggttagacttgtagtcactgggcttttgttttgctttatggaaatcattgaaggtctggatccctttctctgaatggagagattgagagggatgtcgggcagttcccattagatttagtggccttcatgttattcagaattgttttggtgatacctcacccctgtaatcccagcactttgggtgggtgaggcaggcggatcacttgaagccaggacttcaagaccagcttggccaacatggtgaaacctcatctctactaaaaatacaaaaattagccaagtgtgatggcacatacctgtaatcccagctacttggaattggaaatcgcctgaacccaggaggcggaggttgcagggagggagactgcaccactgcacttcagcctgggtgacagagggagactctgtcttaaaaaaaaaaaaaaaatcatctgtaaaataaattccgggatagtcgttttgttcaaggaaatgttttgtaaattgagctcacactatataatctttattgtcctatcctgatgtataatacagcaggtataattacaccaagcgctatagttataaatatggcatgaagtgaactatggccttttatttccttccagtgtgaacacagcaggtgtgagatgtcatcttggaagacaggccttgcagaaataggcctacatccaaaatattatcttgtgactccatgaaccattcattaaccctttgtatctttgagtgaaaattttactcaaaagttgcatctggaagttcgaagaaattacttgaaataaaaataaagatttctatatagataaaaccta

SEQ ID NO: 528 - DNA, 1448 bp, Homo sapiens
  source 1..1448: mol_type = genomic DNA
gcagcagttttctacgtctgaaattttttatgtctctggaacccagaatttgctaagagatggaggaacctcagaaaagctatgtgaacacaatggaccttgagagagatgaacctctcaaaagcaccggccctcagatttctgttagtgaattttcttgccactgctgctacgacatcctggttaaccccaccaccttgaactgtgggcacagcttctgccgtcactgccttgctttatggtgggcatcttcaaagaaaacagaatgtccagaatgcagagaaaaatgggaaggtttccccaaagtcagtattctcctcaggtggtcctgctcgtctatcactggagcagcagggaatctgaacacgacctcctggtccacaaggctgtggccaaatggacggcggaagaagttgtcctctggctggagcagctgggcccttgggcatctctttacagggaaaggtttttatctgaacgagtaaatggaaggttgcttttaactttgacagaggaagaattttccaagacgccctataccatagaaaacagcagccacaggagagccatcctcatggagctagaacgtgtcaaagcattaggcgtgaagcccccccagaatctctgggaatataaggctgtgaacccaggcaggtccctgttcctgctatacgccctcaagagctcccccaggctgagtctgctctacctgtacctgtttgactacaccgacaccttcctacctttcatccacaccatctgccctctgcaagaagacagctctggggaggacatcgtcaccaagcttctggatcttaaggagcctacgtggaagcagtggagagagttcctggtcaaatactccttccttccataccagctgattgctgagtttgcttgggactggttggaggtccattactggacatcacggtttctcatcatcaatgctatgttactctcagttctggaattattctccttttggagaatctggtcgagaagtgaactgaagaccgtgcctcagaggatgtggagccatttctggaaagtatcaacgcaggggctttttgtggccatgttctggcccctcatccctcagtttgtttgcaactgtttgttttactgggccctgtactttaacccaattattaacattgatcttgtggtcaaggaactccggcggctggaaacccaggtgttgtgactggcactgcccaggctgagactcttcaagtcccgctgacgtctgagctttgatgcttaagaggggtgaggcagggagcggacttcctattttctaccctcagtaaaacaaggtgctgctttgtatatcaaaagctccaaccatgtcctctccccctcagcctgtgggtggcacgagcaaggactgacatccgcacagggaggattgtctgtttggctgacacagcagcagcccttcccac

SEQ ID NO: 529 - DNA, 4555 bp, Homo sapiens
  source 1..4555: mol_type = genomic DNA
aatcggaataggcaagcttccggcgggaagtgagccagggcttggcgcggcggccgtggttgcggcgcgggaagtttggatcctggttccgtccgctaggagtctgcgtgcgaggattatggctgctgttcctcaaaataatctacaggagcaactagaacgtcactcagccagaacacttaataataaattaagtctttcaaaaccaaaattttcaggtttcacttttaaaaagaaaacatcttcagataacaatgtatctgtaactaatgtgtcagtagcaaaaacacctgtattaagaaataaagatgttaatgttaccgaagacttttccttcagtgaacctctacccaacaccacaaatcagcaaagggtcaaggacttctttaaaaatgctccagcaggacaggaaacacagagaggtggatcaaaatcattattgccagatttcttgcagactccgaaggaagttgtatgcactacccaaaacacaccaactgtaaagaaatcccgggatactgctctcaagaaattagaatttagttcttcaccagattctttaagtaccatcaatgattgggatgatatggatgactttgatacttctgagacttcaaaatcatttgttacaccaccccaaagtcactttgtaagagtaagcactgctcagaaatcaaaaaagggtaagagaaacttttttaaagcacagctttatacaacaaacacagtaaagactgatttgcctccaccctcctctgaaagcgagcaaatagatttgactgaggaacagaaggatgactcagaatggttaagcagcgatgtgatttgcatcgatgatggccccattgctgaagtgcatataaatgaagatgctcaggaaagtgactctctgaaaactcatttggaagatgaaagagataatagcgaaaagaagaagaatttggaagaagctgaattacattcaactgagaaagttccatgtattgaatttgatgatgatgattatgatacggattttgttccaccttctccagaagaaattatttctgcttcttcttcctcttcaaaatgccttagtacgttaaaggaccttgacacctctgacagaaaagaggatgttcttagcacatcaaaagatcttttgtcaaaacctgagaaaatgagtatgcaggagctgaatccagaaaccagcacagactgtgacgctagacagataagtttacagcagcagcttattcatgtgatggagcacatctgtaaattaattgatactattcctgatgataaactgaaacttttggattgtgggaacgaactgcttcagcagcggaacataagaaggaaacttctaacggaagtagattttaataaaagtgatgccagtcttcttggctcattgtggagatacaggcctgattcacttgatggccctatggagggtgattcctgccctacagggaattctatgaaggagttaaatttttcacaccttccctcaaattctgtttctcctggggactgtttactgactaccaccctaggaaagacaggattctctgccaccaggaagaatctttttgaaaggcctttattcaatacccatttacagaagtcctttgtaagtagcaactgggctgaaacaccaagactaggaaaaaaaaatgaaagctcttatttcccaggaaatgttctcacaagcactgctgtgaaagatcagaataaacatactgcttcaataaatgacttagaaagagaaacccaaccttcctatgatattgataattttgacatagatgactttgatgatgatgatgactgggaagacataatgcataatttagcagccagcaaatcttccacagctgcctatcaacccatcaaggaaggtcggccaattaaatcagtatcagaaagactttcctcagccaagacagactgtcttccagtgtcatctactgctcaaaatataaacttctcagagtcaattcagaattatactgacaagtcagcacaaaatttagcatccagaaatctgaaacatgagcgtttccaaagtcttagttttcctcatacaaaggaaatgatgaagatttttcataaaaaatttggcctgcataattttagaactaatcagctagaggcgatcaatgctgcactgcttggtgaagactgttttatcctgatgccgactggaggtggtaagagtttgtgttaccagctccctgcctgtgtttctcctggggtcactgttgtcatttctcccttgagatcacttatcgtagatcaagtccaaaagctgacttccttggatattccagctacatatctgacaggtgataagactgactcagaagctacaaatatttacctccagttatcaaaaaaagacccaatcataaaacttctatatgtcactccagaaaagatctgtgcaagtaacagactcatttctactctggagaatctctatgagaggaagctcttggcacgttttgttattgatgaagcacattgtgtcagtcagtggggacatgattttcgtcaagattacaaaagaatgaatatgcttcgccagaagtttccttctgttccggtgatggctcttacggccacagctaatcccagggtacagaaggacatcctgactcagctgaagattctcagacctcaggtgtttagcatgagctttaacagacataatctgaaatactatgtattaccgaaaaagcctaaaaaggtggcatttgattgcctagaatggatcagaaagcaccacccatatgattcagggataatttactgcctctccaggcgagaatgtgacaccatggctgacacgttacagagagatgggctcgctgctcttgcttaccatgctggcctcagtgattctgccagagatgaagtgcagcagaagtggattaatcaggatggctgtcaggttatctgtgctacaattgcatttggaatggggattgacaaaccggacgtgcgatttgtgattcatgcatctctccctaaatctgtggagggttactaccaagaatctggcagagctggaagagatggggaaatatctcactgcctgcttttctatacctatcatgatgtgaccagactgaaaagacttataatgatggaaaaagatggaaaccatcatacaagagaaactcacttcaataatttgtatagcatggtacattactgtgaaaatataacggaatgcaggagaatacagcttttggcctactttggtgaaaatggatttaatcctgatttttgtaagaaacacccagatgtttcttgtgataattgctgtaaaacaaaggattataaaacaagagatgtgactgacgatgtgaaaagtattgtaagatttgttcaagaacatagttcatcacaaggaatgagaaatataaaacatgtaggtccttctggaagatttactatgaatatgctggtcgacattttcttggggagtaagagtgcaaaaatccagtcaggtatatttggaaaaggatctgcttattcacgacacaatgccgaaagactttttaaaaagctgatacttgacaagattttggatgaagacttatatatcaatgccaatgaccaggcgatcgcttatgtgatgctcggaaataaagcccaaactgtactaaatggcaatttaaaggtagactttatggaaacagaaaattccagcagtgtgaaaaaacaaaaagcgttagtagcaaaagtgtctcagagggaagagatggttaaaaaatgtcttggagaacttacagaagtctgcaaatctctggggaaagtttttggtgtccattacttcaatatttttaataccgtcactctcaagaagcttgcagaatctttatcttctgatcctgaggttttgcttcaaattgatggtgttactgaagacaaactggaaaaatatggtgcggaagtgatttcagtattacagaaatactctgaatggacatcgccagctgaagacagttccccagggataagcctgtccagcagcagaggccccggaagaagtgccgctgaggagctcgacgaggaaatacccgtatcttcccactactttgcaagtaaaaccagaaatgaaaggaagaggaaaaagatgccagcctcccaaaggtctaagaggagaaaaactgcttccagtggttccaaggcaaagggggggtctgccacatgtagaaagatatcttccaaaacgaaatcctccagcatcattggatccagttcagcctcacatacttctcaagcgacatcaggagccaatagcaaattggggattatggctccaccgaagcctataaatagaccgtttcttaagccttcatatgcattctcataacaaccgaatctcaatgtacatagaccctctttcttgtttgtcagcatctgaccatctgtgactataaagctgttattcttgttataccatttgaagtttttactcgtctctattaatatttaaataaatgctggggggtgatagttcttctttttaaaataaacattttcttttgaataagca

SEQ ID NO: 530 - DNA, 3505 bp, Homo sapiens
  source 1..3505: mol_type = genomic DNA
gaagatgctcaggaaagtgactctctgaaaactcatttggaagatgaaagagataatagcgaaaagaagaagaatttggaagaagctgaattacattcaactgagaaagttccatgtattgaatttgatgatgatgattatgatacggattttgttccaccttctccagaagaaattatttctgcttcttcttcctcttcaaaatgccttagtacgttaaaggaccttgacacctctgacagaaaagaggatgttcttagcacatcaaaagatcttttgtcaaaacctgagaaaatgagtatgcaggagctgaatccagaaaccagcacagactgtgacgctagacagataagtttacagcagcagcttattcatgtgatggagcacatctgtaaattaattgatactattcctgatgataaactgaaacttttggattgtgggaacgaactgcttcagcagcggaacataagaaggaaacttctaacggaagtagattttaataaaagtgatgccagtcttcttggctcattgtggagatacaggcctgattcacttgatggccctatggagggtgattcctgccctacagggaattctatgaaggagttaaatttttcacaccttccctcaaattctgtttctcctggggactgtttactgactaccaccctaggaaagacaggattctctgccaccaggaagaatctttttgaaaggcctttattcaatacccatttacagaagtcctttgtaagtagcaactgggctgaaacaccaagactaggaaaaaaaaatgaaagctcttatttcccaggaaatgttctcacaagcactgctgtgaaagatcagaataaacatactgcttcaataaatgacttagaaagagaaacccaaccttcctatgatattgataattttgacatagatgactttgatgatgatgatgactgggaagacataatgcataatttagcagccagcaaatcttccacagctgcctatcaacccatcaaggaaggtcggccaattaaatcagtatcagaaagactttcctcagccaagacagactgtcttccagtgtcatctactgctcaaaatataaacttctcagagtcaattcagaattatactgacaagtcagcacaaaatttagcatccagaaatctgaaacatgagcgtttccaaagtcttagttttcctcatacaaaggaaatgatgaagatttttcataaaaaatttggcctgcataattttagaactaatcagctagaggcgatcaatgctgcactgcttggtgaagactgttttatcctgatgccgactggaggtggtaagagtttgtgttaccagctccctgcctgtgtttctcctggggtcactgttgtcatttctcccttgagatcacttatcgtagatcaagtccaaaagctgacttccttggatattccagctacatatctgacaggtgataagactgactcagaagctacaaatatttacctccagttatcaaaaaaagacccaatcataaaacttctatatgtcactccagaaaagatctgtgcaagtaacagactcatttctactctggagaatctctatgagaggaagctcttggcacgttttgttattgatgaagcacattgtgtcagtcagtggggacatgattttcgtcaagattacaaaagaatgaatatgcttcgccagaagtttccttctgttccggtgatggctcttacggccacagctaatcccagggtacagaaggacatcctgactcagctgaagattctcagacctcaggtgtttagcatgagctttaacagacataatctgaaatactatgtattaccgaaaaagcctaaaaaggtggcatttgattgcctagaatggatcagaaagcaccacccatatgattcagggataatttactgcctctccaggcgagaatgtgacaccatggctgacacgttacagaagtggattaatcaggatggctgtcaggttatctgtgctacaattgcatttggaatggggattgacaaaccggacgtgcgatttgtgattcatgcatctctccctaaatctgtggagggttactaccaagaatctggcagagctggaagagatggggaaatatctcactgcctgcttttctatacctatcatgatgtgaccagactgaaaagacttataatgatggaaaaagatggaaaccatcatacaagagaaactcacttcaataatttgtatagcatggtacattactgtgaaaatataacggaatgcaggagaatacagcttttggcctactttggtgaaaatggatttaatcctgatttttgtaagaaacacccagatgtttcttgtgataattgctgtaaaacaaaggattataaaacaagagatgtgactgacgatgtgaaaagtattgtaagatttgttcaagaacatagttcatcacaaggaatgagaaatataaaacatgtaggtccttctggaagatttactatgaatatgctggtcgacattttcttggggagtaagagtgcaaaaatccagtcaggtatatttggaaaaggatctgcttattcacgacacaatgccgaaagactttttaaaaagctgatacttgacaagattttggatgaagacttatatatcaatgccaatgaccaggcgatcgcttatgtgatgctcggaaataaagcccaaactgtactaaatggcaatttaaaggtagactttatggaaacagaaaattccagcagtgtgaaaaaacaaaaagcgttagtagcaaaagtgtctcagagggaagagatggttaaaaaatgtcttggagaacttacagaagtctgcaaatctctggggaaagtttttggtgtccattacttcaatatttttaataccgtcactctcaagaagcttgcagaatctttatcttctgatcctgaggttttgcttcaaattgatggtgttactgaagacaaactggaaaaatatggtgcggaagtgatttcagtattacagaaatactctgaatggacatcgccagctgaagacagttccccagggataagcctgtccagcagcagaggccccggaagaagtgccgctgaggagctcgacgaggaaatacccgtatcttcccactactttgcaagtaaaaccagaaatgaaaggaagaggaaaaagatgccagcctcccaaaggtctaagaggagaaaaactgcttccagtggttccaaggcaaagggggggtctgccacatgtagaaagatatcttccaaaacgaaatcctccagcatcattggatccagttcagcctcacatacttctcaagcgacatcaggagccaatagcaaattggggattatggctccaccgaagcctataaatagaccgtttcttaagccttcatatgcattctcataacaaccgaatctcaatgtacatagaccctctttcttgtttgtcagcatctgaccatctgtgactataa

SEQ ID NO: 531 - DNA, 2011 bp, Homo sapiens
  source 1..2011: mol_type = genomic DNA
ttattttcctagacaagtcagcacaaaatttagcatccagaaatctgaaacatgagcgtttccaaagtcttagttttcctcatacaaaggaaatgatgaagatttttcataaaaaatttggcctgcataattttagaactaatcagctagaggcgatcaatgctgcactgcttggtgaagactgttttatcctgatgccgactgtagattccagctacatatctgacaggtgataagactgactcagaagctacaaatatttacctccagttatcaaaaaaagacccaatcataaaacttctatatgtcactccagaaaagatctgtgcaagtaacagactcatttctactctggagaatctctatgagaggaagctcttggcacgttttgttattgatgaagcacattgtgtcagtcagtggggacatgattttcgtcaagattacaaaagaatgaatatgcttcgccagaagtttccttctgttccggtgatggctcttacggccacagctaatcccagggtacagaaggacatcctgactcagctgaagattctcagacctcaggtgtttagcatgagctttaacagacataatctgaaatactatgtattaccgaaaaagcctaaaaaggtggcatttgattgcctagaatggatcagaaagcaccacccatatgattcagggataatttactgcctctccaggcgagaatgtgacaccatggctgacacgttacagagagatgggctcgctgctcttgcttaccatgctggcctcagtgattctgccagagatgaagtgcagcagaagtggattaatcaggatggctgtcaggttatctgtgctacaattgcatttggaatggggattgacaaaccggacgtgcgatttgtgattcatgcatctctccctaaatctgtggagggttactaccaagaatctggcagagctggaagagatggggaaatatctcactgcctgcttttctatacctatcatgatgtgaccagactgaaaagacttataatgatggaaaaagatggaaaccatcatacaagagaaactcacttcaataatttgtatagcatggtacattactgtgaaaatataacggaatgcaggagaatacagcttttggcctactttggtgaaaatggatttaatcctgatttttgtaagaaacacccagatgtttcttgtgataattgctgtaaaacaaaggattataaaacaagagatgtgactgacgatgtgaaaagtattgtaagatttgttcaagaacatagttcatcacaaggaatgagaaatataaaacatgtaggtccttctggaagatttactatgaatatgctggtcgacattttcttggggagtaagagtgcaaaaatccagtcaggtatatttggaaaaggatctgcttattcacgacacaatgccgaaagactttttaaaaagctgatacttgacaagattttggatgaagacttatatatcaatgccaatgaccaggcgatcgcttatgtgatgctcggaaataaagcccaaactgtactaaatggcaatttaaaggtagactttatggaaacagaaaattccagcagtgtgaaaaaacaaaaagcgttagtagcaaaagtgtctcagagggaagagatggttaaaaaatgtcttggagaacttacagaagtctgcaaatctctggggaaagtttttggtgtccattacttcaatatttttaataccgtcactctcaagaagcttgcagaatctttatcttctgatcctgaggttttgcttcaaattgatggtgttactgaagacaaactggaaaaatatggtgcggaagtgatttcagtattacagaaatactctgaatggacatcgccagctgaagacagttccccagggataagcctgtccagcagcagaggccccggaagaagtgccgctgaggagctcgacgaggaaatacccgtatcttcccactactttgcaagtaaaaccagaaatg

SEQ ID NO: 532 - DNA, 3428 bp, Homo sapiens
  source 1..3428: mol_type = genomic DNA
cagcaactatgaaataatcgtagtatgagaggcagagatcggggcgagacaatggggatgtgggcgcgggagccccgttccggcttagcagcacctcccagccccgcagaataaaaccgatcgcgccccctccgcgcgcgccctcccccgagtgcggagcgggaggaggcggcggcggccgaggaggaggaggaggaggccccggaggaggaggcgttggaggtcgaggcggaggcggaggaggaggaggccgaggcgccggaggaggccgaggcgccggagcaggaggaggccggccggaggcggcatgagacgagcgtggcggccgcggctgctcggggccgcgctggttgcccattgacagcggcgtctgcagctcgcttcaagatggccgcttggctcgcattcattttctgctgaacgacttttaactttcattgtcttttccgcccgcttcgatcgcctcgcgccggctgctctttccgggattttttatcaagcagaaatgcatcgaacaacgagaatcaagatcactgagctaaatccccacctgatgtgtgtgctttgtggagggtacttcattgatgccacaaccataatagaatgtctacattccttctgtaaaacgtgtattgttcgttacctggagaccagcaagtattgtcctatttgtgatgtccaagttcacaagaccagaccactactgaatataaggtcagataaaactctccaagatattgtatacaaattagttccagggcttttcaaaaatgaaatgaagagaagaagggatttttatgcagctcatccttctgctgatgctgccaatggctctaatgaagatagaggagaggttgcagatgaagataagagaattataactgatgatgagataataagcttatccattgaattctttgaccagaacagattggatcggaaagtaaacaaagacaaagagaaatctaaggaggaggtgaatgataaaagatacttacgatgcccagcagcaatgactgtgatgcacttaagaaagtttctcagaagtaaaatggacatacctaatactttccagattgatgtcatgtatgaggaggaacctttaaaggattattatacactaatggatattgcctacatttatacctggagaaggaatggtccacttccattgaaatacagagttcgacctacttgtaaaagaatgaagatcagtcaccagagagatggactgacaaatgctggagaactggaaagtgactctgggagtgacaaggccaacagcccagcaggaggtattccctccacctcttcttgtttgcctagccccagtactccagtgcagtctcctcatccacagtttcctcacatttccagtactatgaatggaaccagcaacagccccagcggtaaccaccaatcttcttttgccaatagacctcgaaaatcatcagtaaatgggtcatcagcaacttcttctggttgatacctgagactgttaaggaaaaaaattttaaacccctgatttatatagatatcttcatgccattacagctttctagatgctaatacatgtgactatcgtccaatttgctttcttttgtagtgacattaaatttggctataaaagatggactacatgtgatactcctatggacgttaattgaaaagaaagattgttgttataaagaattggtttcttggaaagcaggcaagactttttctctgtgttaggaaagatgggaaatggtttctgtaaccattgtttggatttggaagtactctgcagtggacataagcattgggccatagtttgttaatctcaactaacgcctacattacattctccttgatcgttcttgttattacgctgttttgtgaacctgtagaaaacaagtgctttttatcttgaaattcaaccaacggaaagaatatgcatagaataatgcattctatgtagccatgtcactgtgaataacgatttcttgcatatttagccattttgattcctgtttgatttatacttctctgttgctacgcaaaaccgatcaaagaaaagtgaacttcagttttacaatctgtatgcctaaaagcgggtactaccgtttattttactgacttgtttaaatgattcgcttttgtaagaatcagatggcattatgcttgttgtacaatgccatattggtatatgacataacaggaaacagtattgtatgatatatttataaatgctataaagaaatattgtgtttcatgcattcagaaatgattgttaaaattctcccaactggttcgacctttgcagatacccataacctatgttgagccttgcttaccagcaaagaatatttttaatgtggatatctaattctaaagtctgttccattagaagcaattggcacatctttctatactttatatacttttctccagtaatacatgtttactttaaagattgttgcagtgaagaaaaacctttaactgagaaatatggaaaccgtcttaattttccattggctatgatggaattaatattgtattttaaaaatgcatattgatcactataattctaaaacaattttttaaataaaccagcaggttgctaaaagaaggcattttatctaaagttattttaataggtggtatagcagtaattttaaatttaagagttgcttttacagttaacaatggaatatgccttctctgctatgtctgaaaatagaagctatttattatgagcttctacaggtatttttaaatagagcaagcatgttgaatttaaaatatgaataaccccacccaacaattttcagtttattttttgctttggtcgaacttggtgtgtgttcatcacccatcagttatttgtgagggtgtttattctatatgaatattgtttcatgtttgtatgggaaaattgtagctaaacatttcattgtccccagtctgcaaaagaagcacaattctattgctttgtcttgcttatagtcattaaatcattacttttacatatattgctgttacttctgctttctttaaaaatatagtaaaggatgttttatgaagtcacaagatacatatatttttattttgacctaaatttgtacagtcccattgtaagtgttgtttctaattatagatgtaaaatgaaatttcatttgtaattggaaaaaatccaataaaaaggatattcatttagaaaatagctaagatctttaataaaaatttgatatgaaaagcacaatgtgcagaagttatggaaaacctatagaggattacaacaggtaaacgttaaagagaatacattgctgacttatagtgatgtggctaagaagtacatgctttgttgtaaaattgcttgaaagcccattgaaagatgtatctgtttatttacagtctttgaagtaaaagttaccaatgtttgccaa

SEQ ID NO: 533 - DNA, 3344 bp, Homo sapiens
  source 1..3344: mol_type = genomic DNA
gagccattttggagccggtgtcagtttccactctgccttcagcggtgcatttttttccaccctcccctccccctcctcccctccccccgctcgcacgcacacacacggcgccccccgcccgcccgcctcccccacagcaactatgaaataatcgtagtatgagaggcagagatcggggcgagacaatggggatgtgggcgcgggagccccgttccggcttagcagcacctcccagccccgcagaataaaaccgatcgcgccccctccgcgcgcgccctcccccgagtgcggagcgggaggaggcggcggcggccgaggaggaggaggaggaggccccggaggaggaggcgttggaggtcgaggcggaggcggaggaggaggaggccgaggcgccggaggaggccgaggcgccggagcaggaggaggccggccggaggcggcatgagacgagcgtggcggccgcggctgctcggggccgcgctggttgcccattgacagcggcgtctgcagctcgcttcaagatggccgcttggctcgcattcattttctgctgaacgacttttaactttcattgtcttttccgcccgcttcgatcgcctcgcgccggctgctctttccgggattttttatcaagcagaaatgcatcgaacaacgagaatcaagatcactgagctaaatccccacctgatgtgtgtgctttgtggagggtacttcattgatgccacaaccataatagaatgtctacattccttctgtaaaacgtgtattgttcgttacctggagaccagcaagtattgtcctatttgtgatgtccaagttcacaagaccagaccactactgaatataagattggatcggaaagtaaacaaagacaaagagaaatctaaggaggaggtgaatgataaaagatacttacgatgcccagcagcaatgactgtgatgcacttaagaaagtttctcagaagtaaaatggacatacctaatactttccagattgatgtcatgtatgaggaggaacctttaaaggattattatacactaatggatattgcctacatttatacctggagaaggaatggtccacttccattgaaatacagagttcgacctacttgtaaaagaatgaagatcagtcaccagagagatggactgacaaatgctggagaactggaaagtgactctgggagtgacaaggccaacagcccagcaggaggtattccctccacctcttcttgtttgcctagccccagtactccagtgcagtctcctcatccacagtttcctcacatttccagtactatgaatggaaccagcaacagccccagcggtaaccaccaatcttcttttgccaatagacctcgaaaatcatcagtaaatgggtcatcagcaacttcttctggttgatacctgagactgttaaggaaaaaaattttaaacccctgatttatatagatatcttcatgccattacagctttctagatgctaatacatgtgactatcgtccaatttgctttcttttgtagtgacattaaatttggctataaaagatggactacatgtgatactcctatggacgttaattgaaaagaaagattgttgttataaagaattggtttcttggaaagcaggcaagactttttctctgtgttaggaaagatgggaaatggtttctgtaaccattgtttggatttggaagtactctgcagtggacataagcattgggccatagtttgttaatctcaactaacgcctacattacattctccttgatcgttcttgttattacgctgttttgtgaacctgtagaaaacaagtgctttttatcttgaaattcaaccaacggaaagaatatgcatagaataatgcattctatgtagccatgtcactgtgaataacgatttcttgcatatttagccattttgattcctgtttgatttatacttctctgttgctacgcaaaaccgatcaaagaaaagtgaacttcagttttacaatctgtatgcctaaaagcgggtactaccgtttattttactgacttgtttaaatgattcgcttttgtaagaatcagatggcattatgcttgttgtacaatgccatattggtatatgacataacaggaaacagtattgtatgatatatttataaatgctataaagaaatattgtgtttcatgcattcagaaatgattgttaaaattctcccaactggttcgacctttgcagatacccataacctatgttgagccttgcttaccagcaaagaatatttttaatgtggatatctaattctaaagtctgttccattagaagcaattggcacatctttctatactttatatacttttctccagtaatacatgtttactttaaagattgttgcagtgaagaaaaacctttaactgagaaatatggaaaccgtcttaattttccattggctatgatggaattaatattgtattttaaaaatgcatattgatcactataattctaaaacaattttttaaataaaccagcaggttgctaaaagaaggcattttatctaaagttattttaataggtggtatagcagtaattttaaatttaagagttgcttttacagttaacaatggaatatgccttctctgctatgtctgaaaatagaagctatttattatgagcttctacaggtatttttaaatagagcaagcatgttgaatttaaaatatgaataaccccacccaacaattttcagtttattttttgctttggtcgaacttggtgtgtgttcatcacccatcagttatttgtgagggtgtttattctatatgaatattgtttcatgtttgtatgggaaaattgtagctaaacatttcattgtccccagtctgcaaaagaagcacaattctattgctttgtcttgcttatagtcattaaatcattacttttacatatattgctgttacttctgctttctttaaaaatatagtaaaggatgttttatgaagtcacaagatacatatatttttattttgacctaaatttgtacagtcccattgtaagtgttgtttctaattatagatgtaaaatgaaatttcatttgtaattggaaaaaatccaataaaaaggatattcatttagaaaatagctaagatctttaataaaaatttgatatgaaaagcacaatgtgcagaagttatggaaaacctatagaggattacaacaggtaaacgttaaagagaatacattgctgacttatagtgatgtggctaagaagtacatgctttgttgtaaaattgcttgaaagcccattgaaagatgtatctgtttatttacagtctttgaagtaaaagttaccaatgtttgcc

SEQ ID NO: 534 - DNA, 406 bp, Homo sapiens
  source 1..406: mol_type = genomic DNA
gcccgccgaggctcggggctcgggccgggctccgcgcggagttgcagcggtggccggatgccaagtgtaagtgattttttatcaagcagaaatgcatcgaacaacgagaatcaagatcactgagctaaatccccacctgatgtgtgtgctttgtggagggtacttcattgatgccacaaccataatagaatgtctacattccttctgtaaaacgtgtattgttcgttacctggagaccagcaagtattgtcctatttgtgatgtccaagttcacaagaccagaccactactgaatataaggtcagataaaactctccaagatattgtatacaaattagttccagggcttttcaaaaatgaaatgaagagaagaagggatttttatgcagctcatccttctgctgat

SEQ ID NO: 535 - DNA, 745 bp, Homo sapiens
  source 1..745: mol_type = genomic DNA
agatgctggcggatccccgctccttcgactccaacgccttcacgcttctcctccgggcggcattccagagtctgctggacgcccaggcggacgaggccgtgttaggattttttatcaagcagaaatgcatcgaacaacgagaatcaagatcactgagctaaatccccacctgatgtgtgtgctttgtggagggtacttcattgatgccacaaccataatagaatgtctacattccttctgtaaaacgtgtattgttcgttacctggagaccagcaagtattgtcctatttgtgatgtccaagttcacaagaccagaccactactgaatataaggtcagataaaactctccaagatattgtatacaaattagttccagggcttttcaaaaatgaaatgaagagaagaagggatttttatgcagctcatccttctgctgatgctgccaatggctctaatgaagatagaggagaggttgcagatgaagataagagaattataactgatgatgagataataagcttatccattgaattctttgaccagaacagattggatcggaaagtaaacaaagacaaagagaaatctaaggaggaggtgaatgataaaagatacttacgatgcccagcagcaatgactgtgatgcacttaagaaagtttctcagaagtaaaatggacatacctaatactttccagattgatgtcatgtatgaggaggaacctttaaaggattattatacactaatg

SEQ ID NO: 536 - DNA, 536 bp, Homo sapiens
  source 1..536: mol_type = genomic DNA
ccgagaggagtactggtatttccagcctcggcggctctcccggccgcagcgccctttgttgagaggattttttatcaagcagaaatgcatcgaacaacgagaatcaagatcactgagctaaatccccacctgatgtgtgtgctttgtggagggtacttcattgatgccacaaccataatagaatgtctacattccttctgtaaaacgtgtattgttcgttacctggagaccagcaagtattgtcctatttgtgatgtccaagttcacaagaccagaccactactgaatataaggtcagataaaactctccaagatattgtatacaaattagttccagggcttttcaaaaatgaaatgaagagaagaagggatttttatgcagctcatccttctgctgatgctgccaatggctctaatgaagatagaggagaggttgcagatgaagataagagaattataactgatgatgagataataagcttatccattgaattctttgaccagaacagattggatcggaaagtaaacaaagacaa

SEQ ID NO: 537 - DNA, 552 bp, Homo sapiens
  source 1..552: mol_type = genomic DNA
tacttcattgatgccacaaccataatagaatgtctacattccttctgtaaaacgtgtattgttcgttacctggagaccagcaagtattgtcctatttgtgatgtccaagttcacaagaccagaccactactgaatataagattggatcggaaagtaaacaaagacaaagagaaatctaaggaggaggtgaatgataaaagatacttacgatgcccagcagcaatgactgtgatgcacttaagaaagtttctcagaagtaaaatggacatacctaatactttccagattgatgtcatgtatgaggaggaacctttaaaggattattatacactaatggatattgcctacatttatacctggagaaggaatggtccacttccattgaaatacagagttcgacctacttgtaaaagaatgaagatcagtcaccagagagatggactgacaaatgctggagaactggaaagtgactctgggagtgacaaggccaacagcccagcaggaggtattccctccacctcttcttgtttgcctagccccagtactccagtg

SEQ ID NO: 538 - DNA, 378 bp, Homo sapiens
  source 1..378: mol_type = genomic DNA
ccgccccgcacgcccgccgaggctcggggctcgggccgggctccgcgcggagttgcagcggtggccggatgccaagtgtaagtgattttttatcaagcagaaatgcatcgaacaacgagaatcaagatcactgagctaaatccccacctgatgtgtgtgctttgtggagggtacttcattgatgccacaaccataatagaatgtctacattccttctgtaaaacgtgtattgttcgttacctggagaccagcaagtattgtcctatttgtgatgtccaagttcacaagaccagaccactactgaatataaggtcagataaaactctccaagatattgtatacaaattagttccagggcttttcactgccaatggctct

SEQ ID NO: 539 - DNA, 2626 bp, Homo sapiens
  source 1..2626: mol_type = genomic DNA
gagacaggaaggagggaggcgagcagagggaaggggaagaggtcggggagcgagggcgggagcggtcgcggtcgcgatcgagcaagcaagcgggcgagaggacgccctcccctggcctccagtgcgccgcttccctcgccgccgccccgccagcatgcccggcgtggcccgcctgccgctgctgctcgggctgctgctgctcccgcgtcccggccggccgctggacttggccgactacacctatgacctggcggaggaggacgactcggagcccctcaactacaaagacccctgcaaggcggctgcctttcttggggacattgccctggacgaagaggacctgagggccttccaggtacagcaggctgtggatctcagacggcacacagctcgtaagtcctccatcaaagctgcagttccaggaaacacttctacccccagctgccagagcaccaacgggcagcctcagaggggagcctgtgggagatggagaggtagatcccgtagccggcgggcggcgacgtcccgaccagagcgtgtgtggcccgatggggtcatcccctttgtcattgggggaaacttcactggtagccagagggcagtcttccggcaggccatgaggcactgggagaagcacacctgtgtcaccttcctggagcgcactgacgaggacagctatattgtgttcacctatcgaccttgcgggtgctgctcctacgtgggtcgccgcggcgggggcccccaggccatctccatcggcaagaactgtgacaagttcggcattgtggtccacgagctgggccacgtcgtcggcttctggcacgaacacactcggccagaccgggaccgccacgtttccatcgttcgtgagaacatccagccagggcaggagtataacttcctgaagatggagcctcaggaggtggagtccctgggggagacctatgacttcgacagcatcatgcattacgctcggaacacattctccaggggcatcttcctggataccattgtccccaagtatgaggtgaacggggtgaaacctcccattggccaaaggacacggctcagcaagggggacattgcccaagcccgcaagctttacaagtgcccagcctgtggagagaccctgcaagacagcacaggcaacttctcctcccctgaataccccaatggctactctgctcacatgcactgcgtgtggcgcatctctgtcacacccggggagaagatcatcctgaacttcacgtccctggacctgtaccgcagccgcctgtgctggtacgactatgtggaggtccgagatggcttctggaggaaggcgcccctccgaggccgcttctgcgggtccaaactccctgagcctatcgtctccactgacagccgcctctgggttgaattccgcagcagcagcaattgggttggaaagggcttctttgcagtctacgaagccatctgcgggggtgatgtgaaaaaggactatggccacattcaatcgcccaactacccagacgattaccggcccagcaaagtctgcatctggcggatccaggtgtctgagggcttccacgtgggcctcacattccagtcctttgagattgagcgccacgacagctgtgcctacgactatctggaggtgcgcgacgggcacagtgagagcagcaccctcatcgggcgctactgtggctatgagaagcctgatgacatcaagagcacgtccagccgcctctggctcaagttcgtctctgacgggtccattaacaaagcgggctttgccgtcaactttttcaaagaggtggacgagtgctctcggcccaaccgcgggggctgtgagcagcggtgcctcaacaccctgggcagctacaagtgcagctgtgaccccgggtacgagctggccccagacaagcgccgctgtgaggctgcttgtggcggattcctcaccaagctcaacggctccatcaccagcccgggctggcccaaggagtacccccccaacaagaactgcatctggcagctggtggcccccacccagtaccgcatctccctgcagtttgacttctttgagacagagggcaatgatgtgtgcaagtacgacttcgtggaggtgcgcagtggactcacagctgactccaagctgcatggcaagttctgtggttctgagaagcccgaggtcatcacctcccagtacaacaacatgcgcgtggagttcaagtccgacaacaccgtgtccaaaaagggcttcaaggcccacttcttctcagaaaagaggccagctctgcagccccctcggggacgcccccaccagctcaaattccgagtgcagaaaagaaaccggaccccccagtgaggcctgccaggcctcccggaccccttgttactcaggaacctcaccttggacggaatgggatgggggcttcggtgcccaccaaccccccacctccactctgccattccggcccacctccctctggccggacagaactggtgctctcttctccccactgtgcccgtccgcggaccggggacccttccccgtgccctaccccctcccattttgatggtgtctgtgacatttcctgttgtgaagtaaaagagggacccctgcgtcctgctcctttctcttgca

SEQ ID NO: 540 - DNA, 4229 bp, Homo sapiens
  source 1..4229: mol_type = genomic DNA
cgagagagcgagggtccaagaaggggagatagggagacgcgggcggagagaccgacccgaggcgggggcgcggggcaggggcggcgcgaggacctgacagcgtgtcccgcggcggggcgggggctcggccgcgcgcccgcgggggaggccgccgctagagggcacttcaggagggacagccctcccggcaccccggggcccgagctccagccccggcctcgcggcccgcggcccgcggcccgggcggcccgagccccctccccgggcgcgcggctctccgccttccccgccccggctggcgcgcggcccggcccggccgagcactgtcccggccccgaggggggcagagctcgggcgaaaacccgccctccagcgagctcatttccctaaaaaggggggggggagtcggagggagggagggagggagagaaagaaagagagaaaaagaaggaaagggagagggagacggctggagcccgaggacgagcgcggagccgcggaccgagcggggggcgggagacaggaaggagggaggcgagcagagggaaggggaagaggtcggggagcgagggcgggagcggtcgcggtcgcgatcgagcaagcaagcgggcgagaggacgccctcccctggcctccagtgcgccgcttccctcgccgccgccccgccagcatgcccggcgtggcccgcctgccgctgctgctcgggctgctgctgctcccgcgtcccggccggccgctggacttggccgactacacctatgacctggcggaggaggacgactcggagcccctcaactacaaagacccctgcaaggcggctgcctttcttggggacattgccctggacgaagaggacctgagggccttccaggtacagcaggctgtggatctcagacggcacacagctcgtaagtcctccatcaaagctgcagttccaggaaacacttctacccccagctgccagagcaccaacgggcagcctcagaggggagcctgtgggagatggagaggtagatcccgtagccggcgggcggcgacgtcccgaccagagcgtgtgtggcccgatggggtcatcccctttgtcattgggggaaacttcactggtagccagagggcagtcttccggcaggccatgaggcactgggagaagcacacctgtgtcaccttcctggagcgcactgacgaggacagctatattgtgttcacctatcgaccttgcgggtgctgctcctacgtgggtcgccgcggcgggggcccccaggccatctccatcggcaagaactgtgacaagttcggcattgtggtccacgagctgggccacgtcgtcggcttctggcacgaacacactcggccagaccgggaccgccacgtttccatcgttcgtgagaacatccagccagggcaggagtataacttcctgaagatggagcctcaggaggtggagtccctgggggagacctatgacttcgacagcatcatgcattacgctcggaacacattctccaggggcatcttcctggataccattgtccccaagtatgaggtgaacggggtgaaacctcccattggccaaaggacacggctcagcaagggggacattgcccaagcccgcaagctttacaagtgcccagcctgtggagagaccctgcaagacagcacaggcaacttctcctcccctgaataccccaatggctactctgctcacatgcactgcgtgtggcgcatctctgtcacacccggggagaagatcatcctgaacttcacgtccctggacctgtaccgcagccgcctgtgctggtacgactatgtggaggtccgagatggcttctggaggaaggcgcccctccgaggccgcttctgcgggtccaaactccctgagcctatcgtctccactgacagccgcctctgggttgaattccgcagcagcagcaattgggttggaaagggcttctttgcagtctacgaagccatctgcgggggtgatgtgaaaaaggactatggccacattcaatcgcccaactacccagacgattaccggcccagcaaagtctgcatctggcggatccaggtgtctgagggcttccacgtgggcctcacattccagtcctttgagattgagcgccacgacagctgtgcctacgactatctggaggtgcgcgacgggcacagtgagagcagcaccctcatcgggcgctactgtggctatgagaagcctgatgacatcaagagcacgtccagccgcctctggctcaagttcgtctctgacgggtccattaacaaagcgggctttgccgtcaactttttcaaagaggtggacgagtgctctcggcccaaccgcgggggctgtgagcagcggtgcctcaacaccctgggcagctacaagtgcagctgtgaccccgggtacgagctggccccagacaagcgccgctgtgaggctgcttgtggcggattcctcaccaagctcaacggctccatcaccagcccgggctggcccaaggagtacccccccaacaagaactgcatctggcagctggtggcccccacccagtaccgcatctccctgcagtttgacttctttgagacagagggcaatgatgtgtgcaagtacgacttcgtggaggtgcgcagtggactcacagctgactccaagctgcatggcaagttctgtggttctgagaagcccgaggtcatcacctcccagtacaacaacatgcgcgtggagttcaagtccgacaacaccgtgtccaaaaagggcttcaaggcccacttcttctcagacaaggacgagtgctccaaggataacggcggctgccagcaggactgcgtcaacacgttcggcagttatgagtgccaatgccgcagtggcttcgtcctccatgacaacaagcacgactgcaaagaagccggctgtgaccacaaggtgacatccaccagtggtaccatcaccagccccaactggcctgacaagtatcccagcaagaaggagtgcacgtgggccatctccagcacccccgggcaccgggtcaagctgaccttcatggagatggacatcgagtcccagcctgagtgtgcctacgaccacctagaggtgttcgacgggcgagacgccaaggcccccgtcctcggccgcttctgtgggagcaagaagcccgagcccgtcctggccacaggcagccgcatgttcctgcgcttctactcagataactcggtccagcgaaagggcttccaggcctcccacgccacagagtgcgggggccaggtacgggcagacgtgaagaccaaggacctttactcccacgcccagtttggcgacaacaactaccctgggggtgtggactgtgagtgggtcattgtggccgaggaaggctacggcgtggagctcgtgttccagacctttgaggtggaggaggagaccgactgcggctatgactacatggagctcttcgacggctacgacagcacagcccccaggctggggcgctactgtggctcagggcctcctgaggaggtgtactcggcgggagattctgtcctggtgaagttccactcggatgacaccatcaccaaaaaaggtttccacctgcgatacaccagcaccaagttccaggacacactccacagcaggaagtgaccactgcctgagcaggggcggggactggagcctgctgcccttggtcgcctagactggatagtgggggtgggcggaaggcaacgcaccatccctctcccccaggccccaggacctgcagggccaatggcctggtgagactgtccataggaggtgggggaactggactccggcataagccacttccccacaaacccccaccagcaaggggctggggccagggagcagagcttccacaagacatttcgaagtcatcattcctctcttagggggccctgcctggtggcaagagggaatgtcagcaggaccccatcgccatccctgtgtctctacacgctgtattgtgtatcaccgggggcattattttcattgtaatgttcatttcccacccctgctccagcctcgatttggttttattttgagcccccattccaccaccccagtttcctggggcacaagtgtctgtgcatgtcccccaggagccaccgtggggagccgatggggaggggatggagaaacaagacagggcttctctcaggcccagtggccggtcagccacaccagggcaccgcagccaataaaccgaaagtgttacagccaa

SEQ ID NO: 541 - DNA, 3989 bp, Homo sapiens
  source 1..3989: mol_type = genomic DNA
gtcggagggagggagggagggagagaaagaaagagagaaaaagaaggaaagggagagggagacggctggagcccgaggacgagcgcggagccgcggaccgagcggggggcgggagacaggaaggagggaggcgagcagagggaaggggaagaggtcggggagcgagggcgggagcggtcgcggtcgcgatcgagcaagcaagcgggcgagaggacgccctcccctggcctccagtgcgccgcttccctcgccgccgccccgccagcatgcccggcgtggcccgcctgccgctgctgctcgggctgctgctgctcccgcgtcccggccggccgctggacttggccgactacacctatgacctggcggaggaggacgactcggagcccctcaactacaaagacccctgcaaggcggctgcctttcttggggacattgccctggacgaagaggacctgagggccttccaggtacagcaggctgtggatctcagacggcacacagctcgtaagtcctccatcaaagctgcagttccaggaaacacttctacccccagctgccagagcaccaacgggcagcctcagaggggagcctgtgggagatggagaggtagatcccgtagccggcgggcggcgacgtcccgaccagagcgtgtgtggcccgatggggtcatcccctttgtcattgggggaaacttcactggtagccagagggcagtcttccggcaggccatgaggcactgggagaagcacacctgtgtcaccttcctggagcgcactgacgaggacagctatattgtgttcacctatcgaccttgcgggtgctgctcctacgtgggtcgccgcggcgggggcccccaggccatctccatcggcaagaactgtgacaagttcggcattgtggtccacgagctgggccacgtcgtcggcttctggcacgaacacactcggccagaccgggaccgccacgtttccatcgttcgtgagaacatccagccaggcgttctccactcttcactgctccttctcagctgtggctctagaaatggtgcttccttcccatgttcccttgagtcctccattcaccaggccctctgctggacaggactcttcctgagaccctccccattccccaggctccccttggctgctccccggaccctcagggcaggagtataacttcctgaagatggagcctcaggaggtggagtccctgggggagacctatgacttcgacagcatcatgcattacgctcggaacacattctccaggggcatcttcctggataccattgtccccaagtatgaggtgaacggggtgaaacctcccattggccaaaggacacggctcagcaagggggacattgcccaagcccgcaagctttacaagtgcccagcctgtggagagaccctgcaagacagcacaggcaacttctcctcccctgaataccccaatggctactctgctcacatgcactgcgtgtggcgcatctctgtcacacccggggagaagatcatcctgaacttcacgtccctggacctgtaccgcagccgcctgtgctggtacgactatgtggaggtccgagatggcttctggaggaaggcgcccctccgaggccgcttctgcgggtccaaactccctgagcctatcgtctccactgacagccgcctctgggttgaattccgcagcagcagcaattgggttggaaagggcttctttgcagtctacgaagccatctgcgggggtgatgtgaaaaaggactatggccacattcaatcgcccaactacccagacgattaccggcccagcaaagtctgcatctggcggatccaggtgtctgagggcttccacgtgggcctcacattccagtcctttgagattgagcgccacgacagctgtgcctacgactatctggaggtgcgcgacgggcacagtgagagcagcaccctcatcgggcgctactgtggctatgagaagcctgatgacatcaagagcacgtccagccgcctctggctcaagttcgtctctgacgggtccattaacaaagcgggctttgccgtcaactttttcaaagaggtggacgagtgctctcggcccaaccgcgggggctgtgagcagcggtgcctcaacaccctgggcagctacaagtgcagctgtgaccccgggtacgagctggccccagacaagcgccgctgtgaggctgcttgtggcggattcctcaccaagctcaacggctccatcaccagcccgggctggcccaaggagtacccccccaacaagaactgcatctggcagctggtggcccccacccagtaccgcatctccctgcagtttgacttctttgagacagagggcaatgatgtgtgcaagtacgacttcgtggaggtgcgcagtggactcacagctgactccaagctgcatggcaagttctgtggttctgagaagcccgaggtcatcacctcccagtacaacaacatgcgcgtggagttcaagtccgacaacaccgtgtccaaaaagggcttcaaggcccacttcttctcagacaaggacgagtgctccaaggataacggcggctgccagcaggactgcgtcaacacgttcggcagttatgagtgccaatgccgcagtggcttcgtcctccatgacaacaagcacgactgcaaagaagccggctgtgaccacaaggtgacatccaccagtggtaccatcaccagccccaactggcctgacaagtatcccagcaagaaggagtgcacgtgggccatctccagcacccccgggcaccgggtcaagctgaccttcatggagatggacatcgagtcccagcctgagtgtgcctacgaccacctagaggtgttcgacgggcgagacgccaaggcccccgtcctcggccgcttctgtgggagcaagaagcccgagcccgtcctggccacaggcagccgcatgttcctgcgcttctactcagataactcggtccagcgaaagggcttccaggcctcccacgccacagagtgcgggggccaggtacgggcagacgtgaagaccaaggacctttactcccacgcccagtttggcgacaacaactaccctgggggtgtggactgtgagtgggtcattgtggccgaggaaggctacggcgtggagctcgtgttccagacctttgaggtggaggaggagaccgactgcggctatgactacatggagctcttcgacggctacgacagcacagcccccaggctggggcgctactgtggctcagggcctcctgaggaggtgtactcggcgggagattctgtcctggtgaagttccactcggatgacaccatcaccaaaaaaggtttccacctgcgatacaccagcaccaagttccaggacacactccacagcaggaagtgaccactgcctgagcaggggcggggactggagcctgctgcccttggtcgcctagactggatagtgggggtgggcggaaggcaacgcaccatccctctcccccaggccccaggacctgcagggccaatggcctggtgagactgtccataggaggtgggggaactggactccggcataagccacttccccacaaacccccaccagcaaggggctggggccagggagcagagcttccacaagacatttcgaagtcatcattcctctcttagggggccctgcctggtggcaagagggaatgtcagcaggaccccatcgccatccctgtgtctctacacgctgtattgtgtatcaccgggggcattattttcattgtaatgttcatttcccacccctgctccagcctcgatttggttttattttgagcccccattccaccaccccagtttcctggggcacaagtgtctgtgcatgtcccccaggagccaccgtggggagccgatggggaggggatggagaaacaagacagggcttctctcaggcccagtggccggtcagccacaccagggcaccgcagccaataaaccgaaagtgttacagcc

SEQ ID NO: 542 - DNA, 2205 bp, Homo sapiens
  source 1..2205: mol_type = genomic DNA
gaagaggtcggggagcgagggcgggagcggtcgcggtcgcgatcgagcaagcaagcgggcgagaggacgccctcccctggcctccagtgcgccgcttccctcgccgccgccccgccagcatgcccggcgtggcccgcctgccgctgctgctcgggctgctgctgctcccgcgtcccggccggccgctggacttggccgactacacctatgacctggcggaggaggacgactcggagcccctcaactacaaagacccctgcaaggcggctgcctttcttggggacattgccctggacgaagaggacctgagggccttccaggtacagcaggctgtggatctcagacggcacacagctcgtaagtcctccatcaaagctgcagttccaggaaacacttctacccccagctgccagagcaccaacgggcagcctcagaggggagcctgtgggagatggagaggtagatcccgtagccggcgggcggcgacgtcccgaccagagcgtgtgtggcccgatggggtcatcccctttgtcattgggggaaacttcactggtagccagagggcagtcttccggcaggccatgaggcactgggagaagcacacctgtgtcaccttcctggagcgcactgacgaggacagctatattgtgttcacctatcgaccttgcgggtgctgctcctacgtgggtcgccgcggcgggggcccccaggccatctccatcggcaagaactgtgacaagttcggcattgtggtccacgagctgggccacgtcgtcggcttctggcacgaacacactcggccagaccgggaccgccacgtttccatcgttcgtgagaacatccagccagggcaggagtataacttcctgaagatggagcctcaggaggtggagtccctgggggagacctatgacttcgacagcatcatgcattacgctcggaacacattctccaggggcatcttcctggataccattgtccccaagtatgaggtgaacggggtgaaacctcccattggccaaaggacacggctcagcaagggggacattgcccaagcccgcaagctttacaagtgcccagcctgtggagagaccctgcaagacagcacaggcaacttctcctcccctgaataccccaatggctactctgctcacatgcactgcgtgtggcgcatctctgtcacacccggggagaagatcatcctgaacttcacgtccctggacctgtaccgcagccgcctgtgctggtacgactatgtggaggtccgagatggcttctggaggaaggcgcccctccgaggccgcttctgcgggtccaaactccctgagcctatcgtctccactgacagccgcctctgggttgaattccgcagcagcagcaattgggttggaaagggcttctttgcagtctacgaagccatctgcgggggtgatgtgaaaaaggactatggccacattcaatcgcccaactacccagacgattaccggcccagcaaagtctgcatctggcggatccaggtgtctgagggcttccacgtgggcctcacattccagtcctttgagattgagcgccacgacagctgtgcctacgactatctggaggtgcgcgacgggcacagtgagagcagcaccctcatcgggcgctactgtggctatgagaagcctgatgacatcaagagcacgtccagccgcctctggctcaagttcgtctctgacgggtccattaacaaagcgggctttgccgtcaactttttcaaagaggtggacgagtgctctcggcccaaccgcgggggctgtgagcagcggtgcctcaacaccctgggcagctacaagtgcagctgtgaccccgggtacgagctggccccagacaagcgccgctgtgaggggtgttatgatctacaggttgggaaacccctgttgtgggacagacactgtttccgcctctccacgcatggtcccgagatgctggggacagcactccgaggctaatggctccagctcactaggccgatcctgctgtgcccccgagctgctccctttcctgcacctcccaggaccgcccctccctgaactgctttccctgagccccttattcccgctcactccctcttggaggaccttggcctgttcatttgcagagaagatagaaatggccacacttatgaccccttagctcccccactcctccctacaggcccacccctga

SEQ ID NO: 543 - DNA, 2691 bp, Homo sapiens
  source 1..2691: mol_type = genomic DNA
aaagggagagggagacggctggagcccgaggacgagcgcggagccgcggaccgagcggggggcgggagacaggaaggagggaggcgagcagagggaaggggaagaggtcggggagcgagggcgggagcggtcgcggtcgcgatcgagcaagcaagcgggcgagaggacgccctcccctggcctccagtgcgccgcttccctcgccgccgccccgccagcatgcccggcgtggcccgcctgccgctgctgctcgggctgctgctgctcccgcgtcccggccggccgctggacttggccgactacacctatgacctggcggaggaggacgactcggagcccctcaactacaaagacccctgcaaggcggctgcctttcttggggacattgccctggacgaagaggacctgagggccttccaggtacagcaggctgtggatctcagacggcacacagctcgtaagtcctccatcaaagctgcagttccaggaaacacttctacccccagctgccagagcaccaacgggcagcctcagaggggagcctgtgggagatggagaggtagatcccgtagccggcgggcggcgacgtcccgaccagagcgtgtgtggcccgatggggtcatcccctttgtcattgggggaaacttcactggtagccagagggcagtcttccggcaggccatgaggcactgggagaagcacacctgtgtcaccttcctggagcgcactgacgaggacagctatattgtgttcacctatcgaccttgcgggtgctgctcctacgtgggtcgccgcggcgggggcccccaggccatctccatcggcaagaactgtgacaagttcggcattgtggtccacgagctgggccacgtcgtcggcttctggcacgaacacactcggccagaccgggaccgccacgtttccatcgttcgtgagaacatccagccagggcaggagtataacttcctgaagatggagcctcaggaggtggagtccctgggggagacctatgacttcgacagcatcatgcattacgctcggaacacattctccaggggcatcttcctggataccattgtccccaagtatgaggtgaacggggtgaaacctcccattggccaaaggacacggctcagcaagggggacattgcccaagcccgcaagctttacaagtgcccagcctgtggagagaccctgcaagacagcacaggcaacttctcctcccctgaataccccaatggctactctgctcacatgcactgcgtgtggcgcatctctgtcacacccggggagaagatcatcctgaacttcacgtccctggacctgtaccgcagccgcctgtgctggtacgactatgtggaggtccgagatggcttctggaggaaggcgcccctccgaggccgcttctgcgggtccaaactccctgagcctatcgtctccactgacagccgcctctgggttgaattccgcagcagcagcaattgggttggaaagggcttctttgcagtctacgaagccatctgcgggggtgatgtgaaaaaggactatggccacattcaatcgcccaactacccagacgattaccggcccagcaaagtctgcatctggcggatccaggtgtctgagggcttccacgtgggcctcacattccagtcctttgagattgagcgccacgacagctgtgcctacgactatctggaggtgcgcgacgggcacagtgagagcagcaccctcatcgggcgctactgtggctatgagaagcctgatgacatcaagagcacgtccagccgcctctggctcaagttcgtctctgacgggtccattaacaaagcgggctttgccgtcaactttttcaaagaggtggacgagtgctctcggcccaaccgcgggggctgtgagcagcggtgcctcaacaccctgggcagctacaagtgcagctgtgaccccgggtacgagctggccccagacaagcgccgctgtgaggctgcttgtggcggattcctcaccaagctcaacggctccatcaccagcccgggctggcccaaggagtacccccccaacaagaactgcatctggcagctggtggcccccacccagtaccgcatctccctgcagtttgacttctttgagacagagggcaatgatgtgtgcaagtacgacttcgtggaggtgcgcagtggactcacagctgactccaagctgcatggcaagttctgtggttctgagaagcccgaggtcatcacctcccagtacaacaacatgcgcgtggagttcaagtccgacaacaccgtgtccaaaaagggcttcaaggcccacttcttctcagtcttggagggggcaggggaccgacactcacatctatcaggcctggagttactgctctgcccccatgccctggtcgacactgtgcccgccccaccctcagccctgcacggagacacacacgcccacacgcacacacatgtgcacacacattgccccatcgcacaagaaacctgcagaggacccccactgggggcatcgaggctcagccctcagggcccggggcatctgactctggccccccaggaggggagctatttggacttttgggacacccaccgaggagaccctaagccaagaaggagaagaaagagcctgaagaccttcagtctgacccctgccaccttccggggcatttgggcactgtag

SEQ ID NO: 544 - DNA, 4333 bp, Homo sapiens
  source 1..4333: mol_type = genomic DNA
aaagggagagggagacggctggagcccgaggacgagcgcggagccgcggaccgagcggggggcgggagacaggaaggagggaggcgagcagagggaaggggaagaggtcggggagcgagggcgggagcggtcgcggtcgcgatcgagcaagcaagcgggcgagaggacgccctcccctggcctccagtgcgccgcttccctcgccgccgccccgccagcatgcccggcgtggcccgcctgccgctgctgctcgggctgctgctgctcccgcgtcccggccggccgctggacttggccgactacacctatgacctggcggaggaggacgactcggagcccctcaactacaaagacccctgcaaggcggctgcctttcttggggacattgccctggacgaagaggacctgagggccttccaggtacagcaggctgtggatctcagacggcacacagctcgtaagtcctccatcaaagctgcagttccaggaaacacttctacccccagctgccagagcaccaacgggcagcctcagaggggagcctgtgggagatggagaggtagatcccgtagccggcgggcggcgacgtcccgaccagagcgtgtgtggcccgatggggtcatcccctttgtcattgggggaaacttcactggtagccagagggcagtcttccggcaggccatgaggcactgggagaagcacacctgtgtcaccttcctggagcgcactgacgaggacagctatattgtgttcacctatcgaccttgcgggtgctgctcctacgtgggtcgccgcggcgggggcccccaggccatctccatcggcaagaactgtgacaagttcggcattgtggtccacgagctgggccacgtcgtcggcttctggcacgaacacactcggccagaccgggaccgccacgtttccatcgttcgtgagaacatccagccagggcaggagtataacttcctgaagatggagcctcaggaggtggagtccctgggggagacctatgacttcgacagcatcatgcattacgctcggaacacattctccaggggcatcttcctggataccattgtccccaagtatgaggtgaacggggtgaaacctcccattggccaaaggacacggctcagcaagggggacattgcccaagcccgcaagctttacaagtgcccagcctgtggagagaccctgcaagacagcacaggcaacttctcctcccctgaataccccaatggctactctgctcacatgcactgcgtgtggcgcatctctgtcacacccggggagaagatcatcctgaacttcacgtccctggacctgtaccgcagccgcctgtgctggtacgactatgtggaggtccgagatggcttctggaggaaggcgcccctccgaggccgcttctgcgggtccaaactccctgagcctatcgtctccactgacagccgcctctgggttgaattccgcagcagcagcaattgggttggaaagggcttctttgcagtctacgaagccatctgcgggggtgatgtgaaaaaggactatggccacattcaatcgcccaactacccagacgattaccggcccagcaaagtctgcatctggcggatccaggtgtctgagggcttccacgtgggcctcacattccagtcctttgagattgagcgccacgacagctgtgcctacgactatctggaggtgcgcgacgggcacagtgagagcagcaccctcatcgggcgctactgtggctatgagaagcctgatgacatcaagagcacgtccagccgcctctggctcaagttcgtctctgacgggtccattaacaaagcgggctttgccgtcaactttttcaaagaggtggacgagtgctctcggcccaaccgcgggggctgtgagcagcggtgcctcaacaccctgggcagctacaagtgcagctgtgaccccgggtacgagctggccccagacaagcgccgctgtgaggctgcttgtggcggattcctcaccaagctcaacggctccatcaccagcccgggctggcccaaggagtacccccccaacaagaactgcatctggcagctggtggcccccacccagtaccgcatctccctgcagtttgacttctttgagacagagggcaatgatgtgtgcaagtacgacttcgtggaggtgcgcagtggactcacagctgactccaagctgcatggcaagttctgtggttctgagaagcccgaggtcatcacctcccagtacaacaacatgcgcgtggagttcaagtccgacaacaccgtgtccaaaaagggcttcaaggcccacttcttctcagaaaagaggccagctctgcagccccctcggggacgcccccaccagctcaaattccgagtgcagaaaagaaaccggaccccccagtgaggcctgccaggcctcccggaccccttgttactcaggaacctcaccttggacggaatgggatgggggcttcggtgcccaccaaccccccacctccactctgccattccggcccacctccctctggccggacagaactggtgctctcttctccccactgtgcccgtccgcggaccggggacccttccccgtgccctaccccctcccattttgatggtgtctgtgacatttcctgttgtgaagtaaaagagggacccctgcgtcctgctcctttctcttgcagtctgcttgtccatgtgtctatttttccacttgtccatctgtccagtaagcaggtaatggtgacccatgctggtccgctcggacccccatcctcctctccccacagctgggccctgctcagctggtcctgctggatgcagtgcccctttggacccccttgtcgcctggcctcccactcccggccacctggcctggccagctctgccagctgttgctctgtcccggtgggagaaagtccagccaggcctccacttcccctggggcatcccaacctcagccctgcacagacccagcgtctgcccttatttgctcccctgcagacaaggacgagtgctccaaggataacggcggctgccagcaggactgcgtcaacacgttcggcagttatgagtgccaatgccgcagtggcttcgtcctccatgacaacaagcacgactgcaaagaagaccttcatggagatggacatcgagtcccagcctgagtgtgcctacgaccacctagaggtgttcgacgggcgagacgccaaggcccccgtcctcggccgcttctgtgggagcaagaagcccgagcccgtcctggccacaggcagccgcatgttcctgcgcttctactcagataactcggtccagcgaaagggcttccaggcctcccacgccacagagtgcgggggccaggtacgggcagacgtgaagaccaaggacctttactcccacgcccagtttggcgacaacaactaccctgggggtgtggactgtgagtgggtcattgtggccgaggaaggctacggcgtggagctcgtgttccagacctttgaggtggaggaggagaccgactgcggctatgactacatggagctcttcgacggctacgacagcacagcccccaggctggggcgctactgtggctcagggcctcctgaggaggtgtactcggcgggagattctgtcctggtgaagttccactcggatgacaccatcaccaaaaaaggtttccacctgcgatacaccagcaccaagttccaggacacactccacagcaggaagtgaccactgcctgagcaggggcggggactggagcctgctgcccttggtcgcctagactggatagtgggggtgggcggaaggcaacgcaccatccctctcccccaggccccaggacctgcagggccaatggcctggtgagactgtccataggaggtgggggaactggactccggcataagccacttccccacaaacccccaccagcaaggggctggggccagggagcagagcttccacaagacatttcgaagtcatcattcctctcttagggggccctgcctggtggcaagagggaatgtcagcaggaccccatcgccatccctgtgtctctacacgctgtattgtgtatcaccgggggcattattttcattgtaatgttcatttcccacccctgctccagcctcgatttggttttattttgagcccccattccaccaccccagtttcctggggcacaagtgtctgtgcatgtcccccaggagccaccgtggggagccgatggggaggggatggagaaacaagacagggcttctctcaggcccagtggccggtcagccacaccagggcaccgcagccaataaaccgaaagtgttacagcc

SEQ ID NO: 545 - DNA, 1807 bp, Homo sapiens
  source 1..1807: mol_type = genomic DNA
atatcacaggtgcaggattagtgctgcctacggtgctgggctttttagtggaaacccctagcaattctgtgcctcctcctcatgtctctcatcctagggagcctggcaaccatatatcaagcgtacagaaatcaaaacaaacttccttgataacatgcttttgcgaagtgcaggaaaattaaatgtgggcaccaagaaagaggatggtgagagtacagcccccaccccccgtccaaaggtcttgcgttgtaaatgccaccaccattgtccagaagactcagtcaacaatatttgcagcacagacggatattgtttcacgatgatagaagaggatgactctgggttgcctgtggtcacttctggttgcctaggactagaaggctcagattttcagtgtcgggacactcccattcctcatcaaagaagatcaattgaatgctgcacagaaaggaacgaatgtaataaagacctacaccctacactgcctccattgaaaaacagagattttgttgatggacctatacaccacagggctttacttatatctgtgactgtctgtagtttgctcttggtccttatcatattattttgttacttccggtataaaagacaagaaaccagacctcgatacagcattgggttagaacaggatgaaacttacattcctcctggagaatccctgagagacttaattgagcagtctcagagctcaggaagtggatcaggcctccctctgctggtccaaaggactatagctaagcagattcagatggtgaaacagattggaaaaggtcgctatggggaagtttggatgggaaagtggcgtggcgaaaaggtagctgtgaaagtgttcttcaccacagaggaagccagctggttcagagagacagaaatatatcagacagtgttgatgaggcatgaaaacattttgggtttcattgctgcagatatcaaagggacagggtcctggacccagttgtacctaatcacagactatcatgaaaatggttccctttatgattatctgaagtccaccaccctagacgctaaatcaatgctgaagttagcctactcttctgtcagtggcttatgtcatttacacacagaaatctttagtactcaaggcaaaccagcaattgcccatcgagatctgaaaagtaaaaacattctggtgaagaaaaatggaacttgctgtattgctgacctgggcctggctgttaaatttattagtgatacaaatgaagttgacataccacctaacactcgagttggcaccaaacgctatatgcctccagaagtgttggacgagagcttgaacagaaatcacttccagtcttacatcatggctgacatgtatagttttggcctcatcctttgggaggttgctaggagatgtgtatcaggaggtatagtggaagaataccagcttccttatcatgacctagtgcccagtgacccctcttatgaggacatgagggagattgtgtgcatcaagaagttacgcccctcattcccaaaccggtggagcagtgatgagtgtctaaggcagatgggaaaactcatgacagaatgctgggctcacaatcctgcatcaaggctgacagccctgcgggttaagaaaacacttgccaaaatgtcagagtcccaggacattaaactctgataggagaggaaaagtaagcatctctgcagaaagccaacaggtactcttctgtttgtgggcagagcaaaagacatcaaataagcatccacagtacaagccttgaacatcgtcctgcttcccagtgggttcagacctcacctctca

SEQ ID NO: 546 - DNA, 1922 bp, Homo sapiens
  source 1..1922: mol_type = genomic DNA
gactggggtagtctaccccacagatgcctaactctcactatttcttctttcagcaaacttccttgataacatgcttttgcgaagtgcaggaaaattaaatgtgggcaccaagaaagaggatggtgagagtacagcccccaccccccgtccaaaggtcttgcgttgtaaatgccaccaccattgtccagaagactcagtcaacaatatttgcagcacagacggatattgtttcacgatgatagaagaggatgactctgggttgcctgtggtcacttctggttgcctaggactagaaggctcagattttcagtgtcgggacactcccattcctcatcaaagaagatcaattgaatgctgcacagaaaggaacgaatgtaataaagacctacaccctacactgcctccattgaaaaacagagattttgttgatggacctatacaccacagggctttacttatatctgtgactgtctgtagtttgctcttggtccttatcatattattttgttacttccggtataaaagacaagaaaccagacctcgatacagcattgggttagaacaggatgaaacttacattcctcctggagaatccctgagagacttaattgagcagtctcagagctcaggaagtggatcaggcctccctctgctggtccaaaggactatagctaagcagattcagatggtgaaacagattggaaaaggtcgctatggggaagtttggatgggaaagtggcgtggcgaaaaggtagctgtgaaagtgttcttcaccacagaggaagccagctggttcagagagacagaaatatatcagacagtgttgatgaggcatgaaaacattttgggtttcattgctgcagatatcaaagggacagggtcctggacccagttgtacctaatcacagactatcatgaaaatggttccctttatgattatctgaagtccaccaccctagacgctaaatcaatgctgaagttagcctactcttctgtcagtggcttatgtcatttacacacagaaatctttagtactcaaggcaaaccagcaattgcccatcgagatctgaaaagtaaaaacattctggtgaagaaaaatggaacttgctgtattgctgacctgggcctggctgttaaatttattagtgatacaaatgaagttgacataccacctaacactcgagttggcaccaaacgctatatgcctccagaagtgttggacgagagcttgaacagaaatcacttccagtcttacatcatggctgacatgtatagttttggcctcatcctttgggaggttgctaggagatgtgtatcaggaggtatagtggaagaataccagcttccttatcatgacctagtgcccagtgacccctcttatgaggacatgagggagattgtgtgcatcaagaagttacgcccctcattcccaaaccggtggagcagtgatgagtgtctaaggcagatgggaaaactcatgacagaatgctgggctcacaatcctgcatcaaggctgacagccctgcgggttaagaaaacacttgccaaaatgtcagagtcccaggacattaaactctgataggagaggaaaagtaagcatctctgcagaaagccaacaggtactcttctgtttgtgggcagagcaaaagacatcaaataagcatccacagtacaagccttgaacatcgtcctgcttcccagtgggttcagacctcacctctcagggagcgacctgggcaaagacagagaagctcccagaaggagagattgatccatgtctgtttgtaggacggagaaaccgcttgggtaacttgttcaagatatgatgcatgttgctttctaagaaagccctgtattttgtgattgcctttttttttttttaagatgctttcattttgccaaaataaaacagataatgtgga

SEQ ID NO: 547 - DNA, 1764 bp, Homo sapiens
  source 1..1764: mol_type = genomic DNA
attgactgctctgctgctgcaatgggttggctggaagaactaaactggcagcttcacattttcttgctcattcttctctctatgcacacaagggcaaacttccttgataacatgcttttgcgaagtgcaggaaaattaaatgtgggcaccaagaaagaggatggtgagagtacagcccccaccccccgtccaaaggtcttgcgttgtaaatgccaccaccattgtccagaagactcagtcaacaatatttgcagcacagacggatattgtttcacgatgatagaagaggatgactctgggttgcctgtggtcacttctggttgcctaggactagaaggctcagattttcagtgtcgggacactcccattcctcatcaaagaagatcaattgaatgctgcacagaaaggaacgaatgtaataaagacctacaccctacactgcctccattgaaaaacagagattttgttgatggacctatacaccacagggctttacttatatctgtgactgtctgtagtttgctcttggtccttatcatattattttgttacttccggtataaaagacaagaaaccagacctcgatacagcattgggttagaacaggatgaaacttacattcctcctggagaatccctgagagacttaattgagcagtctcagagctcaggaagtggatcaggcctccctctgctggtccaaaggactatagctaagcagattcagatggtgaaacagattggaaaaggtcgctatggggaagtttggatgggaaagtggcgtggcgaaaaggtagctgtgaaagtgttcttcaccacagaggaagccagctggttcagagagacagaaatatatcagacagtgttgatgaggcatgaaaacattttgggtttcattgctgcagatatcaaagggacagggtcctggacccagttgtacctaatcacagactatcatgaaaatggttccctttatgattatctgaagtccaccaccctagacgctaaatcaatgctgaagttagcctactcttctgtcagtggcttatgtcatttacacacagaaatctttagtactcaaggcaaaccagcaattgcccatcgagatctgaaaagtaaaaacattctggtgaagaaaaatggaacttgctgtattgctgacctgggcctggctgttaaatttattagtgatacaaatgaagttgacataccacctaacactcgagttggcaccaaacgctatatgcctccagaagtgttggacgagagcttgaacagaaatcacttccagtcttacatcatggctgacatgtatagttttggcctcatcctttgggaggttgctaggagatgtgtatcaggaggtatagtggaagaataccagcttccttatcatgacctagtgcccagtgacccctcttatgaggacatgagggagattgtgtgcatcaagaagttacgcccctcattcccaaaccggtggagcagtgatgagtgtctaaggcagatgggaaaactcatgacagaatgctgggctcacaatcctgcatcaaggctgacagccctgcgggttaagaaaacacttgccaaaatgtcagagtcccaggacattaaactctgataggagaggaaaagtaagcatctctgcagaaagccaacaggtactcttctgtttgtgggcagagcaaaagacatcaaataagcatccacagtacaagccttgaacatcgtcctgcttcccagtgggttcagacctcacctctca

SEQ ID NO: 548 - DNA, 567 bp, Homo sapiens
  source 1..567: mol_type = genomic DNA
agctgagctgtattaggcaaccacagtctgggctgcatttcttaactgctgaataacatatcacaggtgcaggattagtgctgcctacggtgctgggctttttagtggaaacccctagcaattctgtgcctcctcctcatgtctctcatcctagggagcctggcaaccatatatcaagcgtacagaaatcaaaacaaacttccttgataacatgcttttgcgaagtgcaggaaaattaaatgtgggcaccaagaaagaggatggtgagagtacagcccccaccccccgtccaaaggtcttgcgttgtaaatgccaccaccattgtccagaagactcagtcaacaatatttgcagcacagacggatattgtttcacgatgatagaagaggatgactctgggttgcctgtggtcacttctggttgcctaggactagaaggctcagattttcagtgtcgggtaaggacactcccattcctcatcaaagaagatcaattgaatgctgcacagaaaggaacgaatgtaataaagacctacaccctacactgcctccattgaaaaacagaggt

SEQ ID NO: 549 - DNA, 731 bp, Homo sapiens
  source 1..731: mol_type = genomic DNA
gtctgagcagctgagaactttgccggagtattaccacggtgttcagtaacacagacctgtgccatgagcaagtaaagcactgagcaagtgtcagggtcaatatttatagaccactacgtagctgccttgcatagagagaaaacgggagagtaacatgcacacagagggcaaggaaagaaagactgcagtggagggaatgttaatttccaattttttctgaaaatgtattctttctaactgtcaggttcagacttctgctgattcataaccatttggctctgagctatgacaagagaggaaacaaaaagttaaacaagcaagcctgccataagtgagaagcaaacttccttgataacatgcttttgcgaagtgcaggaaaattaaatgtgggcaccaagaaagaggatggtgagagtacagcccccaccccccgtccaaaggtcttgcgttgtaaatgccaccaccattgtccagaagactcagtcaacaatatttgcagcacagacggatattgtttcacgatgatagaagaggatgactctgggttgcctgtggtcacttctggttgcctaggactagaaggctcagattttcagtgtcgggacactcccattcctcatcaaagaagatcaattgaatgctgcacagaaaggaacgaatgtaataaagacctacaccctacactgcctccattgaaaaacagagattttgttgatggacctatacaccac

SEQ ID NO: 550 - DNA, 1764 bp, Homo sapiens; identical to SEQ ID NO: 547
  source 1..1764: mol_type = genomic DNA

SEQ ID NO: 551 - DNA, 1679 bp, Homo sapiens
  source 1..1679: mol_type = genomic DNA
gctaatgaggagggctgcctgctgggtaagaatgttgttggtggcagagccgttttgtgtactgctgttgagaatgccgggtacattcacaagacgtttcctgcgtgtggtaggaacagctctcaagcaccaatttcatattgtgtcctatcacaaacttccttgataacatgcttttgcgaagtgcaggaaaattaaatgtgggcaccaagaaagaggatggtgagagtacagcccccaccccccgtccaaaggtcttgcgttgtaaatgccaccaccattgtccagaagactcagtcaacaatatttgcagcacagacggatattgtttcacgatgatagaagaggatgactctgggttgcctgtggtcacttctggttgcctaggactagaaggctcagattttcagtgtcgggacactcccattcctcatcaaagaagatcaattgaatgctgcacagaaaggaacgaatgtaataaagacctacaccctacactgcctccattgaaaaacagagattttgttgatggacctatacaccacagggctttacttatatctgtgactgtctgtagtttgctcttggtccttatcatattattttgttacttccggtataaaagacaagaaaccagacctcgatacagcattgggttagaacaggatgaaacttacattcctcctggagaatccctgagagacttaattgagcagtctcagagctcaggaagtggatcaggcctccctctgctggtccaaaggactatagctaagcagattcagatggtgaaacagattggaaaaggtcgctatggggaagtttggatgggaaagtggcgtggcgaaaaggtagctgtgaaagtgttcttcaccacagaggaagccagctggttcagagagacagaaatatatcagacagtgttgatgaggcatgaaaacattttgggtttcattgctgcagatatcaaagggacagggtcctggacccagttgtacctaatcacagactatcatgaaaatggttccctttatgattatctgaagtccaccaccctagacgctaaatcaatgctgaagttagcctactcttctgtcagtggcttatgtcatttacacacagaaatctttagtactcaaggcaaaccagcaattgcccatcgagatctgaaaagtaaaaacattctggtgaagaaaaatggaacttgctgtattgctgacctgggcctggctgttaaatttattagtgatacaaatgaagttgacataccacctaacactcgagttggcaccaaacgctatatgcctccagaagtgttggacgagagcttgaacagaaatcacttccagtcttacatcatggctgacatgtatagttttggcctcatcctttgggaggttgctaggagatgtgtatcaggaggtatagtggaagaataccagcttccttatcatgacctagtgcccagtgacccctcttatgaggacatgagggagattgtgtgcatcaagaagttacgcccctcattcccaaaccggtggagcagtgatgagtgtctaaggcagatgggaaaactcatgacagaatgctgggctcacaatcctgcatcaaggctgacagccctgcgggttaagaaaacacttgccaaaatgtcagagtcccaggacattaaactctga

SEQ ID NO: 552 - DNA, 5567 bp, Homo sapiens
  source 1..5567: mol_type = genomic DNA
gcagccgggcgcggggcgcggagtcggcggggcctcgcgggacgccgggcagtgcggagaccgcggcgctgaggacgcgggagccgggagcgcagccgcggggtggagttcagcctactctttcttagatgtgaaaggaaaggaagatcatttcatgccttgttgataaaggttcagacttctgctgattcataaccatttggctctgagctatgacaagagaggaaacaaaaagttaaacaagcaagcctgccataagtgagaagcaaacttccttgataacatgcttttgcgaagtgcaggaaaattaaatgtgggcaccaagaaagaggatggtgagagtacagcccccaccccccgtccaaaggtcttgcgttgtaaatgccaccaccattgtccagaagactcagtcaacaatatttgcagcacagacggatattgtttcacgatgatagaagaggatgactctgggttgcctgtggtcacttctggttgcctaggactagaaggctcagattttcagtgtcgggacactcccattcctcatcaaagaagatcaattgaatgctgcacagaaaggaacgaatgtaataaagacctacaccctacactgcctccattgaaaaacagagattttgttgatggacctatacaccacagggctttacttatatctgtgactgtctgtagtttgctcttggtccttatcatattattttgttacttccggtataaaagacaagaaaccagacctcgatacagcattgggttagaacaggatgaaacttacattcctcctggagaatccctgagagacttaattgagcagtctcagagctcaggaagtggatcaggcctccctctgctggtccaaaggactatagctaagcagattcagatggtgaaacagattggaaaaggtcgctatggggaagtttggatgggaaagtggcgtggcgaaaaggtagctgtgaaagtgttcttcaccacagaggaagccagctggttcagagagacagaaatatatcagacagtgttgatgaggcatgaaaacattttgggtttcattgctgcagatatcaaagggacagggtcctggacccagttgtacctaatcacagactatcatgaaaatggttccctttatgattatctgaagtccaccaccctagacgctaaatcaatgctgaagttagcctactcttctgtcagtggcttatgtcatttacacacagaaatctttagtactcaaggcaaaccagcaattgcccatcgagatctgaaaagtaaaaacattctggtgaagaaaaatggaacttgctgtattgctgacctgggcctggctgttaaatttattagtgatacaaatgaagttgacataccacctaacactcgagttggcaccaaacgctatatgcctccagaagtgttggacgagagcttgaacagaaatcacttccagtcttacatcatggctgacatgtatagttttggcctcatcctttgggaggttgctaggagatgtgtatcaggaggtatagtggaagaataccagcttccttatcatgacctagtgcccagtgacccctcttatgaggacatgagggagattgtgtgcatcaagaagttacgcccctcattcccaaaccggtggagcagtgatgagtgtctaaggcagatgggaaaactcatgacagaatgctgggctcacaatcctgcatcaaggctgacagccctgcgggttaagaaaacacttgccaaaatgtcagagtcccaggacattaaactctgataggagaggaaaagtaagcatctctgcagaaagccaacaggtactcttctgtttgtgggcagagcaaaagacatcaaataagcatccacagtacaagccttgaacatcgtcctgcttcccagtgggttcagacctcacctctcagggagcgacctgggcaaagacagagaagctcccagaaggagagattgatccatgtctgtttgtaggacggagaaaccgcttgggtaacttgttcaagatatgatgcatgttgctttctaagaaagccctgtattttgtgattgcctttttttttttttaagatgctttcattttgccaaaataaaacagataatgtggatggtttaagggttatagtattatagtttaaataataacaacaaaattcttcccaggaactctgctggaaggtaaattaaaatacttgtttttccattggtaaaatattgttgcactctgtgaaccaaaagacagtctaagttggaggacatagaacggaactcatcttaaacatactccccaccccgtcttggcctcctcagaccactttggccatccctgcatttggggccgctatggtaatgtgaatgcactgggtacaaacaccgcctgtctaggaccacatttggaattcctgcaggtggccttttgcagcttcaggcaatatggaacaaatgaaggtttatgtgactctaatagaagtaattgttgataggtgttcttcagatccacttctgtttctgattgagttaggcatctctttcatggtaaaacccttttcattaaacacaaagaaagcttttttttttttttttttttttttttttttttaatgtgcagaggattgacctgtgcatgcttttgatctctcattcaaaggatcaatattaaataaaattgtcatgagctgtgttgaagacagggtgctttcaaatagaggtaatttgctcttgtgttgtaagaggaacatgtcaacaaagataggaaatgagggtgatcgtgcagatggcttgtatcttatatatgcaaaggagccaatctcagaagcacaaagaaaaaagtgtgcataccttattttgtacagataaagatgatgtctttttgttattgtctgtctgttttgtatgtgtctgagataagggatagagaggaaacatccgtcaggctaatttaactacattttattttaaaaatagagaaacataacctctagatgggacagcagaggacagttagtagaggccacaaactgttatgggctgctgtgttttgttctaaaatcaatatggttggagcatgtatatcttaggtgatcatttcacatcttaggaatgcctactcattttattttattctagtgatgctcaattcactatttaatttattatattttctcttctgtggcacttatacaaaatatctcttcacctacttagttctacagggttttaactttggagcaacatgaataaaatcatcgagaaggccaatattgtttagcaacatgaatacaatacagtttaaagttgtacacatcctgctcaactttattcatatacatttcctttctgtggttttcttttgcttcttagaaattctgttagtggttagtaaagaatttgaaagtactttctccttgctgtttttttttttttttaagacattcctcccagaatactccagggggcagtgttttataacacattttccccactgggtgattgaaggatggaggatttttgaaaatttgacagctacatgaaacatgagaaaacattttcctcacttctgaagtcggtttgcagctggtaacttgttcatccagaaaacattctaaagcaatgagactttgtgagctgtgcttacagtttgggagaatcatgaagattctttctatattttgcatttacttcccagtgcttcatagctgcattttgtttgtaactaagacagaagaatttcgtaatccttgaaattgaaaaaaaaaaaattgtgtttttaaagagtgaaaacagttagaaaacaagtagaactgtaatcagaacgctgcttcaattgatattaaaaataacctcaataataatgtaaaggttcctttctcttgtgtcagttatattcttagggatagcctagaaggaatatatggttagaactaagtgtgactaatcatctgagccttgaagagaaacttcagtgcctctaaacagatcatctacaaaacaacaggtaaacatttatgccagttaagtgggtcatgtttttgtttcttgggtttttcctaaatttaagtgaggttgggcttaccttgtagataaaattatgttttctttttggtaaatacttgaacgtggataacgtcaaatcagaatattttgtgaggaggtgatgatttgaaattaagctagatttctagggaggtgttggttccaatgaaggatgggaagaaattaaaatagtcttcaaacttcttccttattatatttggttgctttggaaaagattggtcctatcctcaatctaatttattcactattaatattttaaaaacattcctgagatacttaaaaagacccacttagcgattatagttgctcaatgaaacaagaatttatttatgcatagatttttctctgtatcttaccaaaatccactttacttagataacactaaattgttcttaaagactactcatttcccaataatcctttatgatttcaaaatttctagtggctcagaagtgaattttattttatttgtctttcacttgaataaatgagaacccagaaattaataatgttgtttattgcttactgtcaggactatttcaaagactaagaagagtttcttctaacccctccctctcaaaggaatcctaaattattagttgttagataagttttgtatgctaagatattcaggtttatagtttatgtatgtgtgtatatatataaatatatatgtatatataaatattatgttcagtttggagtctggcacaactccattatgtggattagagagtaagatattatggatgataaagtactaaatgaaacataatatttatttataaaagtgtgtagattgttaaatcacaaaaagagtgctatgaccattatgtatgaggaaacaggcctttgacctcctggaaagcactgctcaaaagtcattagtgcccatttttgaattccccaaacagaaagcttcttagaaaacatgctgagattttatttacagggaattctttgacacatttcaattggtgtgtagtcaagtatagcaagtacttaataatgactgaatttcatgttcctacagtcatacatattcattagaagttttatgttgttggtctgatctgattcttctttgtttgtgggtggaacggcactgagagaagtatagttttttaaacttgaacatgttcagtagttacattgccttagaaaacccagacacatagcagtggaaatgaaagaaatggcatcagaagtgacttaatttagcaattgtgattcctcttgtaaaacaaaacaaaaaaacaatgccatattttttggagaaaagttggcaatataggggtttcgttgtctgtttcacaagaagactcatttgttcttttgggggaaccagtgccttacagattttgtatatactgtaattattcaggactagggaacaaacaattgtattgtatttgttacagattgtatatggctttgttttaacattcccctaaataaaatggcttcattctccccttggaaaaaaa

SEQ ID NO: 553 - DNA, 5506 bp, Homo sapiens
  source 1..5506: mol_type = genomic DNA
ggactttagaagccgttgctgccctctctgtcacctgaagcggggccctctcccatcccacccttgccccgcctccctgcccccaccgggccggccctgcccgccgccggaccctggcatgtcaagacctggtccgcgcctgcctgcccagcccgcggaaccccggcggccccgcgagctaggatgaggggccaggccgccgccccgggccccgtctggatcctcgccccgctgctactgctgctgctgctgctgggacgccgcgcgcgggcggccgccggagcagacgcggggcccgggcccgagccgtgcgccacgctggtgcagggaaagttcttcggctacttctccgcggccgccgtgttcccggccaacgcctcgcgctgctcctggacgctacgcaacccggacccgcggcgctacactctctacatgaaggtggccaaggcgcccgtgccctgcagcggccccggccgcgtgcgcacctaccagttcgactccttcctcgagtccacgcgcacctacctgggcgtggagagcttcgacgaggtgctgcggctctgcgacccctccgcacccctggccttcctgcaggccagcaagcagttcctgcagatgcggcgccagcagccgccccagcacgacgggctccggccccgggccgggccgccgggccccaccgacgacttctccgtggagtacctggtggtggggaaccgcaaccccagccgtgccgcctgccagatgctgtgccgctggctggacgcgtgtctggccggtagtcgcagctcgcacccctgcgggatcatgcagaccccctgcgcctgcctgggcggcgaggcgggcggccctgccgcgggacccctggccccccgcggggatgtctgcttgagagatgcggtggctggtggccctgaaaactgcctcaccagcctgacccaggaccggggcgggcacggcgccacaggcggctggaagctgtggtccctgtggggcgaatgcacgcgggactgcgggggaggcctccagacgcggacgcgcacctgcctgcccgcgccgggcgtggagggcggcggctgcgagggggtgctggaggagggtcgccagtgcaaccgcgaggcctgcggccccgctgggcgcaccagctcccggagccagtccctgcggtccacagatgcccggcggcgcgaggagctgggggacgagctgcagcagtttgggttcccagccccccagaccggtgacccagcagccgaggagtggtccccgtggagcgtgtgctccagcacctgcggcgagggctggcagacccgcacgcgcttctgcgtgtcctcctcctacagcacgcagtgcagcggacccctgcgcgagcagcggctgtgcaacaactctgccgtgtgcccagtgcatggtgcctgggatgagtggtcgccctggagcctctgctccagcacctgtggccgtggctttcgggatcgcacgcgcacctgcaggcccccccagtttgggggcaacccctgtgagggccctgagaagcaaaccaagttctgcaacattgccctgtgccctggccgggcagtggatggaaactggaatgagtggtcgagctggagcgcctgctccgccagctgctcccagggccgacagcagcgcacgcgtgaatgcaacgggccttcctacgggggtgcggagtgccagggccactgggtggagacccgagactgcttcctgcagcagtgcccagtggatggcaagtggcaggcctgggcgtcatggggcagttgcagcgtcacgtgtggggctggcagccagcgacgggagcgtgtctgctctgggcccttcttcgggggagcagcctgccagggcccccaggatgagtaccggcagtgcggcacccagcggtgtcccgagccccatgagatctgtgatgaggacaactttggtgctgtgatctggaaggagaccccagcgggagaggtggctgctgtccggtgtccccgcaacgccacaggactcatcctgcgacggtgtgagctggacgaggaaggcatcgcctactgggagccccccacctacatccgctgtgtttccattgactacagaaacatccagatgatgacccgggagcacctggccaaggctcagcgagggctgcctggggagggggtctcggaggtcatccagacactggtggagatctctcaggacgggaccagctacagtggggacctgctgtccaccatcgatgtcctgaggaacatgacagagattttccggagagcgtactacagccccacccctggggacgtacagaactttgtccagatccttagcaacctgttggcagaggagaatcgggacaagtgggaggaggcccagctggcgggccccaacgccaaggagctgttccggctggtggaggactttgtggacgtcatcggcttccgcatgaaggacctgagggatgcataccaggtgacagacaacctggttctcagcatccataagctcccagccagcggagccactgacatcagcttccccatgaagggctggcgggccacgggtgactgggccaaggtgccagaggacagggtcactgtgtccaagagtgtcttctccacggggctgacagaggccgatgaagcatccgtgtttgtggtgggcaccgtgctctacaggaacctgggcagcttcctggccctgcagaggaacacgaccgtcctgaattctaaggtgatctccgtgactgtgaaacccccgcctcgctccctgcgcacacccttggagatcgagtttgcccacatgtataatggcaccaccaaccagacctgtatcctgtgggatgagacggatgtaccctcctcctccgcccccccgcagctcgggccctggtcgtggcgcggctgccgcacggtgcccctcgacgccctccggacgcgctgcctctgtgaccggctctccaccttcgccatcttagcccagctcagcgccgacgcgaacatggagaaggcgactctgccgtcggtgacgctcatcgtgggctgtggcgtgtcctctctcaccctgctcatgctggtcatcatctacgtgtccgtgtggaggtacattcgctcagagcgttctgtcatcctcatcaacttctgcctgtccatcatctcctccaatgccctcatcctcatcgggcagacccagacccgcaacaaggtggtgtgcacgctggtggccgccttcctgcacttcttcttcctgtcctccttctgctgggtgctcaccgaggcctggcagtcctacatggcggtgacgggccacctccggaaccgcctcatccgcaagcgcttcctctgcctgggctgggggctccctgcactggttgtggccatttctgtgggattcaccaaggccaaagggtacagcaccatgaactactgctggctctccctggaggggggactgctctatgccttcgtgggacctgccgctgccgttgtgctggtgaacatggtcattgggatcctggtgttcaacaagctcgtgtccaaagacggcatcacggacaagaagctgaaggagcgggcaggggcctccctgtggagctcctgcgtggtgctgccgctgctggcgctgacctggatgtcggctgtgctcgccgtcaccgaccgccgctccgccctcttccagatcctcttcgctgtcttcgactcgctggagggcttcgtcatcgtcatggtgcactgtatcctccgtagagaggtccaggacgctgtgaaatgccgtgtggttgaccggcaggaggagggcaacggggactcagggggctccttccagaacggccacgcccagctcatgaccgacttcgagaaggacgtggatctggcctgtagatcagtgctgaacaaggacatcgcggcctgccgcactgccaccatcacgggcacactgaagcggccgtctctgcccgaggaggagaagctgaagctggcccatgccaaggggccgcccaccaatttcaacagcctgccggccaacgtgtccaagctgcacctgcacggctcaccccgctatcccggcgggcccctgcccgacttccccaaccactcactgaccctcaagagggacaaggcgcccaagtcctccttcgtcggtgacggggacatcttcaagaagctggactcggagctgagccgggcccaggagaaggctctggacacgagctacgtgatcctgcccacggccacggccacgctgcggcccaagcccaaggaggagcccaagtacagcatccacattgaccagatgccgcagacccgcctcatccacctcagcacggcccccgaggccagcctccccgcccgcagcccgccctcccgccagccccccagcggcgggccccccgaggcaccccctgcccagcccccaccgcctccgcccccaccgccaccacctccccagcagcccctgcccccaccgcccaatctggagccggcaccccccagcctgggggatcccggggagcctgccgcccatccgggacccagcacggggcccagcaccaagaacgagaatgtcgccaccttgtctgtgagctccctggagcggcggaagtcgcggtatgcagaactggactttgagaagatcatgcacacccggaagcggcaccaagacatgttccaggacctgaaccggaagctgcagcacgcagcggagaaggacaaggaggtgctggggccggacagcaagccggaaaagcagcagacgcccaacaagaggccctgggagagcctccggaaagcccacgggacgcccacgtgggtgaagaaggagctggagccgctgcagccgtcgccgctggagcttcgcagcgtggagtgggagaggtcgggcgccacgatcccgctggtgggccaggacatcatcgacctccagaccgaggtctgagcgggtgggcggcggccacgcactgggccacggaggagggatgctgctccgcccgctcctgccgcagacgggcacagacacgctcgcgggcagcgggccaggcccgcaccccggcctcagggcgctcagacggcggccaggcacagggcccgcagtgctgggaccagagccagatgcaggacaggaggcggcccggccagcgggcacagggcaccagaggccgaaggtgcctcagactccgccctcctcgggccgaggcccagcgggcagatgggcggacggctgtggaccgtggacaggcccagcgcggccagcgtcccagggtacccgcctgagctcctgctgcggaggagctgcctgcttggcccggccggcctggcaccgttttttaaacacccccatccctcgggaagcagccagctccccacaccttccagggccctaggcccctcctagacccaggtggagggcacagccctccgaccctcatggcccccaggggcaggactgagtcccctccaggaagaagcaggggggaatctattttttctctccttttcttttcttc

SEQ ID NO: 554 - DNA, 6241 bp, Homo sapiens
  source 1..6241: mol_type = genomic DNA
gatgtaatccgtaatgcagtctctggctcccgattcgggatccagtttcagagagcgagagattggggagcgccggcagccgggtggggggaagcagctctcgcctctctcctcctccttctcctcgtcctcggcctcctcctcctccccgcgccgccccgcccccggctcggcttggctcgcccccccccccccctcgccaggaaggggaaaaaaggcgagaagagccgggcaggcgagaggagcggagcggcggcggcggccggagagggagcggcgggcgcaggcggcggcggcgggcgcggcgttggcggcggccccggcggagcgagcgcggagccggagagccgggagcacaggcggccgcgccgcgtcctggcccggcccgggcccgcgcgccagcatcgtccgcagcgcgggcatccggaccctccgggcgcccggggggctccagcaggcgcgggggaacgggagggggcctgcgtgcgccggcgggtgctctccagggggcgtcccggcgaggcccagagcgggccgggggcggcggcggctggaggagccccccccacctccggtcgggcgcccggctcagccgccggcgacgcgaggcgctcgcggggatttgcaactcgccggatcgagtcctcgccggcggggccgctgctgctggggaagctgctgctggtggccacaggctggcaccagggccctggactttagaagccgttgctgccctctctgtcacctgaagcggggccctctcccatcccacccttgccccgcctccctgcccccaccgggccggccctgcccgccgccggaccctggcatgtcaagacctggtccgcgcctgcctgcccagcccgcggaaccccggcggccccgcgagctaggatgaggggccaggccgccgccccgggccccgtctggatcctcgccccgctgctactgctgctgctgctgctgggacgccgcgcgcgggcggccgccggagcagacgcggggcccgggcccgagccgtgcgccacgctggtgcagggaaagttcttcggctacttctccgcggccgccgtgttcccggccaacgcctcgcgctgctcctggacgctacgcaacccggacccgcggcgctacactctctacatgaaggtggccaaggcgcccgtgccctgcagcggccccggccgcgtgcgcacctaccagttcgactccttcctcgagtccacgcgcacctacctgggcgtggagagcttcgacgaggtgctgcggctctgcgacccctccgcacccctggccttcctgcaggccagcaagcagttcctgcagatgcggcgccagcagccgccccagcacgacgggctccggccccgggccgggccgccgggccccaccgacgacttctccgtggagtacctggtggtggggaaccgcaaccccagccgtgccgcctgccagatgctgtgccgctggctggacgcgtgtctggccggtagtcgcagctcgcacccctgcgggatcatgcagaccccctgcgcctgcctgggcggcgaggcgggcggccctgccgcgggacccctggccccccgcggggatgtctgcttgagagatgcggtggctggtggccctgaaaactgcctcaccagcctgacccaggaccggggcgggcacggcgccacaggcggctggaagctgtggtccctgtggggcgaatgcacgcgggactgcgggggaggcctccagacgcggacgcgcacctgcctgcccgcgccgggcgtggagggcggcggctgcgagggggtgctggaggagggtcgccagtgcaaccgcgaggcctgcggccccgctgggcgcaccagctcccggagccagtccctgcggtccacagatgcccggcggcgcgaggagctgggggacgagctgcagcagtttgggttcccagccccccagaccggtgacccagcagccgaggagtggtccccgtggagcgtgtgctccagcacctgcggcgagggctggcagacccgcacgcgcttctgcgtgtcctcctcctacagcacgcagtgcagcggacccctgcgcgagcagcggctgtgcaacaactctgccgtgtgcccagtgcatggtgcctgggatgagtggtcgccctggagcctctgctccagcacctgtggccgtggctttcgggatcgcacgcgcacctgcaggcccccccagtttgggggcaacccctgtgagggccctgagaagcaaaccaagttctgcaacattgccctgtgccctggccgggcagtggatggaaactggaatgagtggtcgagctggagcgcctgctccgccagctgctcccagggccgacagcagcgcacgcgtgaatgcaacgggccttcctacgggggtgcggagtgccagggccactgggtggagacccgagactgcttcctgcagcagtgcccagtggatggcaagtggcaggcctgggcgtcatggggcagttgcagcgtcacgtgtggggctggcagccagcgacgggagcgtgtctgctctgggcccttcttcgggggagcagcctgccagggcccccaggatgagtaccggcagtgcggcacccagcggtgtcccgagccccatgagatctgtgatgaggacaactttggtgctgtgatctggaaggagaccccagcgggagaggtggctgctgtccggtgtccccgcaacgccacaggactcatcctgcgacggtgtgagctggacgaggaaggcatcgcctactgggagccccccacctacatccgctgtgtttccattgactacagaaacatccagatgatgacccgggagcacctggccaaggctcagcgagggctgcctggggagggggtctcggaggtcatccagacactggtggagatctctcaggacgggaccagctacagtggggacctgctgtccaccatcgatgtcctgaggaacatgacagagattttccggagagcgtactacagccccacccctggggacgtacagaactttgtccagatccttagcaacctgttggcagaggagaatcgggacaagtgggaggaggcccagctggcgggccccaacgccaaggagctgttccggctggtggaggactttgtggacgtcatcggcttccgcatgaaggacctgagggatgcataccaggtgacagacaacctggttctcagcatccataagctcccagccagcggagccactgacatcagcttccccatgaagggctggcgggccacgggtgactgggccaaggtgccagaggacagggtcactgtgtccaagagtgtcttctccacggggctgacagaggccgatgaagcatccgtgtttgtggtgggcaccgtgctctacaggaacctgggcagcttcctggccctgcagaggaacacgaccgtcctgaattctaaggtgatctccgtgactgtgaaacccccgcctcgctccctgcgcacacccttggagatcgagtttgcccacatgtataatggcaccaccaaccagacctgtatcctgtgggatgagacggatgtaccctcctcctccgcccccccgcagctcgggccctggtcgtggcgcggctgccgcacggtgcccctcgacgccctccggacgcgctgcctctgtgaccggctctccaccttcgccatcttagcccagctcagcgccgacgcgaacatggagaaggcgactctgccgtcggtgacgctcatcgtgggctgtggcgtgtcctctctcaccctgctcatgctggtcatcatctacgtgtccgtgtggaggtacattcgctcagagcgttctgtcatcctcatcaacttctgcctgtccatcatctcctccaatgccctcatcctcatcgggcagacccagacccgcaacaaggtggtgtgcacgctggtggccgccttcctgcacttcttcttcctgtcctccttctgctgggtgctcaccgaggcctggcagtcctacatggcggtgacgggccacctccggaaccgcctcatccgcaagcgcttcctctgcctgggctgggggctccctgcactggttgtggccatttctgtgggattcaccaaggccaaagggtacagcaccatgaactactgctggctctccctggaggggggactgctctatgccttcgtgggacctgccgctgccgttgtgctggtgaacatggtcattgggatcctggtgttcaacaagctcgtgtccaaagacggcatcacggacaagaagctgaaggagcgggcaggggcctccctgtggagctcctgcgtggtgctgccgctgctggcgctgacctggatgtcggctgtgctcgccgtcaccgaccgccgctccgccctcttccagatcctcttcgctgtcttcgactcgctggagggcttcgtcatcgtcatggtgcactgtatcctccgtagagaggtccaggacgctgtgaaatgccgtgtggttgaccggcaggaggagggcaacggggactcagggggctccttccagaacggccacgcccagctcatgaccgacttcgagaaggacgtggatctggcctgtagatcagtgctgaacaaggacatcgcggcctgccgcactgccaccatcacgggcacactgaagcggccgtctctgcccgaggaggagaagctgaagctggcccatgccaaggggccgcccaccaatttcaacagcctgccggccaacgtgtccaagctgcacctgcacggctcaccccgctatcccggcgggcccctgcccgacttccccaaccactcactgaccctcaagagggacaaggcgcccaagtcctccttcgtcggtgacggggacatcttcaagaagctggactcggagctgagccgggcccaggagaaggctctggacacgagctacgtgatcctgcccacggccacggccacgctgcggcccaagcccaaggaggagcccaagtacagcatccacattgaccagatgccgcagacccgcctcatccacctcagcacggcccccgaggccagcctccccgcccgcagcccgccctcccgccagccccccagcggcgggccccccgaggcaccccctgcccagcccccaccgcctccgcccccaccgccaccacctccccagcagcccctgcccccaccgcccaatctggagccggcaccccccagcctgggggatcccggggagcctgccgcccatccgggacccagcacggggcccagcaccaagaacgagaatgtcgccaccttgtctgtgagctccctggagcggcggaagtcgcggtatgcagaactggactttgagaagatcatgcacacccggaagcggcaccaagacatgttccaggacctgaaccggaagctgcagcacgcagcggagaaggacaaggaggtgctggggccggacagcaagccggaaaagcagcagacgcccaacaagaggccctgggagagcctccggaaagcccacgggacgcccacgtgggtgaagaaggagctggagccgctgcagccgtcgccgctggagcttcgcagcgtggagtgggagaggtcgggcgccacgatcccgctggtgggccaggacatcatcgacctccagaccgaggtctgagcgggtgggcggcggccacgcactgggccacggaggagggatgctgctccgcccgctcctgccgcagacgggcacagacacgctcgcgggcagcgggccaggcccgcaccccggcctcagggcgctcagacggcggccaggcacagggcccgcagtgctgggaccagagccagatgcaggacaggaggcggcccggccagcgggcacagggcaccagaggccgaaggtgcctcagactccgccctcctcgggccgaggcccagcgggcagatgggcggacggctgtggaccgtggacaggcccagcgcggccagcgtcccagggtacccgcctgagctcctgctgcggaggagctgcctgcttggcccggccggcctggcaccgttttttaaacacccccatccctcgggaagcagccagctccccacaccttccagggccctaggcccctcctagacccaggtggagggcacagccctccgaccctcatggcccccaggggcaggactgagtcccctccaggaagaagcaggggggaatctattttttctctccttttcttttcttcaataaaaagaattaaaaacccatc

SEQ ID NO: 555 - DNA, 5499 bp, Homo sapiens
  source 1..5499: mol_type = genomic DNA
cctctggcggcccgccgtcccagacgcgggaagagcttggccggtttcgagtcgctggcctgcagcttccctgtggtttcccgaggcttccttgcttcccgctctgcgaggagcctttcatccgaaggcgggacgatgccggataatcggcagccgaggaaccggcagccgaggatccgctccgggaacgagcctcgttccgcgcccgccatggaaccggatggtcgcggtgcctgggcccacagtcgcgccgcgctcgaccgcctggagaagctgctgcgctgctcgcgttgtactaacattctgagagagcctgtgtgtttaggaggatgtgagcacatcttctgtagtaattgtgtaagtgactgcattggaactggatgtccagtgtgttacaccccggcctggatacaagacttgaagataaatagacaactggacagcatgattcaactttgtagtaagcttcgaaatttgctacatgacaatgagctgtcagatttgaaagaagataaacctaggaaaagtttgtttaatgatgcaggaaacaagaagaattcaattaaaatgtggtttagccctcgaagtaagaaagtcagatatgttgtgagtaaagcttcagtgcaaacccagcctgcaataaaaaaagatgcaagtgctcagcaagactcatatgaatttgtttccccaagtcctcctgcagatgtttctgagagggctaaaaaggcttctgcaagatctggaaaaaagcaaaaaaagaaaactttagctgaaatcaaccaaaaatggaatttagaggcagaaaaagaagatggtgaatttgactccaaagaggaatctaagcaaaagctggtatccttctgtagccaaccatctgttatctccagtcctcagataaatggtgaaatagacttactagcaagtggctccttgacagaatctgaatgttttggaagtttaactgaagtctctttaccattggctgagcaaatagagtctccagacactaagagcaggaatgaagtagtgactcctgagaaggtctgcaaaaattatcttacatctaagaaatctttgccattagaaaataatggaaaacgtggccatcacaatagactttccagtcccatttctaagagatgtagaaccagcattctgagcaccagtggagattttgttaagcaaacggtgccctcagaaaatataccattgcctgaatgttcttcaccaccttcatgcaaacgtaaagttggtggtacatcagggaggaaaaacagtaacatgtccgatgaattcattagtctttcaccaggtacaccaccttctacattaagtagttcaagttacaggcgagtgatgtctagtccctcagcaatgaagctgttgcccaatatggctgtgaaaagaaatcatagaggagagactttgctccatattgcttctattaagggcgacataccttctgttgaataccttttacaaaatggaagtgatccaaatgttaaagaccatgctggatggacaccattgcatgaagcttgcaatcatgggcacctgaaggtagtggaattattgctccagcataaggcattggtgaacaccaccgggtatcaaaatgactcaccacttcacgatgcagccaagaatgggcatgtggatatagtcaagctgttactttcctatggagcctccagaaatgctgttaatatatttggtctgcggcctgtcgattatacagatgatgaaagtatgaaatcgctattgctgctaccagagaagaatgaatcatcctcagctagccactgctcagtaatgaacactgggcagcgtagggatggacctcttgtacttataggcagtgggctgtcttcagaacaacagaaaatgctcagtgagcttgcagtaattcttaaggctaaaaaatatactgagtttgacagtacagtaactcatgttgttgttcctggtgatgcagttcaaagtaccttgaagtgtatgcttgggattctcaatggatgctggattctaaaatttgaatgggtaaaagcatgtctacgaagaaaagtatgtgaacaggaagaaaagtatgaaattcctgaaggtccacgcagaagcaggctcaacagagaacagctgttgccaaagctgtttgatggatgctacttctatttgtggggaaccttcaaacaccatccaaaggacaaccttattaagctcgtcactgcaggtgggggccagatcctcagtagaaagcccaagccagacagtgacgtgactcagaccatcaatacagtcgcataccatgcgagacccgattctgatcagcgcttctgcacacagtatatcatctatgaagatttgtgtaattatcacccagagagggttcggcagggcaaagtctggaaggctccttcgagctggtttatagactgtgtgatgtcctttgagttgcttcctcttgacagctgaatattataccagatgaacatttcaaattgaatttgcacggtttgtgagagcccagtcattgtactgtttttaatgttcacatttttacaaataggtagagtcattcatatttgtctttgaatcaaaaaaaaaaaaaaagtctaatgccagattaggaattcatgttatgtttaccatttagaagctgggattgcttttaaaggtttttctttttaaaattggcatgtttttgatttatcatgtctttctattcagattattgggtatcaaagattaatgaggacaccagaatcttggttaaatagacaagtggtatcattactgtttgagtcttttaatattctccatacctgccaccagtgaaaaaacttgccttttttttttttttttttttagtaaacagaatattatcaaacaatttattttggctttattgaaaaaagagtatttggtctaaatgtgccaccataggtgttaaattctcctatctgcaattgtctttatcctatattgtgttcatttcttttcttaataatttactttgttgtgtgtttctacactttcatccctgttttttatcttgtatatcatcaggaaattgtgatttaatcattaacattggtttttttgtgtgtgtggtaaaaatcaacactaggctcatggtacatatttttattctgtacatttgcttgtaactatcaatttgtaactctgtttatctactacatgtgtatatatacttagagcattttctctaacacattttaatgttagtattttttaaaaggtctgaccagtctagcaaattgtcagtccaacgtcattactttaaattaagaagcagtcttcttctggtaaaccttgttggtatttgtaaaataattttgaaggtcttaatttcttcctttgtaaaaggaaaaggttttttttaaagtttttaggttggcatggaggcagaagttggtgattacttgatttacaacagattttttccagatcatacaaaaggccatacagtaagtatagaagtaggtatggggagggcttactaatatcaaataggcaaggccttagtgagtgggcaggataccacctgagagtggccagatgtggggaggttactctgctctgggtgctctcattcatgaatcgacaaggatacattagattattttgaaacatttttttaagaagcagaattctttaataattccttcctagacattgaatatacttataaaattaaagacttggggaaggagacactgagagacttgccagtttggttcctcatgaacaaaagaggacagtttgataactaccagaatagaatatccctagttttaaaatagtgagaatctctgaagttcatcaacatcttaagatgcacttacttgaaagtttgagattctgtttatcatttgaaaacacattttgctttaattctttctttgacatgttgttttttcatatcaagaaatatatgaacaaaataataaccttttgaccctgaccttgctgggtgaattagctctgaaacactctctacaaccagtaatgcatttgtcccacatttcattctgatagaaaatgaacaccatagcaccaaacaaaaatccgaggcgttagataatgtctggattaaataatttaagactctctaggattttggttgtcattttttatttataacagactttaagtcactttctgttgcctcataggtcacattttagacaggtttgtgtctgttccttgcatctgaattcctgattgtaaagacacctatgaggtctcttagtttttgtcattcattttcttggtttatcacccctcccttctttttgttgtttttccctgactgttaagcagtttcatctttgcttttgttaaatatttgacagcagttagtttgtgttaagctcttgaaacttgtgattgtactttctgtgtagatatacatgtaattattttttatttttcaatcatagattcaagcttccttcttttttaccacaaatcattaaagttatttgtgtttccatatacctgtgtcttgtataaaattggcttattctgtgctgttgaatgaggctcaacatgacttggtgaggaagtctattaactaacaaaagcttatcttttttaacataatgctttttaattaattttgaataaaaatatttctaaagtgtactagatactttattaccttagattattccgaatacagtataactttgatagtttggaatagtcattaagaaacaattacacactgattgctttgtgtctctaaaagtgagaggctggtagcttttccacattctcatggctattttctagttctacttgaatttataactgtttccctttttccttgacagctgccactttgtagctatttttctgtctctgctaatactttaccatatctatctcaattgttttttcttttgacttgctgaaaaatagaaaccagatgggaagtatattagcattatgattgaaataagggtaaatgagcaatgtgtgaaggttttcactgacttcacctaaaagatagtttagctacttgaattttagtaaatagaatttttcctttatttcatcggtccccccacctttttttttttttgcacctgccttgtaaatttaatagttaagtgacctctgcctagaggatgatatttggggaggtttgatgtttcctgtgggaataagacgattcacaggtgagagtggggccacattagctgttattgtttccatgggtcagtgtggaaaatgcattaatcatattctaaacgttcatgggcctcattacagtcacaattgtctattctgtttcctaccctgaacacattaaaatggtaggaactaatgcttgtcttatttaattactaaaagccaccattttctttgatagattgagctacagattgtaaacttcatgtatttctttataagtcaacccttttcaaagatacgcacatcaaactgaatgaataaataaatattgagaagttg

SEQ ID NO: 556 - DNA, 2257 bp, Homo sapiens
  source 1..2257: mol_type = genomic DNA
agagcttggccggtttcgagtcgctggcctgcagcttccctgtggtttcccgaggcttccttgcttcccgctctgcgaggagcctttcatccgaaggcgggacgatgccggataatcggcagccgaggaaccggcagccgaggatccgctccgggaacgagcctcgttccgcgcccgccatggaaccggatggtcgcggtgcctgggcccacagtcgcgccgcgctcgaccgcctggagaagctgctgcgctgctcgcgttgtactaacattctgagagagcctgtgtgtttaggaggatgtgagcacatcttctgtagatttgaaagaagataaacctaggaaaagtttgtttaatgatgcaggaaacaagaagaattcaattaaaatgtggtttagccctcgaagtaagaaagtcagatatgttgtgagtaaagcttcagtgcaaacccagcctgcaataaaaaaagatgcaagtgctcagcaagactcatatgaatttgtttccccaagtcctcctgcagatgtttctgagagggctaaaaaggcttctgcaagatctggaaaaaagcaaaaaaagaaaactttagctgaaatcaaccaaaaatggaatttagaggcagaaaaagaagatggtgaatttgactccaaagaggaatctaagcaaaagctggtatccttctgtagccaaccatctgttatctccagtcctcagataaatggtgaaatagacttactagcaagtggctccttgacagaatctgaatgttttggaagtttaactgaagtctctttaccattggctgagcaaatagagtctccagacactaagagcaggaatgaagtagtgactcctgagaaggtctgcaaaaattatcttacatctaagaaatctttgccattagaaaataatggaaaacgtggccatcacaatagactttccagtcccatttctaagagatgtagaaccagcattctgagcaccagtggagattttgttaagcaaacggtgccctcagaaaatataccattgcctgaatgttcttcaccaccttcatgcaaacgtaaagttggtggtacatcagggaggaaaaacagtaacatgtccgatgaattcattagtctttcaccaggtacaccaccttctacattaagtagttcaagttacaggcgagtgatgtctagtccctcagcaatgaagctgttgcccaatatggctgtgaaaagaaatcatagaggagagactttgctccatattgcttctattaagggcgacataccttctgttgaataccttttacaaaatggaagtgatccaaatgttaaagaccatgctggatggacaccattgcatgaagcttgcaatcatgggcacctgaaggtagtggaattattgctccagcataaggcattggtgaacaccaccgggtatcaaaatgactcaccacttcacgatgcagccaagaatgggcatgtggatatagtcaagctgttactttcctatggagcctccagaaatgctgttaatatatttggtctgcggcctgtcgattatacagatgatgaaagtatgaaatcgctattgctgctaccagagaagaatgaatcatcctcagctagccactgctcagtaatgaacactgggcagcgtagggatggacctcttgtacttataggcagtgggctgtcttcagaacaacagaaaatgctcagtgagcttgcagtaattcttaaggctaaaaaatatactgagtttgacagtacagtaactcatgttgttgttcctggtgatgcagttcaaagtaccttgaagtgtatgcttgggattctcaatggatgctggattctaaaatttgaatgggtaaaagcatgtctacgaagaaaagtatgtgaacaggaagaaaagtatgaaattcctgaaggtccacgcagaagcaggctcaacagagaacattgccaaagctgtttgatggatgctacttctatttgtggggaaccttcaaacaccatccaaaggacaaccttattaagctcgtcactgcaggtgggggccagatcctcagtagaaagcccaagccagacagtgacgtgactcagaccatcaatacagtcgcataccatgcgagacccgattctgatcagcgcttctgcacacagtatatcatctatgaagatttgtgtaattatcacccagagagggttcggcagggcaaagtctggaaggctccttcgagctggtttatagactgtgtgatgtc

SEQ ID NO: 557 - DNA, 4563 bp, Homo sapiens
  source 1..4563: mol_type = genomic DNA
ccctttcttctcttccagggctccgctttatttgctctcagaagtcggtttcctttccttttcttcagtgaatcggagctcagagcgttgcttcggtttccctccagacagttaggaatctgaaataaacaggaaagcactatgtcttcaatgtggtctgaatatacaattggtggggtgaagatttactttccttataaagcttacccgtcacagcttgctatgatgaattctattctcagaggattaaacagcaagcaacattgtttgttggagagtcccacaggaagtggaaaaagcttagccttactttgttctgctttagcatggcaacaatctcttagtgggaaaccagcagatgagggcgtaagtgaaaaagctgaagtacaattgtcatgttgttgtgcatgccattcaaaggattttacaaacaatgacatgaaccaaggaacttcacgtcatttcaactatccaagcacaccaccttctgaaagaaatggcacttcatcaacttgtcaagactcccctgaaaaaaccactctggctgcaaagttatctgctaagaaacaggcatccatatacagagatgaaaatgatgattttcaagtagagaagaaaagaattcgacccttagaaactacacagcagattagaaaacgtcattgctttggaacagaagtacacaatttggatgcaaaagttgattcaggaaagactgtaaaactcaactctccactggaaaagataaactccttttcgccacagaaaccccctggccactgttctaggtgctgttgttctactaaacaaggaaacagtcaagagtcatcgaataccattaagaaggatcatacagggaaatccaagatacccaaaatatattttgggacacgcacacacaagcagattgctcagattactagagagctccggaggacggcatattcaggggttccaatgactattctttccagcagggatcatacttgtgtccatcctgaggtagtcggtaacttcaacagaaatgagaagtgcatggaattgctagatgggaaaaacggaaaatcctgctatttttatcatggagttcataaaattagtgatcagcacacattacagactttccaagggatgtgcaaagcctgggatatagaagaacttgtcagcctggggaagaaactaaaggcctgtccatattacacagcccgagaactaatacaagatgctgacatcatattttgtccctacaactatcttctagatgcacaaataagggaaagtatggatttaaatctgaaagaacaggttgtcattttagatgaagctcataacatcgaggactgtgctcgggaatcagcaagttacagtgtaacagaagttcagcttcggtttgctcgggatgaactagatagtatggtcaacaataatataaggaagaaagatcatgaacccctacgagctgtgtgctgtagcctcattaattggttagaagcaaacgctgaatatcttgtagaaagagattatgaatcagcttgtaaaatatggagtggaaatgaaatgctcttaactttacacaaaatgggtatcaccactgctacttttcccattttgcagggacatttttctgctgttcttcaaaaagaggaaaaaatctcaccaatttatggtaaagaggaggcaagagaagtacctgttattagtgcatcaactcaaataatgcttaaaggactttttatggtacttgactatctttttaggcaaaatagcagatttgcagatgattataaaattgcgattcaacagacttactcctggacaaatcagattgatatttcagacaaaaatgggttgttggttctaccaaaaaataagaaacgttcacgacagaaaactgcagttcatgtgctaaacttttggtgcttaaatccagctgtggccttttcagatattaatggcaaagttcagaccattgttttgacatctggtacattatcaccaatgaaatccttttcgtcagaacttggtgttacatttactatccagctggaggctaatcatatcattaaaaattcacaggtttgggttggtaccattgggtcaggccccaagggtcggaatctctgtgctaccttccagaatactgaaacatttgagttccaagatgaagtgggagcacttttgttatctgtgtgccagactgtgagccaaggaattttgtgtttcttgccatcttacaagttattagaaaaattaaaagaacgttggctctctactggtttatggcataatctggagttggtgaagacagtcattgtagaaccacagggaggagaaaaaacaaattttgatgaattactgcaggtgtactatgacgcaatcaaatacaaaggagagaaagatggagctctcctggtagcagtttgtcgtggtaaagtgagtgagggtctggatttctcagatgacaatgcccgtgctgtcataacaataggaattccttttccaaatgtgaaagatctacaggttgaactaaaacgacaatacaatgaccaccattcaaaattgagaggtcttctacctggccgtcagtggtatgaaattcaagcatacagggccttaaaccaggcccttggtagatgtattagacacagaaatgattggggagctcttattctagtggatgatcgctttaggaataacccaagtcgctatatatctggactttctaaatgggtacggcagcagattcagcaccattcaacctttgaaagtgcactggaatccttggctgaattttccaaaaagcatcaaaaagttcttaatgtatccataaaggacagaaccaatatacaggacaatgagtctacacttgaagtgacctctttaaagtacagtacctcaccttatttactggaagcagcaagtcatctatcaccagaaaattttgtggaagatgaagcaaagatatgtgtccaggaactacagtgtcctaaaattattaccaaaaattcacctctaccaagtagcattatctccagaaaggagaaaaatgatccagtattcctggaagaagcagggaaagcagaaaaaattgtgatttccagatccacaagcccaactttcaacaaacaaacaaagagagttagctggtcaagctttaattctttgggacagtattttactggtaaaataccgaaggcaacacctgagctcgggtcatcagagaatagtgcctctagtcctccccgtttcaaaacagagaagatggaaagtaaaactgttttgcccttcactgataaatgtgaatcctcaaatctgacagtaaacacatcgtttggatcatgccctcaatcagaaaccattatttcatcattaaagattgatgccacccttactagaaaaaatcattctgaacatccgctctgttctgaagaagccctggatccagacattgaattgtctctagtaagtgaagaagataaacagtccacttcaaatagagattttgaaacagaagcagaagatgaatctatctattttacacctgaactttatgatcctgaagatacagatgaagaaaaaaatgacctagctgaaactgatagaggaaatagattggctaacaattcagattgcattttagctaaagacctttttgaaattagaactataaaagaagtagattcagccagagaagtgaaagctgaggattgcatagatacaaagttgaatggaattctgcatattgaagaaagtaaaattgatgacattgatggtaatgtaaaaacaacttggataaatgaactggaactgggaaaaactcatgaaatagaaataaagaactttaaaccatctccttccaaaaataaaggcatgtttcctggttttaagtaataatacttaactctcaagctaagtaaaaatatgtcatcatgcttatgttaaactctgttgtaagtaataatttgtaaattgaataagtggcatactttttaaaaaactattttatgttcagaaatgtaaatgttattattcttgagtttttgggtttttttttttgagacagagtcttggtctgttgcccaggctggaatgcagtggtgtgctctgggctcactgcaaccttcacctccaggttcaagtgattctcctgcctcagccttctgagtagctgggactacaggtgtgcaccaccatgcccagctagtttttgtatttttagtagagatggggtttcaccatgttggccaggctggtctcgaactcctggcctcgtgatctgcccttctctgcctccctaagttgctgggattacaggtgtgagccacagtgcctggcccattcttgagttttgataaagtaattcatacaaagtactgtcctcaaataagtcttccttagctaaatgcaatttaaaattattcaaagatcctagggcacttctagtttcacgtaaatattcatattaggtggttctcttcatccatttgttttcacactgatacataaaaattaacagcagtctaatctagtgacacctcagtcatatttcgctatagattttac

SEQ ID NO: 558 - DNA, 1236 bp, Homo sapiens
  source 1..1236: mol_type = genomic DNA
gtgagcggcaacatggcgtccaggtctaagcggcgtgccgtggaaagtggggttccgcagccgccggatcccccagtccagcgcgacgaggaagaggaaaaagaagtcgaaaatgaggatgaagacgatgatgacagtgacaaggaaaaggatgaagaggacgaggtcattgacgaggaagtgaatattgaatttgaagcttattccctatcagataatgattatgacggaattaagaaattactgcagcagctttttctaaaggctcctgtgaacactgcagaactaacagatctcttaattcaacagaaccatattgggagtgtgattaagcaaacggatgtttcagaagacagcaatgatgatatggatgaagatgaggtttttggtttcataagccttttaaatttaactgaaagaaagggtacccagtgtgttgaacaaattcaagagttggttctacgcttctgtgagaagaactgtgaaaagagcatggttgaacagctggacaagtttttaaatgacaccaccaagcctgtgggccttctcctaagtgaaagattcattaatgtccctccacagatcgctctgcccatgtaccagcagcttcagaaagaactggcgggggcacacagaaccaataagccatgtgggaagtgctacttttaccttctgattagtaagacatttgtggaagcaggaaaaaacaattccaaaaagaaacctagcaacaaaaagaaagctgcgttaatgtttgcaaatgcagaggaagaatttttctatgagaaggcaattctcaagttcaactactcagtgcaggaggagagcgacacttgtctgggaggcaaatggtcttttgatgacgtaccaatgacgcccttgcgaactgtgatgttaattccaggcgacaagatgaacgaaatcatggataaactgaaagaatatctatctgtctaacccatttccaatggacagtgatgggcttgtttttgtaaaattaccagaaaactcagtggagatttactgaaaaactcagactttattcagattaagttcctctacaaaaagtagggttctgtcccatgtgtctctgacacatttacaaaataccagttttttaaaattttggtcaaattatgagtggttgatttaaaaacttttccaagaagaagaaaagcatggagtagtaatttaaagaactcaataaaaacttctattttttattttaaaataata

SEQ ID NO: 559 - DNA, 2338 bp, Homo sapiens
  source 1..2338: mol_type = genomic DNA
gtgagcggcaacatggcgtccaggtctaagcggcgtgccgtggaaagtggggttccgcagccgccggatcccccagtccagcgcgacgaggaagaggaaaaagaagtcgaaaatgaggatgaagacgatgatgacagtgacaaggaaaaggatgaagaggacgaggtcattgacgaggaagtgaatattgaatttgaagcttattccctatcagataatgattatgacggaattaagaaattactgcagcagctttttctaaaggctcctgtgaacactgcagaactaacagatctcttaattcaacagaaccatattgggagtgtgattaagcaaacggatgtttcagaagacagcaatgatgatatggatgaagatgaggtttttggtttcataagccttttaaatttaactgaaagaaagggtacccagtgtgttgaacaaattcaagagttggttctacgcttctgtgagaagaactgtgaaaagagcatggttgaacagctggacaagtttttaaatgacaccaccaagcctgtgggccttctcctaagtgaaagattcattaatgtccctccacagatcgctctgcccatgtaccagcagcttcagaaagaactggcgggggcacacagaaccaataagccatgtgggaagtgctacttttaccttctgattagtaagacatttgtggaagcaggaaaaaacaattccaaaaagaaacctagcaacaaaaagaaagctgcgttaatgtttgcaaatgcagaggaagaatttttctatgaggagcagggaaaacctgaggtgcttggaggtccagacacaagaagaggattggaaccagttccgatacagcacaatggttggtctgttcccccagtattagaataaattaaaacatacaagccaggatgaatgaagccaataggaaataaaaaacaggcacacaacattatttggggaaaaacacctctagtgacacattttcttcatctgcactgattatttcagcaaaagaaatctagtatgttttcatacatctgatgtataaatttgctgaactttgagttagttttcttaagataatttttcatattaagaaaattttccttttctaacctattaaaatacctcactatcatttcaaaaggttaaatgagttgatcactatctctgctctgtgctcctcaaaatataatttcaaatggatccgatctaaatctatacctagtgcagatttgcaaaaaaagaaaaggaatagtcattaaggatacctgttaccatggctgcgattgttagcacttcatctacacagtcaaattcacaggacgctaagatagacttcgagagttgtggatcaagaggaaactctgacatgatgattccaaattcagaaagatttccatcattatccagtgctgccagataatctaagtcttccaatgcctgcatcaaactttctggtgctaggaaaggaaaaaaataataatttaagagtctcatatggctaagatggagaaacaggtactggacttttccctcctgcatgaaacaagcaaacaatggacaaaatatgtgaaacaacggtttgcaagccaccaaataccagggagtgaaggatagtgattcttgagagggcaaactcaggaggggagccctgtgattgtccagctcatgctccgaggagggtcccagctgcagtgtgcatgcggggggaacccaggtggagcctgccagcctccctgcagtaggaaaacaatgccagggatccagggagactaaggtggccggaactcgcggtcacagtactggagagagacacacagatctaagtcgggggccagagggagctccctcaactaggcagcacagccctactgatcagcgcatgtgtgtaaggaaccacctcaggccagagaaagagccatgtgagaagattagaaggaacagtggtgctgacacaggacctagggtagggcctgttcccaccaccctagctggaaaacctcatgatttatggggcactgggtagaaaacacaagtgagaaaccctagatgggcactgccacctgacacagctatacagcaggacctgaaaggatcacactgcatcctaggacaaagctcaaaagtacctctgggactacaaaaatattcagtgcccaagaaggtaaaatgtacaatgtctagcatccagtagagaggcatgaaaagcaggaaaatacattgcataatacagagaaaaattaatcacaactgacctggatctcagatgctagaaatagtagacaaagatgttatttcccagtgcaaataaagaaataaagatagcaagctg

SEQ ID NO: 560 - DNA, 1433 bp, Homo sapiens
  source 1..1433: mol_type = genomic DNA
gtgagcggcaacatggcgtccaggtctaagcggcgtgccgtggaaagtggggttccgcagccgccggatcccccagtccagcgcgacgaggaagaggaaaaagaagtcgaaaatgaggatgaagacgatgatgacagtgacaaggaaaaggatgaagaggacgaggtcattgacgaggaagtgaatattgaatttgaagcttattccctatcagataatgattatgacggaattaagaaattactgcagcagctttttctaaaggctcctgtgaacactgcagaactaacagatctcttaattcaacagaaccatattgggagtgtgattaagcaaacggatgtttcagaagacagcaatgatgatatggatgaagatgaggtttttggtttcataagccttttaaatttaactgaaagaaagggtacccagtgtgttgaacaaattcaagagttggttctacgcttctgtgagaagaactgtgaaaagagcatggttgaacagctggacaagtttttaaatgacaccaccaagcctgtgggccttctcctaagtgaaagattcattaatgtccctccacagatcgctctgcccatgtaccagcagcttcagaaagaactggcgggggcacacagaaccaataagccatgtgggaagtgctacttttaccttctgattagtaagacatttgtggaagcaggaaaaaacaattccaaaaagaaacctagcaacaaaaagaaagctgcgttaatgtttgcaaatgcagaggaagaatttttctatgaggagcagggaaaacctgaggtgcttggaggtccagacacaagaagaggattggaaccagttccgatacagcacaatggtggttcacgggggcaagtgacagccctggtttctctgaaggctggactaattcaatcaagatcaactctaagtgatttccagggaaccttcatgactgttggaattgctctgtcataataagtcagggatatttaggaggctcatagtctcctggagggataaaacatctcggcacctagtaatggtaaattagtcaatatttgttagtttcgtttgagatctcaaatgttaggattttctgaagtctcagtgtctttcagagtttgagataccttgttttcattttttctaatttttaatttaaaagtaataaagaatattttgtaatgattaggatgaaaattttatcgtcaattataagccaaaatttgctaaaattaaagtcagtatacttgaaacaagtttctagtaagttctctggggtaagatactaattactctgataaaggggctatcaaaaaaatccagtaaattgttcataagaagagatcagtttaagagtcaaacaatttgctttgctagtaccttagctaaagaaaaaatactattaaagatgactatcaccttta

SEQ ID NO: 561 - DNA, 891 bp, Homo sapiens
  source 1..891: mol_type = genomic DNA
gtgagcggcaacatggcgtccaggtctaagcggcgtgccgtggaaagtggggttccgcagccgccggatcccccagtccagcgcgacgaggaagaggaaaaagaagtcgaaaatgaggatgaagacgatgatgacagtgacaaggaaaaggatgaagaggacgaggtcattgacgaggaagtgaatattgaatttgaagcttattccctatcagataatgattatgacggaattaagaaattactgcagcagctttttctaaaggctcctgtgaacactgcagaactaacagatctcttaattcaacagaaccatattgggagtgtgattaagcaaacggatgtttcagaagacagcaatgatgatatggatgaagatgaggtttttggtttcataagccttttaaatttaactgaaagaaagggtacccagtgtgttgaacaaattcaagagttggttctacgcttctgtgagaagaactgtgaaaagagcatggttgaacagctggacaagtttttaaatgacaccaccaagcctgtgggccttctcctaagtgaaagattcattaatgtccctccacagatcgctctgcccatgtaccagcagcttcagaaagaactggcgggggcacacagaaccaataagccatgtgggaagtgctacttttaccttctgattagtaagacatttgtggaagcaggaaaaaacaattccaaaaagaaacctagcaacaaaaagaaagctgcgttaatgtttgcaaatgcagaggaagaatttttctatgagaaggcaattctcaagttcaactactcagtgcaggaggagagcgacacttgtctgggaggcaaatggtcttttgatgactggtctgttcccccagtattagaataa

SEQ ID NO: 562 - DNA, 1379 bp, Homo sapiens
  source 1..1379: mol_type = genomic DNA
gtgagcggcaacatggcgtccaggtctaagcggcgtgccgtggaaagtggggttccgcagccgccggatcccccagtccagcgcgacgaggaagaggaaaaagaagtcgaaaatgaggatgaagacgatgatgacagtgacaaggaaaaggatgaagaggacgaggtcattgacgaggaagtgaatattgaatttgaagcttattccctatcagataatgattatgacggaattaagaaattactgcagcagctttttctaaaggctcctgtgaacactgcagaactaacagatctcttaattcaacagaaccatattgggagtgtgattaagggtacccagtgtgttgaacaaattcaagagttggttctacgcttctgtgagaagaactgtgaaaagagcatggttgaacagctggacaagtttttaaatgacaccaccaagcctgtgggccttctcctaagtgaaagattcattaatgtccctccacagatcgctctgcccatgtaccagcagcttcagaaagaactggcgggggcacacagaaccaataagccatgtgggaagtgctacttttaccttctgattagtaagacatttgtggaagcaggaaaaaacaattccaaaaagaaacctagcaacaaaaagaaagctgcgttaatgtttgcaaatgcagaggaagaatttttctatgaggagcagggaaaacctgaggtgcttggaggtccagacacaagaagaggattggaaccagttccgatacagcacaatggttggtctgttcccccagtattagaataaattaaaacatacaagccaggatgaatgaagccaataggaaataaaaaacaggcacacaacattatttggggaaaaacacctctagtgacacattttcttcatctgcactgattatttcagcaaaagaaatctagtatgttttcatacatctgatgtataaatttgctgaactttgagttagttttcttaagataatttttcatattaagaaaattttccttttctaacctattaaaatacctcactatcatttcaaaaggttaaatgagttgatcactatctctgctctgtgctcctcaaaatataatttcaaatggatccgatctaaatctatacctagtgcagatttgcaaaaaaagaaaaggaatagtcattaaggatacctgttaccatggctgcgattgttagcacttcatctacacagtcaaattcacaggacgctaagatagacttcgagagttgtggatcaagaggaaactctgacatgatgattccaaattcagaaagatttccatcattatccagtgctgccagataatctaagtcttccaatgcctgcatcaaactttctggtgcta

SEQ ID NO: 563 - DNA, 1398 bp, Homo sapiens
  source 1..1398: mol_type = genomic DNA
atggtggacccggtgggcttcgcggaggcgtggaaggcgcagttcccggactcagagcccccgcgcatggagctgcgctcagtgggcgacatcgagcaggagctggagcgctgcaaggcctccattcggcgcctggagcaggaggtgaaccaggagcgcttccgcatgatctacctgcagacgttgctggccaaggaaaagaagagctatgaccggcagcgatggggcttccggcgcgcggcgcaggcccccgacggcgcctccgagccccgagcgtccgcgtcgcgcccgcagccagcgcccgccgacggagccgacccgccgcccgccgaggagcccgaggcccggcccgacggcgagggttctccgggtaaggccaggcccgggaccgcccgcaggcccggggcagccgcgtcgggggaacgggacgaccggggaccccccgccagcgtggcggcgctcaggtccaacttcgagcggatccgcaagggccatggccagcccggggcggacgccgagaagcccttctacgtgaacgtcgagtttcaccacgagcgcggcctggtgaaggtcaacgacaaagaggtgtcggaccgcatcagctccctgggcagccaggccatgcagatggagcgcaaaaagtcccagcacggcgcgggctcgagcgtgggggatgcatccaggcccccttaccggggacgctcctcggagagcagctgcggcgtcgacggcgactacgaggacgccgagttgaacccccgcttcctgaaggacaacctgatcgacgccaatggcggtagcaggcccccttggccgcccctggagtaccagccctaccagagcatctacgtcgggggcatgatggaaggggagggcaagggcccgctcctgcgcagccagagcacctctgagcaggagaagcgccttacctggccccgcaggtcctactccccccggagttttgaggattgcggaggcggctataccccggactgcagctccaatgagaacctcacctccagcgaggaggacttctcctctggccagtccagccgcgtgtccccaagccccaccacctaccgcatgttccgggacaaaagccgctctccctcgcagaactcgcaacagtccttcgacagcagcagtccccccacgccgcagtgccataagcggcaccggcactgcccggttgtcgtgtccgaggccaccatcgtgggcgtccgcaagaccgggcagatctggcccaacgatggcgagggcgccttccatggagaacatccgggagcagcagaagaagtgtttcagaagcttctccctgacatccgtggagctgcagatgctgaccaactcgtgtgtgaaactccagactgtccacagcattccgctgaccatcaataa

SEQ ID NO: 564 - DNA, 1377 bp, Homo sapiens
  source 1..1377: mol_type = genomic DNA
atggtggacccggtgggcttcgcggaggcgtggaaggcgcagttcccggactcagagcccccgcgcatggagctgcgctcagtgggcgacatcgagcaggagctggagcgctgcaaggcctccattcggcgcctggagcaggaggtgaaccaggagcgcttccgcatgatctacctgcagacgttgctggccaaggaaaagaagagctatgaccggcagcgatggggcttccggcgcgcggcgcaggcccccgacggcgcctccgagccccgagcgtccgcgtcgcgcccgcagccagcgcccgccgacggagccgacccgccgcccgccgaggagcccgaggcccggcccgacggcgagggttctccgggtaaggccaggcccgggaccgcccgcaggcccggggcagccgcgtcgggggaacgggacgaccggggaccccccgccagcgtggcggcgctcaggtccaacttcgagcggatccgcaagggccatggccagcccggggcggacgccgagaagcccttctacgtgaacgtcgagtttcaccacgagcgcggcctggtgaaggtcaacgacaaagaggtgtcggaccgcatcagctccctgggcagccaggccatgcagatggagcgcaaaaagtcccagcacggcgcgggctcgagcgtgggggatgcatccaggcccccttaccggggacgctcctcggagagcagctgcggcgtcgacggcgactacgaggacgccgagttgaacccccgcttcctgaaggacaacctgatcgacgccaatggcggtagcaggcccccttggccgcccctggagtaccagccctaccagagcatctacgtcgggggcatgatggaaggggagggcaagggcccgctcctgcgcagccagagcacctctgagcaggagaagcgccttacctggccccgcaggtcctactccccccggagttttgaggattgcggaggcggctataccccggactgcagctccaatgagaacctcacctccagcgaggaggacttctcctctggccagtccagccgcgtgtccccaagccccaccacctaccgcatgttccgggacaaaagccgctctccctcgcagaactcgcaacagtccttcgacagcagcagtccccccacgccgcagtgccataagcggcaccggcactgcccggttgtcgtgtccgaggccaccatcgtgggcgtccgcaagaccgggcagatctggcccaacgatggcgagggcgccttccatggagacgcagatggctcgttcggaacaccacctggatacggctgcttatgtctcccagcatggccttcagggtgcacagccgcaacggcaagagttacacgttcctga

SEQ ID NO: 565 - DNA, 7082 bp, Homo sapiens
  source 1..7082: mol_type = genomic DNA
ttccaggactgcagaactggcccagacctctgtattggaaaggtctttatggaccagggagtccggtgtcttttttacgggggacccctgggctgcgagttgcacagtccaattcgctgttgttagggcctcagtttcccaaaaggcacagggacggggggagggtggcggctcgatgggggagccgcctccagggggcccccccgccctgtgcccacggcgcggcccctttaagaggcccgcctggctccgtcatccgcgccgcggccacctccccccggccctccccttcctgcggcgcagagtgcgggccgggcgggagtgcggcgagagccggctggctgagcttagcgtccgaggaggcggcggcggcggcggcggcacggcggcggcggggctgtggggcggtgcggaagcgagaggcgaggagcgcgcgggccgtggccagagtctggcggcggcctggcggagcggagagcagcgcccgcgcctcgccgtgcggaggagccccgcacacaatagcggcgcgcgcagcccgcgcccttccccccggcgcgccccgccccgcgcgccgagcgccccgctccgcctcacctgccaccagggagtgggcgggcattgttcgccgccgccgccgccgcgcgggccatgggggccgcccggcgcccggggccgggctggcgaggcgccgcgccgccgctgagacgggccccgcgcgcagcccggcggcgcaggtaaggccggccgcgccatggtggacccggtgggcttcgcggaggcgtggaaggcgcagttcccggactcagagcccccgcgcatggagctgcgctcagtgggcgacatcgagcaggagctggagcgctgcaaggcctccattcggcgcctggagcaggaggtgaaccaggagcgcttccgcatgatctacctgcagacgttgctggccaaggaaaagaagagctatgaccggcagcgatggggcttccggcgcgcggcgcaggcccccgacggcgcctccgagccccgagcgtccgcgtcgcgcccgcagccagcgcccgccgacggagccgacccgccgcccgccgaggagcccgaggcccggcccgacggcgagggttctccgggtaaggccaggcccgggaccgcccgcaggcccggggcagccgcgtcgggggaacgggacgaccggggaccccccgccagcgtggcggcgctcaggtccaacttcgagcggatccgcaagggccatggccagcccggggcggacgccgagaagcccttctacgtgaacgtcgagtttcaccacgagcgcggcctggtgaaggtcaacgacaaagaggtgtcggaccgcatcagctccctgggcagccaggccatgcagatggagcgcaaaaagtcccagcacggcgcgggctcgagcgtgggggatgcatccaggcccccttaccggggacgctcctcggagagcagctgcggcgtcgacggcgactacgaggacgccgagttgaacccccgcttcctgaaggacaacctgatcgacgccaatggcggtagcaggcccccttggccgcccctggagtaccagccctaccagagcatctacgtcgggggcatgatggaaggggagggcaagggcccgctcctgcgcagccagagcacctctgagcaggagaagcgccttacctggccccgcaggtcctactccccccggagttttgaggattgcggaggcggctataccccggactgcagctccaatgagaacctcacctccagcgaggaggacttctcctctggccagtccagccgcgtgtccccaagccccaccacctaccgcatgttccgggacaaaagccgctctccctcgcagaactcgcaacagtccttcgacagcagcagtccccccacgccgcagtgccataagcggcaccggcactgcccggttgtcgtgtccgaggccaccatcgtgggcgtccgcaagaccgggcagatctggcccaacgatggcgagggcgccttccatggagacgcagatggctcgttcggaacaccacctggatacggctgcgctgcagaccgggcagaggagcagcgccggcaccaagatgggctgccctacattgatgactcgccctcctcatcgccccacctcagcagcaagggcaggggcagccgggatgcgctggtctcgggagccctggagtccactaaagcgagtgagctggacttggaaaagggcttggagatgagaaaatgggtcctgtcgggaatcctggctagcgaggagacttacctgagccacctggaggcactgctgctgcccatgaagcctttgaaagccgctgccaccacctctcagccggtgctgacgagtcagcagatcgagaccatcttcttcaaagtgcctgagctctacgagatccacaaggagttctatgatgggctcttcccccgcgtgcagcagtggagccaccagcagcgggtgggcgacctcttccagaagctggccagccagctgggtgtgtaccgggccttcgtggacaactacggagttgccatggaaatggctgagaagtgctgtcaggccaatgctcagtttgcagaaatctccgagaacctgagagccagaagcaacaaagatgccaaggatccaacgaccaagaactctctggaaactctgctctacaagcctgtggaccgtgtgacgaggagcacgctggtcctccatgacttgctgaagcacactcctgccagccaccctgaccaccccttgctgcaggacgccctccgcatctcacagaacttcctgtccagcatcaatgaggagatcacaccccgacggcagtccatgacggtgaagaagggagagcaccggcagctgctgaaggacagcttcatggtggagctggtggagggggcccgcaagctgcgccacgtcttcctgttcaccgacctgcttctctgcaccaagctcaagaagcagagcggaggcaaaacgcagcagtatgactgcaaatggtacattccgctcacggatctcagcttccagatggtggatgaactggaggcagtgcccaacatccccctggtgcccgatgaggagctggacgctttgaagatcaagatctcccagatcaagaatgacatccagagagagaagagggcgaacaagggcagcaaggctacggagaggctgaagaagaagctgtcggagcaggagtcactgctgctgcttatgtctcccagcatggccttcagggtgcacagccgcaacggcaagagttacacgttcctgatctcctctgactatgagcgtgcagagtggagggagaacatccgggagcagcagaagaagtgtttcagaagcttctccctgacatccgtggagctgcagatgctgaccaactcgtgtgtgaaactccagactgtccacagcattccgctgaccatcaataaggaagatgatgagtctccggggctctatgggtttctgaatgtcatcgtccactcagccactggatttaagcagagttcaaatctgtactgcaccctggaggtggattcctttgggtattttgtgaataaagcaaagacgcgcgtctacagggacacagctgagccaaactggaacgaggaatttgagatagagctggagggctcccagaccctgaggatactgtgctatgaaaagtgttacaacaagacgaagatccccaaggaggacggcgagagcacggacagactcatggggaagggccaggtccagctggacccgcaggccctgcaggacagagactggcagcgcaccgtcatcgccatgaatgggatcgaagtaaagctctcggtcaagttcaacagcagggagttcagcttgaagaggatgccgtcccgaaaacagacaggggtcttcggagtcaagattgctgtggtcaccaagagagagaggtccaaggtgccctacatcgtgcgccagtgcgtggaggagatcgagcgccgaggcatggaggaggtgggcatctaccgcgtgtccggtgtggccacggacatccaggcactgaaggcagccttcgacgtcaataacaaggacgtgtcggtgatgatgagcgagatggacgtgaacgccatcgcaggcacgctgaagctgtacttccgtgagctgcccgagcccctcttcactgacgagttctaccccaacttcgcagagggcatcgctctttcagacccggttgcaaaggagagctgcatgctcaacctgctgctgtccctgccggaggccaacctgctcaccttccttttccttctggaccacctgaaaagggtggcagagaaggaggcagtcaataagatgtccctgcacaacctcgccacggtctttggccccacgctgctccggccctccgagaaggagagcaagctccctgccaaccccagccagcctatcaccatgactgacagctggtccttggaggtcatgtcccaggtccaggtgctgctgtacttcctgcagctggaggccatccctgccccggacagcaagagacagagcatcctgttctccaccgaagtctaaaggtcccagtccatctcctggaggcggacagatggcctggaaacctctggctaatcgggccatccgtagagcgggaaccttcctgaggtgtccttgggccacccccaagtgttgggccatctgccaagagacagcgacccaaagccgaaggacaggtggcctggaaagatcccgcccaggtctgggagccccaggctggcctcagactgtggttttttatgtggccacctgagggcgccccaagccagttcatctcggagtccaggcctggccctgggagacagggtgaagggagtggtttttatgaacttaacttagagtctaaaagatttctactggatcacttgtcaagatgcgccctctctggggagaagggaacgtgactggattccctcactgttgtatcttgaataaacgctgctgcttcatcctgtgggggccgtggccctgtccctgtgtgggtggggcctcttccatttccctgacttagaaaccacactccacttctaacagggtttgagaggcttagtcagcactgggtagcgttttgactccattcttggctttctttttctttccagaaggatttttgtgcagaaatgggtcttttgttgccatgttagtcctccttggaaggcagctcagaaggcctgtgaaatgtcaggggacaggacccccagggagggaaccccaggctacgcactttagggttcgttctccagggagagcgacctcgtcccccgatcctgaccgcccttccggcccacgctctcctgtttggcttccacaggcctggacttctctggcttctctgcccacacactccctgcccccagtgtccctgcccctgccccagcacaggtgacttcatttctgtcctctcagctcagtggactcgctcaacttttgtataagtctccacttggtggcagcagcttgctgatgacttgttttaaaactttcatcctaaataaccttttgatacttgaatatttgtaagttttatacatagtttctaatttttttccgaacagatccagatacctaataagatgctggaatgtaatccctggacaatccgtgtcctggcagcatttggtcttcctctaagcgcctggctccgctgttctcaggagtgggttctgaagtctctggagaacaggatacgtggagggttaggaaggggccaggcctagagacgggagactccctcccggagcaggtggaggcacaggaccattcgctaccccatctgccgacacctgcgggggagcccaggcattctttgtaaaccctcctgaccacctggctcaaagaaaacagaagcatggagaccgccaagtattttcaagaaataaccccatgaatattccatcacttttttagaaagaggggcttggggcaggcagaggagagaagggagagcaaactgagagccaagtttccacacggtcctgcaggaggagaggatgcagctgcccagagggaagcaggatcacatttaaggaagtgtgtggggtccctggatgacaccagcacccagtgcggctctgtctggcacccgctcccaaggtgggaggagtgggtgtcccctgtgtgtcagtgggcagctcctgctgaacccgcagctcactagggagcctgacagtggggccatgcgcctgacactcctctctgcttgtggacctggcaaggcagggagcagaaaacagccacttgaaggctttctgtctgcgtctgtgtgcagtgtggatttagttgtgcttttttcttgctgggagagcacagccaccatttacaagcagtgtcaccgtcgtgggtggcgaggacagaacaggagcctctgctctctgtacctatctgggcccggtgggctcccttgtcctggcttccatctctgtctcagcgaccattcagccctgcgcaggaacacgtgttgcttagaaaagccaaatccagccttgtctctgcctcctctggtctcatgatgtgcatctgttaccttgaaactggaaaccagtctatcaatgtctgtgccaattttttattccctccccaacctccttccccatacgactttttatttatgtaggatgtgtgctgtctaatgatgggatgaccacacttttccatgttctaaaagtgctcctctcccgcagggtcccagggctggtggttgctttgggtctacagctacgtcttacccacctcctgcctcaacagcctgtgtggtggcaaagccggtgtggggctggggaacgcagcgttctccaggagggggacctggctctccttctgcaatgcaggcgaaggcctagatgccagtgtgacctcccacaaggcgtggcttccagactccccggccggaagtgatgcttttttgccttgggccctgggtttgaagcagcctggctttctcttggtaagtggctggtgtcttagcagctgcaatctgagctcagccacctacacaccaccgtggccgacactttcattaaaaagtttcctgagacga

SEQ ID NO: 566 - DNA, 2951 bp, Homo sapiens
  source 1..2951: mol_type = genomic DNA
ccgagtgctccccgagtgtccaccgtcggcctgctctgttccggggcagggccacatctttgtccgtgtgccgaggaggggactggtgggctggagtcccagggggagattattccaagtaggggctccagaaagccagatggtgtgagtggctccagaagactcttctcttctctgtgcaagagccaggaaggctctagaaaggaatgtctgaggaagcatcggagactgggtcccgccatgcctgtgtcatctcctggcttccccggccctttggctcgttcggaacaccacctggatacggctgcgctgcagaccgggcagaggagcagcgccggcaccaagatgggctgccctacattgatgactcgccctcctcatcgccccacctcagcagcaagggcaggggcagccgggatgcgctggtctcgggagccctggagtccactaaagcggagtgagctggacttggaaaagggcttggagatgagaaaatgggtcctgtcgggaatcctggctagcgaggagacttacctgagccacctggaggcactgctgctgcccatgaagcctttgaaagccgctgccaccacctctcagccggtgctgacgagtcagcagatcgagaccatcttcttcaaagtgcctgagctctacgagatccacaaggagttctatgatgggctcttcccccgcgtgcagcagtggagccaccagcagcgggtgggcgacctcttccagaagctggccagccagctgggtgtgtaccgggccttcgtggacaactacggagttgccatggaaatggctgagaagtgctgtcaggccaatgctcagtttgcagaaatctccgagaacctgagagccagaagcaacaaagatgccaaggatccaacgaccaagaactctctggaaactctgctctacaagcctgtggaccgtgtgacgaggagcacgctggtcctccatgacttgctgaagcacactcctgccagccaccctgaccaccccttgctgcaggacgccctccgcatctcacagaacttcctgtccagcatcaatgaggagatcacaccccgacggcagtccatgacggtgaagaagggagagcaccggcagctgctgaaggacagcttcatggtggagctggtggagggggcccgcaagctgcgccacgtcttcctgttcaccgacctgcttctctgcaccaagctcaagaagcagagcggaggcaaaacgcagcagtatgactgcaaatggtacattccgctcacggatctcagcttccagatggtggatgaactggaggcagtgcccaacatccccctggtgcccgatgaggagctggacgctttgaagatcaagatctcccagatcaagaatgacatccagagagagaagagggcgaacaagggcagcaaggctacggagaggctgaagaagaagctgtcggagcaggagtcactgctgctgcttatgtctcccagcatggccttcagggtgcacagccgcaacggcaagagttacacgttcctgatctcctctgactatgagcgtgcagagtggagggagaacatccgggagcagcagaagaagtgtttcagaagcttctccctgacatccgtggagctgcagatgctgaccaactcgtgtgtgaaactccagactgtccacagcattccgctgaccatcaataaggaagatgatgagtctccggggctctatgggtttctgaatgtcatcgtccactcagccactggatttaagcagagttcaaatctgtactgcaccctggaggtggattcctttgggtattttgtgaataaagcaaagacgcgcgtctacagggacacagctgagccaaactggaacgaggaatttgagatagagctggagggctcccagaccctgaggatactgtgctatgaaaagtgttacaacaagacgaagatccccaaggaggacggcgagagcacggacagactcatggggaagggccaggtccagctggacccgcaggccctgcaggacagagactggcagcgcaccgtcatcgccatgaatgggatcgaagtaaagctctcggtcaagttcaacagcagggagttcagcttgaagaggatgccgtcccgaaaacagacaggggtcttcggagtcaagattgctgtggtcaccaagagagagaggtccaaggtgccctacatcgtgcgccagtgcgtggaggagatcgagcgccgaggcatggaggaggtgggcatctaccgcgtgtccggtgtggccacggacatccaggcactgaaggcagccttcgacgtcaataacaaggacgtgtcggtgatgatgagcgagatggacgtgaacgccatcgcaggcacgctgaagctgtacttccgtgagctgcccgagcccctcttcactgacgagttctaccccaacttcgcagagggcatcgctctttcagacccggttgcaaaggagagctgcatgctcaacctgctgctgtccctgccggaggccaacctgctcaccttccttttccttctggaccacctgaaaagggtggcagagaaggaggcagtcaataagatgtccctgcacaacctcgccacggtctttggccccacgctgctccggccctccgagaaggagagcaagctccctgccaaccccagccagcctatcaccatgactgacagctggtccttggaggtcatgtcccaggtccaggtgctgctgtacttcctgcagctggaggccatccctgccccggacagcaagagacagagcatcctgttctccaccgaagtctaaaggtcccagtccatctcctggaggcggacagatggcctggaaacctctggctaatcgggccatccgtagagcgggaaccttcctgaggtgtccttgggccacccccaagtgttgggccatctgccaagagacagcgaccc

SEQ ID NO: 567 - DNA, 4708 bp, Homo sapiens
  source 1..4708: mol_type = genomic DNA
ggggggagggtggcggctcgatgggggagccgcctccagggggcccccccgccctgtgcccacggcgcggcccctttaagaggcccgcctggctccgtcatccgcgccgcggccacctccccccggccctccccttcctgcggcgcagagtgcgggccgggcgggagtgcggcgagagccggctggctgagcttagcgtccgaggaggcggcggcggcggcggcggcacggcggcggcggggctgtggggcggtgcggaagcgagaggcgaggagcgcgcgggccgtggccagagtctggcggcggcctggcggagcggagagcagcgcccgcgcctcgccgtgcggaggagccccgcacacaatagcggcgcgcgcagcccgcgcccttccccccggcgcgccccgccccgcgcgccgagcgccccgctccgcctcacctgccaccagggagtgggcgggcattgttcgccgccgccgccgccgcgcgggccatgggggccgcccggcgcccggggccgggctggcgaggcgccgcgccgccgctgagacgggccccgcgcgcagcccggcggcgcaggtaaggccggccgcgccatggtggacccggtgggcttcgcggaggcgtggaaggcgcagttcccggactcagagcccccgcgcatggagctgcgctcagtgggcgacatcgagcaggagctggagcgctgcaaggcctccattcggcgcctggagcaggaggtgaaccaggagcgcttccgcatgatctacctgcagacgttgctggccaaggaaaagaagagctatgaccggcagcgatggggcttccggcgcgcggcgcaggcccccgacggcgcctccgagccccgagcgtccgcgtcgcgcccgcagccagcgcccgccgacggagccgacccgccgcccgccgaggagcccgaggcccggcccgacggcgagggttctccgggtaaggccaggcccgggaccgcccgcaggcccggggcagccgcgtcgggggaacgggacgaccggggaccccccgccagcgtggcggcgctcaggtccaacttcgagcggatccgcaagggccatggccagcccggggcggacgccgagaagcccttctacgtgaacgtcgagtttcaccacgagcgcggcctggtgaaggtcaacgacaaagaggtgtcggaccgcatcagctccctgggcagccaggccatgcagatggagcgcaaaaagtcccagcacggcgcgggctcgagcgtgggggatgcatccaggcccccttaccggggacgctcctcggagagcagctgcggcgtcgacggcgactacgaggacgccgagttgaacccccgcttcctgaaggacaacctgatcgacgccaatggcggtagcaggcccccttggccgcccctggagtaccagccctaccagagcatctacgtcgggggcatgatggaaggggagggcaagggcccgctcctgcgcagccagagcacctctgagcaggagaagcgccttacctggccccgcaggtcctactccccccggagttttgaggattgcggaggcggctataccccggactgcagctccaatgagaacctcacctccagcgaggaggacttctcctctggccagtccagccgcgtgtccccaagccccaccacctaccgcatgttccgggacaaaagccgctctccctcgcagaactcgcaacagtccttcgacagcagcagtccccccacgccgcagtgccataagcggcaccggcactgcccggttgtcgtgtccgaggccaccatcgtgggcgtccgcaagaccgggcagatctggcccaacgatggcgagggcgccttccatggagacgcagatggctcgttcggaacaccacctggatacggctgcgctgcagaccgggcagaggagcagcgccggcaccaagatgggctgccctacattgatgactcgccctcctcatcgccccacctcagcagcaagggcaggggcagccgggatgcgctggtctcgggagccctggagtccactaaagcgagtgagctggacttggaaaagggcttggagatgagaaaatgggtcctgtcgggaatcctggctagcgaggagacttacctgagccacctggaggcactgctgctgcccatgaagcctttgaaagccgctgccaccacctctcagccggtgctgacgagtcagcagatcgagaccatcttcttcaaagtgcctgagctctacgagatccacaaggagttctatgatgggctcttcccccgcgtgcagcagtggagccaccagcagcgggtgggcgacctcttccagaagctggccagccagctgggtgtgtaccgggccttcgtggacaactacggagttgccatggaaatggctgagaagtgctgtcaggccaatgctcagtttgcagaaatctccgagaacctgagagccagaagcaacaaagatgccaaggatccaacgaccaagaactctctggaaactctgctctacaagcctgtggaccgtgtgacgaggagcacgctggtcctccatgacttgctgaagcacactcctgccagccaccctgaccaccccttgctgcaggacgccctccgcatctcacagaacttcctgtccagcatcaatgaggagatcacaccccgacggcagtccatgacggtgaagaagggagagcaccggcagctgctgaaggacagcttcatggtggagctggtggagggggcccgcaagctgcgccacgtcttcctgttcaccgacctgcttctctgcaccaagctcaagaagcagagcggaggcaaaacgcagcagtatgactgcaaatggtacattccgctcacggatctcagcttccagatggtggatgaactggaggcagtgcccaacatccccctggtgcccgatgaggagctggacgctttgaagatcaagatctcccagatcaagaatgacatccagagagagaagagggcgaacaagggcagcaaggctacggagaggctgaagaagaagctgtcggagcaggagtcactgctgctgcttatgtctcccagcatggccttcagggtgcacagccgcaacggcaagagttacacgttcctgatctcctctgactatgagcgtgcagagtggagggagaacatccgggagcagcagaagaagtgtttcagaagcttctccctgacatccgtggagctgcagatgctgaccaactcgtgtgtgaaactccagactgtccacagcattccgctgaccatcaataaggaagatgatgagtctccggggctctatgggtttctgaatgtcatcgtccactcagccactggatttaagcagagttcaaatctgtactgcaccctggaggtggattcctttgggtattttgtgaataaagcaaagacgcgcgtctacagggacacagctgagccaaactggaacgagctggacccgcaggccctgcaggacagagactggcagcgcaccgtcatcgccatgaatgggatcgaagtaaagctctcggtcaagttcaacagcagggagttcagcttgaagaggatgccgtcccgaaaacagacaggggtcttcggagtcaagattgctgtggtcaccaagagagagaggtccaaggtgccctacatcgtgcgccagtgcgtggaggagatcgagcgccgaggcatggaggaggtgggcatctaccgcgtgtccggtgtggccacggacatccaggcactgaaggcagccttcgacgtcaataacaaggacgtgtcggtgatgatgagcgagatggacgtgaacgccatcgcaggcacgctgaagctgtacttccgtgagctgcccgagcccctcttcactgacgagttctaccccaacttcgcagagggcatcgctctttcagacccggttgcaaaggagagctgcatgctcaacctgctgctgtccctgccggaggccaacctgctcaccttccttttccttctggaccacctgaaaagggtggcagagaaggaggcagtcaataagatgtccctgcacaacctcgccacggtctttggccccacgctgctccggccctccgagaaggagagcaagctccctgccaaccccagccagcctatcaccatgactgacagctggtccttggaggtcatgtcccaggtccaggtgctgctgtacttcctgcagctggaggccatccctgccccggacagcaagagacagagcatcctgttctccaccgaagtctaaaggtcccagtccatctcctggaggcggacagatggcctggaaacctctggctaatcgggccatccgtagagcgggaaccttcctgaggtgtccttgggccacccccaagtgttgggccatctgccaagagacagcgacccaaagccgaaggacaggtggcctggaaagatcccgcccaggtctgggagccccaggctggcctcagactgtggttttttatgtggccacctgagggcgccccaagccagttcatctcggagtccaggcctggccctgggagacagggtgaagggagtggtttttatgaacttaacttagagtctaaaagatttctactggatcacttgtcaagatgcgccctctctggggagaagggaacgtgactggattccctcactgttgtatcttgaataaacgctgctgcttca

SEQ ID NO: 568 - DNA, 2000 bp, Homo sapiens
  source 1..2000: mol_type = genomic DNA
ggggggagggtggcggctcgatgggggagccgcctccagggggcccccccgccctgtgcccacggcgcggcccctttaagaggcccgcctggctccgtcatccgcgccgcggccacctccccccggccctccccttcctgcggcgcagagtgcgggccgggcgggagtgcggcgagagccggctggctgagcttagcgtccgaggaggcggcggcggcggcggcggcacggcggcggcggggctgtggggcggtgcggaagcgagaggcgaggagcgcgcgggccgtggccagagtctggcggcggcctggcggagcggagagcagcgcccgcgcctcgccgtgcggaggagccccgcacacaatagcggcgcgcgcagcccgcgcccttccccccggcgcgccccgccccgcgcgccgagcgccccgctccgcctcacctgccaccagggagtgggcgggcattgttcgccgccgccgccgccgcgcgggccatgggggccgcccggcgcccggggccgggctggcgaggcgccgcgccgccgctgagacgggccccgcgcgcagcccggcggcgcaggtaaggccggccgcgccatggtggacccggtgggcttcgcggaggcgtggaaggcgcagttcccggactcagagcccccgcgcatggagctgcgctcagtgggcgacatcgagcaggagctggagcgctgcaaggcctccattcggcgcctggagcaggaggtgaaccaggagcgcttccgcatgatctacctgcagacgttgctggccaaggaaaagaagagctatgaccggcagcgatggggcttccggcgcgcggcgcaggcccccgacggcgcctccgagccccgagcgtccgcgtcgcgcccgcagccagcgcccgccgacggagccgacccgccgcccgccgaggagcccgaggcccggcccgacggcgagggttctccgggtaaggccaggcccgggaccgcccgcaggcccggggcagccgcgtcgggggaacgggacgaccggggaccccccgccagcgtggcggcgctcaggtccaacttcgagcggatccgcaagggccatggccagcccggggcggacgccgagaagcccttctacgtgaacgtcgagtttcaccacgagcgcggcctggtgaaggtcaacgacaaagaggtgtcggaccgcatcagctccctgggcagccaggccatgcagatggagcgcaaaaagtcccagcacggcgcgggctcgagcgtgggggatgcatccaggcccccttaccggggacgctcctcggagagcagctgcggcgtcgacggcgactacgaggacgccgagttgaacccccgcttcctgaaggacaacctgatcgacgccaatggcggtagcaggcccccttggccgcccctggagtaccagccctaccagagcatctacgtcgggggcatgatggaaggggagggcaagggcccgctcctgcgcagccagagcacctctgagcaggagaagcgccttacctggccccgcaggtcctactccccccggagttttgaggattgcggaggcggctataccccggactgcagctccaatgagaacctcacctccagcgaggaggacttctcctctggccagtccagccgcgtgtccccaagccccaccacctaccgcatgttccgggacaaaagccgctctccctcgcagaactcgcaacagtccttcgacagcagcagtccccccacgccgcagtgccataagcggcaccggcactgcccggttgtcgtgtccgaggccaccatcgtgggcgtccgcaagaccgggcagatctggcccaacgatggcgagggcgccttccatggagacgcagttctgaagactgaagtcccacatcaaggtgtccgcagggccaggctgtctctggaggctctaggggaggatccttcctttctgttcccagcatctgatggcccacggcattcctcgacctggtga

SEQ ID NO: 569 - DNA, 1365 bp, Homo sapiens
  source 1..1365: mol_type = genomic DNA
atggtggacccggtgggcttcgcggaggcgtggaaggcgcagttcccggactcagagcccccgcgcatggagctgcgctcagtgggcgacatcgagcaggagctggagcgctgcaaggcctccattcggcgcctggagcaggaggtgaaccaggagcgcttccgcatgatctacctgcagacgttgctggccaaggaaaagaagagctatgaccggcagcgatggggcttccggcgcgcggcgcaggcccccgacggcgcctccgagccccgagcgtccgcgtcgcgcccgcagccagcgcccgccgacggagccgacccgccgcccgccgaggagcccgaggcccggcccgacggcgagggttctccgggtaaggccaggcccgggaccgcccgcaggcccggggcagccgcgtcgggggaacgggacgaccggggaccccccgccagcgtggcggcgctcaggtccaacttcgagcggatccgcaagggccatggccagcccggggcggacgccgagaagcccttctacgtgaacgtcgagtttcaccacgagcgcggcctggtgaaggtcaacgacaaagaggtgtcggaccgcatcagctccctgggcagccaggccatgcagatggagcgcaaaaagtcccagcacggcgcgggctcgagcgtgggggatgcatccaggcccccttaccggggacgctcctcggagagcagctgcggcgtcgacggcgactacgaggacgccgagttgaacccccgcttcctgaaggacaacctgatcgacgccaatggcggtagcaggcccccttggccgcccctggagtaccagccctaccagagcatctacgtcgggggcatgatggaaggggagggcaagggcccgctcctgcgcagccagagcacctctgagcaggagaagcgccttacctggccccgcaggtcctactccccccggagttttgaggattgcggaggcggctataccccggactgcagctccaatgagaacctcacctccagcgaggaggacttctcctctggccagtccagccgcgtgtccccaagccccaccacctaccgcatgttccgggacaaaagccgctctccctcgcagaactcgcaacagtccttcgacagcagcagtccccccacgccgcagtgccataagcggcaccggcactgcccggttgtcgtgtccgaggccaccatcgtgggcgtccgcaagaccgggcagatctggcccaacgatggcgagggcgccttccatggagacgcagatggctcgttcggaacaccacctggatacggctgcgctgcaggacgccctccgcatctcacagaacttcctgtccagcatcaatga

SEQ ID NO: 570 - DNA, 7114 bp, Homo sapiens
  source 1..7114: mol_type = genomic DNA
cttagcggtagccccttggtttccgtggcaacggaaaagcgcgggaattacagataaattaaaactgcgactgcgcggcgtgagctcgctgagacttcctggacgggggacaggctgtggggtttctcagataactgggcccctgcgctcaggaggccttcaccctctgctctggttcattggaacagaaagaaatggatttatctgctcttcgcgttgaagaagtacaaaatgtcattaatgctatgcagaaaatcttagagtgtcccatctgattttgcatgctgaaacttctcaaccagaagaaagggccttcacagtgtcctttatgtaagaatgatataaccaaaaggagcctacaagaaagtacgagatttagtcaacttgttgaagagctattgaaaatcatttgtgcttttcagcttgacacaggtttggagtatgcaaacagctataattttgcaaaaaaggaaaataactctcctgaacatctaaaagatgaagtttctatcatccaaagtatgggctacagaaaccgtgccaaaagacttctacagagtgaacccgaaaatccttccttgcaggaaaccagtctcagtgtccaactctctaaccttggaactgtgagaactctgaggacaaagcagcggatacaacctcaaaagacgtctgtctacattgaattgggatctgattcttctgaagataccgttaataaggcaacttattgcagtgtgggagatcaagaattgttacaaatcacccctcaaggaaccagggatgaaatcagtttggattctgcaaaaaaggctgcttgtgaattttctgagacggatgtaacaaatactgaacatcatcaacccagtaataatgatttgaacaccactgagaagcgtgcagctgagaggcatccagaaaagtatcagggtagttctgtttcaaacttgcatgtggagccatgtggcacaaatactcatgccagctcattacagcatgagaacagcagtttattactcactaaagacagaatgaatgtagaaaaggctgaattctgtaataaaagcaaacagcctggcttagcaaggagccaacataacagatgggctggaagtaaggaaacatgtaatgataggcggactcccagcacagaaaaaaaggtagatctgaatgctgatcccctgtgtgagagaaaagaatggaataagcagaaactgccatgctcagagaatcctagagatactgaagatgttccttggataacactaaatagcagcattcagaaagttaatgagtggttttccagaagtgatgaactgttaggttctgatgactcacatgatggggagtctgaatcaaatgccaaagtagctgatgtattggacgttctaaatgaggtagatgaatattctggttcttcagagaaaatagacttactggccagtgatcctcatgaggctttaatatgtaaaagtgaaagagttcactccaaatcagtagagagtaatattgaagacaaaatatttgggaaaacctatcggaagaaggcaagcctccccaacttaagccatgtaactgaaaatctaattataggagcatttgttactgagccacagataatacaagagcgtcccctcacaaataaattaaagcgtaaaaggagacctacatcaggccttcatcctgaggattttatcaagaaagcagatttggcagttcaaaagactcctgaaatgataaatcagggaactaaccaaacggagcagaatggtcaagtgatgaatattactaatagtggtcatgagaataaaacaaaaggtgattctattcagaatgagaaaaatcctaacccaatagaatcactcgaaaaagaatctgctttcaaaacgaaagctgaacctataagcagcagtataagcaatatggaactcgaattaaatatccacaattcaaaagcacctaaaaagaataggctgaggaggaagtcttctaccaggcatattcatgcgcttgaactagtagtcagtagaaatctaagcccacctaattgtactgaattgcaaattgatagttgttctagcagtgaagagataaagaaaaaaaagtacaaccaaatgccagtcaggcacagcagaaacctacaactcatggaaggtaaagaacctgcaactggagccaagaagagtaacaagccaaatgaacagacaagtaaaagacatgacagcgatactttcccagagctgaagttaacaaatgcacctggttcttttactaagtgttcaaataccagtgaacttaaagaatttgtcaatcctagccttccaagagaagaaaaagaagagaaactagaaacagttaaagtgtctaataatgctgaagaccccaaagatctcatgttaagtggagaaagggttttgcaaactgaaagatctgtagagagtagcagtatttcattggtacctggtactgattatggcactcaggaaagtatctcgttactggaagttagcactctagggaaggcaaaaacagaaccaaataaatgtgtgagtcagtgtgcagcatttgaaaaccccaagggactaattcatggttgttccaaagataatagaaatgacacagaaggctttaagtatccattgggacatgaagttaaccacagtcgggaaacaagcatagaaatggaagaaagtgaacttgatgctcagtatttgcagaatacattcaaggtttcaaagcgccagtcatttgctccgttttcaaatccaggaaatgcagaagaggaatgtgcaacattctctgcccactctgggtccttaaagaaacaaagtccaaaagtcacttttgaatgtgaacaaaaggaagaaaatcaaggaaagaatgagtctaatatcaagcctgtacagacagttaatatcactgcaggctttcctgtggttggtcagaaagataagccagttgataatgccaaatgtagtatcaaaggaggctctaggttttgtctatcatctcagttcagaggcaacgaaactggactcattactccaaataaacatggacttttacaaaacccatatcgtataccaccactttttcccatcaagtcatttgttaaaactaaatgtaagaaaaatctgctagaggaaaactttgaggaacattcaatgtcacctgaaagagaaatgggaaatgagaacattccaagtacagtgagcacaattagccgtaataacattagagaaaatgtttttaaagaagccagctcaagcaatattaatgaagtaggttccagtactaatgaagtgggctccagtattaatgaaataggttccagtgatgaaaacattcaagcagaactaggtagaaacagagggccaaaattgaatgctatgcttagattaggggttttgcaacctgaggtctataaacaaagtcttcctggaagtaattgtaagcatcctgaaataaaaaagcaagaatatgaagaagtagttcagactgttaatacagatttctctccatatctgatttcagataacttagaacagcctatgggaagtagtcatgcatctcaggtttgttctgagacacctgatgacctgttagatgatggtgaaataaaggaagatactagttttgctgaaaatgacattaaggaaagttctgctgtttttagcaaaagcgtccagaaaggagagcttagcaggagtcctagccctttcacccatacacatttggctcagggttaccgaagaggggccaagaaattagagtcctcagaagagaacttatctagtgaggatgaagagcttccctgcttccaacacttgttatttggtaaagtaaacaatataccttctcagtctactaggcatagcaccgttgctaccgagtgtctgtctaagaacacagaggagaatttattatcattgaagaatagcttaaatgactgcagtaaccaggtaatattggcaaaggcatctcaggaacatcaccttagtgaggaaacaaaatgttctgctagcttgttttcttcacagtgcagtgaattggaagacttgactgcaaatacaaacacccaggatcctttcttgattggttcttccaaacaaatgaggcatcagtctgaaagccagggagttggtctgagtgacaaggaattggtttcagatgatgaagaaagaggaacgggcttggaagaaaataatcaagaagagcaaagcatggattcaaacttaggtgaagcagcatctgggtgtgagagtgaaacaagcgtctctgaagactgctcagggctatcctctcagagtgacattttaaccactcagcagagggataccatgcaacataacctgataaagctccagcaggaaatggctgaactagaagctgtgttagaacagcatgggagccagccttctaacagctacccttccatcataagtgactcttctgcccttgaggacctgcgaaatccagaacaaagcacatcagaaaaagcagtattaacttcacagaaaagtagtgaataccctataagccagaatccagaaggcctttctgctgacaagtttgaggtgtctgcagatagttctaccagtaaaaataaagaaccaggagtggaaaggtcatccccttctaaatgcccatcattagatgataggtggtacatgcacagttgctctgggagtcttcagaatagaaactacccatctcaagaggagctcattaaggttgttgatgtggaggagcaacagctggaagagtctgggccacacgatttgacggaaacatcttacttgccaaggcaagatctagagggaaccccttacctggaatctggaatcagcctcttctctgatgaccctgaatctgatccttctgaagacagagccccagagtcagctcgtgttggcaacataccatcttcaacctctgcattgaaagttccccaattgaaagttgcagaatctgcccagagtccagctgctgctcatactactgatactgctgggtataatgcaatggaagaaagtgtgagcagggagaagccagaattgacagcttcaacagaaagggtcaacaaaagaatgtccatggtggtgtctggcctgaccccagaagaatttatgctcgtgtacaagtttgccagaaaacaccacatcactttaactaatctaattactgaagagactactcatgttgttatgaaaacagatgctgagtttgtgtgtgaacggacactgaaatattttctaggaattgcgggaggaaaatgggtagttagctatttctgggtgacccagtctattaaagaaagaaaaatgctgaatgagcatgattttgaagtcagaggagatgtggtcaatggaagaaaccaccaaggtccaaagcgagcaagagaatcccaggacagaaagatcttcagggggctagaaatctgttgctatgggcccttcaccaacatgcccacagatcaactggaatggatggtacagctgtgtggtgcttctgtggtgaaggagctttcatcattcacccttggcacaggtgtccacccaattgtggttgtgcagccagatgcctggacagaggacaatggcttccatgcaattgggcagatgtgtgaggcacctgtggtgacccgagagtgggtgttggacagtgtagcactctaccagtgccaggagctggacacctacctgataccccagatcccccacagccactactgactgcagccagccacaggtacagagccacaggaccccaagaatgagcttacaaagtggcctttccaggccctgggagctcctctcactcttcagtccttctactgtcctggctactaaatattttatgtacatcagcctgaaaaggacttctggctatgcaagggtcccttaaagattttctgcttgaagtctcccttggaaatctgccatgagcacaaaattatggtaatttttcacctgagaagattttaaaaccatttaaacgccaccaattgagcaagatgctgattcattatttatcagccctattctttctattcaggctgttgttggcttagggctggaagcacagagtggcttggcctcaagagaatagctggtttccctaagtttacttctctaaaaccctgtgttcacaaaggcagagagtcagacccttcaatggaaggagagtgcttgggatcgattatgtgacttaaagtcagaatagtccttgggcagttctcaaatgttggagtggaacattggggaggaaattctgaggcaggtattagaaatgaaaaggaaacttgaaacctgggcatggtggctcacgcctgtaatcccagcactttgggaggccaaggtgggcagatcactggaggtcaggagttcgaaaccagcctggccaacatggtgaaaccccatctctactaaaaatacagaaattagccggtcatggtggtggacacctgtaatcccagctactcaggtggctaaggcaggagaatcacttcagcccgggaggtggaggttgcagtgagccaagatcataccacggcactccagcctgggtgacagtgagactgtggctcaaaaaaaaaaaaaaaaaaaggaaaatgaaactagaagagatttctaaaagtctgagatatatttgctagatttctaaagaatgtgttctaaaacagcagaagattttcaagaaccggtttccaaagacagtcttctaattcctcattagtaataagtaaaatgtttattgttgtagctctggtatataatccattcctcttaaaatataagacctctggcatgaatatttcatatctataaaatgacagatcccaccaggaaggaagctgttgctttctttgaggtgatttttttcctttgctccctgttgctgaaaccatacagcttcataaataattttgcttgctgaaggaagaaaaagtgtttttcataaacccattatccaggactgtttatagctgttggaaggactaggtcttccctagcccccccagtgtgcaagggcagtgaagacttgattgtacaaaatacgttttgtaaatgttgtgctgttaacactgcaaataaacttggtagcaaacacttcc

SEQ ID NO: 571 - DNA, 6451 bp, Homo sapiens
  source 1..6451: mol_type = genomic DNA
cttagcggtagccccttggtttccgtggcaacggaaaagcgcgggaattacagataaattaaaactgcgactgcgcggcgtgagctcgctgagacttcctggacgggggacaggctgtggggtttctcagataactgggcccctgcgctcaggaggccttcaccctctgctctggttcattggaacagaaagaaatggatttatctgctcttcgcgttgaagaagtacaaaatgtcattaatgctatgcagaaaatcttagagtgtcccatctgtctggagttgatcaaggaacctgtctccacaaagtgtgaccacatattttgcaaattttgcatgctgaaacttctcaaccagaagaaagggccttcacagtgtcctttatgtaagaatgatataaccaaaaggagcctacaagaaagtacgagatttagtcaacttgttgaagagctattgaaaatcatttgtgcttttcagcttgacacaggtttggagtatgcaaacagctataattttgcaaaaaaggaaaataactctcctgaacatctaaaagatgaagtttctatcatccaaagtatgggctacagaaaccgtgccaaaagacttctacagagtgaacccgaaaatccttccttgcaggaaaccagtctcagtgtccaactctctaaccttggaactgtgagaactctgaggacaaagcagcggatacaacctcaaaagacgtctgtctacattgaattgggatctgattcttctgaagataccgttaataaggcaacttattgcagtgtgggagatcaagaattgttacaaatcacccctcaaggaaccagggatgaaatcagtttggattctgcaaaaaaggctgcttgtgaattttctgagacggatgtaacaaatactgaacatcatcaacccagtaataatgatttgaacaccactgagaagcgtgcagctgagaggcatccagaaaagtatcagggtagttctgtttcaaacttgcatgtggagccatgtggcacaaatactcatgccagctcattacagcatgagaacagcagtttattactcactaaagacagaatgaatgtagaaaaggctgaattctgtaataaaagcaaacagcctggcttagcaaggagccaacataacagatgggctggaagtaaggaaacatgtaatgataggcggactcccagcacagaaaaaaaggtagatctgaatgctgatcccctgtgtgagagaaaagaatggaataagcagaaactgccatgctcagagaatcctagagatactgaagatgttccttggataacactaaatagcagcattcagaaagttaatgagtggttttccagaagtgatgaactgttaggttctgatgactcacatgatggggagtctgaatcaaatgccaaagtagctgatgtattggacgttctaaatgaggtagatgaatattctggttcttcagagaaaatagacttactggccagtgatcctcatgaggctttaatatgtaaaagtgaaagagttcactccaaatcagtagagagtaatattgaagacaaaatatttgggaaaacctatcggaagaaggcaagcctccccaacttaagccatgtaactgaaaatctaattataggagcatttgttactgagccacagataatacaagagcgtcccctcacaaataaattaaagcgtaaaaggagacctacatcaggccttcatcctgaggattttatcaagaaagcagatttggcagttcaaaagactcctgaaatgataaatcagggaactaaccaaacggagcagaatggtcaagtgatgaatattactaatagtggtcatgagaataaaacaaaaggtgattctattcagaatgagaaaaatcctaacccaatagaatcactcgaaaaagaatctgctttcaaaacgaaagctgaacctataagcagcagtataagcaatatggaactcgaattaaatatccacaattcaaaagcacctaaaaagaataggctgaggaggaagtcttctaccaggcatattcatgcgcttgaactagtagtcagtagaaatctaagcccacctaattgtactgaattgcaaattgatagttgttctagcagtgaagagataaagaaaaaaaagtacaaccaaatgccagtcaggcacagcagaaacctacaactcatggaaggtaaagaacctgcaactggagccaagaagagtaacaagccaaatgaacagacaagtaaaagacatgacagcgatactttcccagagctgaagttaacaaatgcacctggttcttttactaagtgttcaaataccagtgaacttaaagaatttgtcaatcctagccttccaagagaagaaaaagaagagaaactagaaacagttaaagtgtctaataatgctgaagaccccaaagatctcatgttaagtggagaaagggttttgcaaactgaaagatctgtagagagtagcagtatttcattggtacctggtactgattatggcactcaggaaagtatctcgttactggaagttagcactctagggaaggcaaaaacagaaccaaataaatgtgtgagtcagtgtgcagcatttgaaaaccccaagggactaattcatggttgttccaaagataatagaaatgacacagaaggctttaagtatccattgggacatgaagttaaccacagtcgggaaacaagcatagaaatggaagaaagtgaacttgatgctcagtatttgcagaatacattcaaggtttcaaagcgccagtcatttgctccgttttcaaatccaggaaatgcagaagaggaatgtgcaacattctctgcccactctgggtccttaaagaaacaaagtccaaaagtcacttttgaatgtgaacaaaaggaagaaaatcaaggaaagaatgagtctaatatcaagcctgtacagacagttaatatcactgcaggctttcctgtggttggtcagaaagataagccagttgataatgccaaatgtagtatcaaaggaggctctaggttttgtctatcatctcagttcagaggcaacgaaactggactcattactccaaataaacatggacttttacaaaacccatatcgtataccaccactttttcccatcaagtcatttgttaaaactaaatgtaagaaaaatctgctagaggaaaactttgaggaacattcaatgtcacctgaaagagaaatgggaaatgagaacattccaagtacagtgagcacaattagccgtaataacattagagaaaatgtttttaaagaagccagctcaagcaatattaatgaagtaggttccagtactaatgaagtgggctccagtattaatgaaataggttccagtgatgaaaacattcaagcagaactaggtagaaacagagggccaaaattgaatgctatgcttagattaggggttttgcaacctgaggtctataaacaaagtcttcctggaagtaattgtaagcatcctgaaataaaaaagcaagaatatgaagaagtagttcagactgttaatacagatttctctccatatctgatttcagataacttagaacagcctatgggaagtagtcatgcatctcaggtttgttctgagacacctgatgacctgttagatgatggtgaaataaaggaagatactagttttgctgaaaatgacattaaggaaagttctgctgtttttagcaaaagcgtccagaaaggagagcttagcaggagtcctagccctttcacccatacacatttggctcagggttaccgaagaggggccaagaaattagagtcctcagaagagaacttatctagtgaggatgaagagcttccctgcttccaacacttgttatttggtaaagtaaacaatataccttctcagtctactaggcatagcaccgttgctaccgagtgtctgtctaagaacacagaggagaatttattatcattgaagaatagcttaaatgactgcagtaaccaggtaatattggcaaaggcatctcaggaacatcaccttagtgaggaaacaaaatgttctgctagcttgttttcttcacagtgcagtgaattggaagacttgactgcaaatacaaacacccaggatcctttcttgattggttcttccaaacaaatgaggcatcagtctgaaagccagggagttggtctgagtgacaaggaattggtttcagatgatgaagaaagaggaacgggcttggaagaaaataatcaagaagagcaaagcatggattcaaacttaggtgaagcagcatctgggtgtgagagtgaaacaagcgtctctgaagactgctcagggctatcctctcagagtgacattttaaccactcagcagagggataccatgcaacataacctgataaagctccagcaggaaatggctgaactagaagctgtgttagaacagcatgggagccagccttctaacagctacccttccatcataagtgactcttctgcccttgaggacctgcgaaatccagaacaaagcacatcagaaaaagatgctgagtttgtgtgtgaacggacactgaaatattttctaggaattgcgggaggaaaatgggtagttagctatttctgggtgacccagtctattaaagaaagaaaaatgctgaatgagcatgattttgaagtcagaggagatgtggtcaatggaagaaaccaccaaggtccaaagcgagcaagagaatcccaggacagaaagatcttcagggggctagaaatctgttgctatgggcccttcaccaacatgcccacagatcaactggaatggatggtacagctgtgtggtgcttctgtggtgaaggagctttcatcattcacccttggcacaggtgtccacccaattgtggttgtgcagccagatgcctggacagaggacaatggcttccatgcaattgggcagatgtgtgaggcacctgtggtgacccgagagtgggtgttggacagtgtagcactctaccagtgccaggagctggacacctacctgataccccagatcccccacagccactactgactgcagccagccacaggtacagagccacaggaccccaagaatgagcttacaaagtggcctttccaggccctgggagctcctctcactcttcagtccttctactgtcctggctactaaatattttatgtacatcagcctgaaaaggacttctggctatgcaagggtcccttaaagattttctgcttgaagtctcccttggaaatctgccatgagcacaaaattatggtaatttttcacctgagaagattttaaaaccatttaaacgccaccaattgagcaagatgctgattcattatttatcagccctattctttctattcaggctgttgttggcttagggctggaagcacagagtggcttggcctcaagagaatagctggtttccctaagtttacttctctaaaaccctgtgttcacaaaggcagagagtcagacccttcaatggaaggagagtgcttgggatcgattatgtgacttaaagtcagaatagtccttgggcagttctcaaatgttggagtggaacattggggaggaaattctgaggcaggtattagaaatgaaaaggaaacttgaaacctgggcatggtggctcacgcctgtaatcccagcactttgggaggccaaggtgggcagatcactggaggtcaggagttcgaaaccagcctggccaacatggtgaaaccccatctctactaaaaatacagaaattagccggtcatggtggtggacacctgtaatcccagctactcaggtggctaaggcaggagaatcacttcagcccgggaggtggaggttgcagtgagccaagatcataccacggcactccagcctgggtgacagtgagactgtggctcaaaaaaaaaaaaaaaaaaaggaaaatgaaactagaagagatttctaaaagtctgagatatatttgctagatttctaaagaatgtgttctaaaacagcagaagattttcaagaaccggtttccaaagacagtcttctaattcctcattagtaataagtaaaatgtttattgttgtagctctggtatataatccattcctcttaaaatataagacctctggcatgaatatttcatatctataaaatgacagatcccaccaggaaggaagctgttgctttctttgaggtgatttttttcctttgctccctgttgctgaaaccatacagcttcataaataattttgcttgctgaaggaagaaaaagtgtttttcataaacccattatccaggactgtttatagctgttggaaggactaggtcttccctagcccccccagtgtgcaagggcagtgaagacttgattgtacaaaatacgttttgtaaatgttgtgctgttaacactgcaaataaacttggtagcaaacacttcc

SEQ ID NO: 572 - DNA, 3444 bp, Homo sapiens
  source 1..3444: mol_type = genomic DNA
ttcattggaacagaaagaaatggatttatctgctcttcgcgttgaagaagtacaaaatgtcattaatgctatgcagaaaatcttagagtgtcccatctgtctggagttgatcaaggaacctgtctccacaaagtgtgaccacatattttgcaaattttgcatgctgaaacttctcaaccagaagaaagggccttcacagtgtcctttatgtaagaatgatataaccaaaaggagcctacaagaaagtacgagatttagtcaacttgttgaagagctattgaaaatcatttgtgcttttcagcttgacacaggtttggagtatgcaaacagctataattttgcaaaaaaggaaaataactctcctgaacatctaaaagatgaagtttctatcatccaaagtatgggctacagaaaccgtgccaaaagacttctacagagtgaacccgaaaatccttccttgcaggaaaccagtctcagtgtccaactctctaaccttggaactgtgagaactctgaggacaaagcagcggatacaacctcaaaagacgtctgtctacattgaattgggtgaagcagcatctgggtgtgagagtgaaacaagcgtctctgaagactgctcagggctatcctctcagagtgacattttaaccactcagcagagggataccatgcaacataacctgataaagctccagcaggaaatggctgaactagaagctgtgttagaacagcatgggagccagccttctaacagctacccttccatcataagtgactcttctgcccttgaggacctgcgaaatccagaacaaagcacatcagaaaaagcagtattaacttcacagaaaagtagtgaataccctataagccagaatccagaaggcctttctgctgacaagtttgaggtgtctgcagatagttctaccagtaaaaataaagaaccaggagtggaaaggtcatccccttctaaatgcccatcattagatgataggtggtacatgcacagttgctctgggagtcttcagaatagaaactacccatctcaagaggagctcattaaggttgttgatgtggaggagcaacagctggaagagtctgggccacacgatttgacggaaacatcttacttgccaaggcaagatctagagggaaccccttacctggaatctggaatcagcctcttctctgatgaccctgaatctgatccttctgaagacagagccccagagtcagctcgtgttggcaacataccatcttcaacctctgcattgaaagttccccaattgaaagttgcagaatctgcccagagtccagctgctgctcatactactgatactgctgggtataatgcaatggaagaaagtgtgagcagggagaagccagaattgacagcttcaacagaaagggtcaacaaaagaatgtccatggtggtgtctggcctgaccccagaagaatttatgctcgtgtacaagtttgccagaaaacaccacatcactttaactaatctaattactgaagagactactcatgttgttatgaaaacagatgctgagtttgtgtgtgaacggacactgaaatattttctaggaattgcgggaggaaaatgggtagttagctatttctgggtgacccagtctattaaagaaagaaaaatgctgaatgagcatgattttgaagtcagaggagatgtggtcaatggaagaaaccaccaaggtccaaagcgagcaagagaatcccaggacagaaagatcttcagggggctagaaatctgttgctatgggcccttcaccaacatgcccacagatcaactggaatggatggtacagctgtgtggtgcttctgtggtgaaggagctttcatcattcacccttggcacaggtgtccacccaattgtggttgtgcagccagatgcctggacagaggacaatggcttccatgcaattgggcagatgtgtgaggcacctgtggtgacccgagagtgggtgttggacagtgtagcactctaccagtgccaggagctggacacctacctgataccccagatcccccacagccactactgactgcagccagccacaggtacagagccacaggaccccaagaatgagcttacaaagtggcctttccaggccctgggagctcctctcactcttcagtccttctactgtcctggctactaaatattttatgtacatcagcctgaaaaggacttctggctatgcaagggtcccttaaagattttctgcttgaagtctcccttggaaatctgccatgagcacaaaattatggtaatttttcacctgagaagattttaaaaccatttaaacgccaccaattgagcaagatgctgattcattatttatcagccctattctttctattcaggctgttgttggcttagggctggaagcacagagtggcttggcctcaagagaatagctggtttccctaagtttacttctctaaaaccctgtgttcacaaaggcagagagtcagacccttcaatggaaggagagtgcttgggatcgattatgtgacttaaagtcagaatagtccttgggcagttctcaaatgttggagtggaacattggggaggaaattctgaggcaggtattagaaatgaaaaggaaacttgaaacctgggcatggtggctcacgcctgtaatcccagcactttgggaggccaaggtgggcagatcactggaggtcaggagttcgaaaccagcctggccaacatggtgaaaccccatctctactaaaaatacagaaattagccggtcatggtggtggacacctgtaatcccagctactcaggtggctaaggcaggagaatcacttcagcccgggaggtggaggttgcagtgagccaagatcataccacggcactccagcctgggtgacagtgagactgtggctcaaaaaaaaaaaaaaaaaaaggaaaatgaaactagaagagatttctaaaagtctgagatatatttgctagatttctaaagaatgtgttctaaaacagcagaagattttcaagaaccggtttccaaagacagtcttctaattcctcattagtaataagtaaaatgtttattgttgtagctctggtatataatccattcctcttaaaatataagacctctggcatgaatatttcatatctataaaatgacagatcccaccaggaaggaagctgttgctttctttgaggtgatttttttcctttgctccctgttgctgaaaccatacagcttcataaataattttgcttgctgaaggaagaaaaagtgtttttcataaacccattatccaggactgtttatagctgttggaaggactaggtcttccctagcccccccagtgtgcaagggcagtgaagacttgattgtacaaaatacgttttgtaaatgttgtgctgttaacactgcaaataaacttggtagcaaacacttcc

SEQ ID NO: 573 - DNA, 3780 bp, Homo sapiens
  source 1..3780: mol_type = genomic DNA
gtaccttgatttcgtattctgagaggctgctgcttagcggtagccccttggtttccgtggcaacggaaaagcgcgggaattacagataaattaaaactgcgactgcgcggcgtgagctcgctgagacttcctggacgggggacaggctgtggggtttctcagataactgggcccctgcgctcaggaggccttcaccctctgctctgggtaaagttcattggaacagaaagaaatggatttatctgctcttcgcgttgaagaagtacaaaatgtcattaatgctatgcagaaaatcttagagtgtcccatctgtctggagttgatcaaggaacctgtctccacaaagtgtgaccacatattttgcaaattttgcatgctgaaacttctcaaccagaagaaagggccttcacagtgtcctttatgtaagaatgatataaccaaaaggagcctacaagaaagtacgagatttagtcaacttgttgaagagctattgaaaatcatttgtgcttttcagcttgacacaggtttggagtatgcaaacagctataattttgcaaaaaaggaaaataactctcctgaacatctaaaagatgaagtttctatcatccaaagtatgggctacagaaaccgtgccaaaagacttctacagagtgaacccgaaaatccttccttgcaggaaaccagtctcagtgtccaactctctaaccttggaactgtgagaactctgaggacaaagcagcggatacaacctcaaaagacgtctgtctacattgaattgggatctgattcttctgaagataccgttaataaggcaacttattgcagtgtgggagatcaagaattgttacaaatcacccctcaaggaaccagggatgaaatcagtttggattctgcaaaaaagggtgaagcagcatctgggtgtgagagtgaaacaagcgtctctgaagactgctcagggctatcctctcagagtgacattttaaccactcagcagagggataccatgcaacataacctgataaagctccagcaggaaatggctgaactagaagctgtgttagaacagcatgggagccagccttctaacagctacccttccatcataagtgactcttctgcccttgaggacctgcgaaatccagaacaaagcacatcagaaaaagcagtattaacttcacagaaaagtagtgaataccctataagccagaatccagaaggcctttctgctgacaagtttgaggtgtctgcagatagttctaccagtaaaaataaagaaccaggagtggaaaggtcatccccttctaaatgcccatcattagatgataggtggtacatgcacagttgctctgggagtcttcagaatagaaactacccatctcaagaggagctcattaaggttgttgatgtggaggagcaacagctggaagagtctgggccacacgatttgacggaaacatcttacttgccaaggcaagatctagagggaaccccttacctggaatctggaatcagcctcttctctgatgaccctgaatctgatccttctgaagacagagccccagagtcagctcgtgttggcaacataccatcttcaacctctgcattgaaagttccccaattgaaagttgcagaatctgcccagagtccagctgctgctcatactactgatactgctgggtataatgcaatggaagaaagtgtgagcagggagaagccagaattgacagcttcaacagaaagggtcaacaaaagaatgtccatggtggtgtctggcctgaccccagaagaatttatgctcgtgtacaagtttgccagaaaacaccacatcactttaactaatctaattactgaagagactactcatgttgttatgaaaacagatgctgagtttgtgtgtgaacggacactgaaatattttctaggaattgcgggaggaaaatgggtagttagctatttctgggtgacccagtctattaaagaaagaaaaatgctgaatgagcatgattttgaagtcagaggagatgtggtcaatggaagaaaccaccaaggtccaaagcgagcaagagaatcccaggacagaaagatcttcagggggctagaaatctgttgctatgggcccttcaccaacatgcccacagatcaactggaatggatggtacagctgtgtggtgcttctgtggtgaaggagctttcatcattcacccttggcacaggtgtccacccaattgtggttgtgcagccagatgcctggacagaggacaatggcttccatgcaattgggcagatgtgtgaggcacctgtggtgacccgagagtgggtgttggacagtgtagcactctaccagtgccaggagctggacacctacctgataccccagatcccccacagccactactgactgcagccagccacaggtacagagccacaggaccccaagaatgagcttacaaagtggcctttccaggccctgggagctcctctcactcttcagtccttctactgtcctggctactaaatattttatgtacatcagcctgaaaaggacttctggctatgcaagggtcccttaaagattttctgcttgaagtctcccttggaaatctgccatgagcacaaaattatggtaatttttcacctgagaagattttaaaaccatttaaacgccaccaattgagcaagatgctgattcattatttatcagccctattctttctattcaggctgttgttggcttagggctggaagcacagagtggcttggcctcaagagaatagctggtttccctaagtttacttctctaaaaccctgtgttcacaaaggcagagagtcagacccttcaatggaaggagagtgcttgggatcgattatgtgacttaaagtcagaatagtccttgggcagttctcaaatgttggagtggaacattggggaggaaattctgaggcaggtattagaaatgaaaaggaaacttgaaacctgggcatggtggctcacgcctgtaatcccagcactttgggaggccaaggtgggcagatcactggaggtcaggagttcgaaaccagcctggccaacatggtgaaaccccatctctactaaaaatacagaaattagccggtcatggtggtggacacctgtaatcccagctactcaggtggctaaggcaggagaatcacttcagcccgggaggtggaggttgcagtgagccaagatcataccacggcactccagcctgggtgacagtgagactgtggctcaaaaaaaaaaaaaaaaaaaggaaaatgaaactagaagagatttctaaaagtctgagatatatttgctagatttctaaagaatgtgttctaaaacagcagaagattttcaagaaccggtttccaaagacagtcttctaattcctcattagtaataagtaaaatgtttattgttgtagctctggtatataatccattcctcttaaaatataagacctctggcatgaatatttcatatctataaaatgacagatcccaccaggaaggaagctgttgctttctttgaggtgatttttttcctttgctccctgttgctgaaaccatacagcttcataaataattttgcttgctgaaggaagaaaaagtgtttttcataaacccattatccaggactgtttatagctgttggaaggactaggtcttccctagcccccccagtgtgcaagggcagtgaagacttgattgtacaaaatacgttttgtaaatgttgtgctgttaacactgcaaataaacttggtagcaaacacttcc

SEQ ID NO: 574 - DNA, 6411 bp, Homo sapiens
  source 1..6411: mol_type = genomic DNA
gtaccttgatttcgtattctgagaggctgctgcttagcggtagccccttggtttccgtggcaacggaaaagcgcgggaattacagataaattaaaactgcgactgcgcggcgtgagctcgctgagacttcctggacgggggacaggctgtggggtttctcagataactgggcccctgcgctcaggaggccttcaccctctgctctgggtaaagttcattggaacagaaagaaatggatttatctgctcttcgcgttgaagaagtacaaaatgtcattaatgctatgcagaaaatcttagagtgtcccatctgtctggagttgatcaaggaacctgtctccacaaagtgtgaccacatattttgcaaattttgcatgctgaaacttctcaaccagaagaaagggccttcacagtgtcctttatgtaagaatgatataaccaaaaggagcctacaagaaagtacgagatttagtcaacttgttgaagagctattgaaaatcatttgtgcttttcagcttgacacaggtttggagtatgcaaacagctataattttgcaaaaaaggaaaataactctcctgaacatctaaaagatgaagtttctatcatccaaagtatgggctacagaaaccgtgccaaaagacttctacagagtgaacccgaaaatccttccttgcaggaaaccagtctcagtgtccaactctctaaccttggaactgtgagaactctgaggacaaagcagcggatacaacctcaaaagacgtctgtctacattgaattgggatctgattcttctgaagataccgttaataaggcaacttattgcagtgtgggagatcaagaattgttacaaatcacccctcaaggaaccagggatgaaatcagtttggattctgcaaaaaaggctgcttgtgaattttctgagacggatgtaacaaatactgaacatcatcaacccagtaataatgatttgaacaccactgagaagcgtgcagctgagaggcatccagaaaagtatcagggtagttctgtttcaaacttgcatgtggagccatgtggcacaaatactcatgccagctcattacagcatgagaacagcagtttattactcactaaagacagaatgaatgtagaaaaggctgaattctgtaataaaagcaaacagcctggcttagcaaggagccaacataacagatgggctggaagtaaggaaacatgtaatgataggcggactcccagcacagaaaaaaaggtagatctgaatgctgatcccctgtgtgagagaaaagaatggaataagcagaaactgccatgctcagagaatcctagagatactgaagatgttccttggataacactaaatagcagcattcagaaagttaatgagtggttttccagaagtgatgaactgttaggttctgatgactcacatgatggggagtctgaatcaaatgccaaagtagctgatgtattggacgttctaaatgaggtagatgaatattctggttcttcagagaaaatagacttactggccagtgatcctcatgaggctttaatatgtaaaagtgaaagagttcactccaaatcagtagagagtaatattgaagacaaaatatttgggaaaacctatcggaagaaggcaagcctccccaacttaagccatgtaactgaaaatctaattataggagcatttgttactgagccacagataatacaagagcgtcccctcacaaataaattaaagcgtaaaaggagacctacatcaggccttcatcctgaggattttatcaagaaagcagatttggcagttcaaaagactcctgaaatgataaatcagggaactaaccaaacggagcagaatggtcaagtgatgaatattactaatagtggtcatgagaataaaacaaaaggtgattctattcagaatgagaaaaatcctaacccaatagaatcactcgaaaaagaatctgctttcaaaacgaaagctgaacctataagcagcagtataagcaatatggaactcgaattaaatatccacaattcaaaagcacctaaaaagaataggctgaggaggaagtcttctaccaggcatattcatgcgcttgaactagtagtcagtagaaatctaagcccacctaattgtactgaattgcaaattgatagttgttctagcagtgaagagataaagaaaaaaaagtacaaccaaatgccagtcaggcacagcagaaacctacaactcatggaaggtaaagaacctgcaactggagccaagaagagtaacaagccaaatgaacagacaagtaaaagacatgacagcgatactttcccagagctgaagttaacaaatgcacctggttcttttactaagtgttcaaataccagtgaacttaaagaatttgtcaatcctagccttccaagagaagaaaaagaagagaaactagaaacagttaaagtgtctaataatgctgaagaccccaaagatctcatgttaagtggagaaagggttttgcaaactgaaagatctgtagagagtagcagtatttcattggtacctggtactgattatggcactcaggaaagtatctcgttactggaagttagcactctagggaaggcaaaaacagaaccaaataaatgtgtgagtcagtgtgcagcatttgaaaaccccaagggactaattcatggttgttccaaagataatagaaatgacacagaaggctttaagtatccattgggacatgaagttaaccacagtcgggaaacaagcatagaaatggaagaaagtgaacttgatgctcagtatttgcagaatacattcaaggtttcaaagcgccagtcatttgctccgttttcaaatccaggaaatgcagaagaggaatgtgcaacattctctgcccactctgggtccttaaagaaacaaagtccaaaagtcacttttgaatgtgaacaaaaggaagaaaatcaaggaaagaatgagtctaatatcaagcctgtacagacagttaatatcactgcaggctttcctgtggttggtcagaaagataagccagttgataatgccaaatgtagtatcaaaggaggctctaggttttgtctatcatctcagttcagaggcaacgaaactggactcattactccaaataaacatggacttttacaaaacccatatcgtataccaccactttttcccatcaagtcatttgttaaaactaaatgtaagaaaaatctgctagaggaaaactttgaggaacattcaatgtcacctgaaagagaaatgggaaatgagaacattccaagtacagtgagcacaattagccgtaataacattagagaaaatgtttttaaagaagccagctcaagcaatattaatgaagtaggttccagtactaatgaagtgggctccagtattaatgaaataggttccagtgatgaaaacattcaagcagaactaggtagaaacagagggccaaaattgaatgctatgcttagattaggggttttgcaacctgaggtctataaacaaagtcttcctggaagtaattgtaagcatcctgaaataaaaaagcaagaatatgaagaagtagttcagactgttaatacagatttctctccatatctgatttcagataacttagaacagcctatgggaagtagtcatgcatctcaggtttgttctgagacacctgatgacctgttagatgatggtgaaataaaggaagatactagttttgctgaaaatgacattaaggaaagttctgctgtttttagcaaaagcgtccagaaaggagagcttagcaggagtcctagccctttcacccatacacatttggctcagggttaccgaagaggggccaagaaattagagtcctcagaagagaacttatctagtgaggatgaagagcttccctgcttccaacacttgttatttggtaaagtaaacaatataccttctcagtctactaggcatagcaccgttgctaccgagtgtctgtctaagaacacagaggagaatttattatcattgaagaatagcttaaatgactgcagtaaccaggtaatattggcaaaggcatctcaggaacatcaccttagtgaggaaacaaaatgttctgctagcttgttttcttcacagtgcagtgaattggaagacttgactgcaaatacaaacacccaggatcctttcttgattggttcttccaaacaaatgaggcatcagtctgaaagccagggagttggtctgagtgacaaggaattggtttcagatgatgaagaaagaggaacgggcttggaagaaaataatcaagaagagcaaagcatggattcaaacttaggtgaagcagcatctgggtgtgagagtgaaacaagcgtctctgaagactgctcagggctatcctctcagagtgacattttaaccactcagcagagggataccatgcaacataacctgataaagctccagcaggaaatggctgaactagaagctgtgttagaacagcatgggagccagccttctaacagctacccttccatcataagtgactcttctgcccttgaggacctgcgaaatccagaacaaagcacatcagaaaaaggggtgacccagtctattaaagaaagaaaaatgctgaatgagcatgattttgaagtcagaggagatgtggtcaatggaagaaaccaccaaggtccaaagcgagcaagagaatcccaggacagaaagatcttcagggggctagaaatctgttgctatgggcccttcaccaacatgcccacagatcaactggaatggatggtacagctgtgtggtgcttctgtggtgaaggagctttcatcattcacccttggcacaggtgtccacccaattgtggttgtgcagccagatgcctggacagaggacaatggcttccatgcaattgggcagatgtgtgaggcacctgtggtgacccgagagtgggtgttggacagtgtagcactctaccagtgccaggagctggacacctacctgataccccagatcccccacagccactactgactgcagccagccacaggtacagagccacaggaccccaagaatgagcttacaaagtggcctttccaggccctgggagctcctctcactcttcagtccttctactgtcctggctactaaatattttatgtacatcagcctgaaaaggacttctggctatgcaagggtcccttaaagattttctgcttgaagtctcccttggaaatctgccatgagcacaaaattatggtaatttttcacctgagaagattttaaaaccatttaaacgccaccaattgagcaagatgctgattcattatttatcagccctattctttctattcaggctgttgttggcttagggctggaagcacagagtggcttggcctcaagagaatagctggtttccctaagtttacttctctaaaaccctgtgttcacaaaggcagagagtcagacccttcaatggaaggagagtgcttgggatcgattatgtgacttaaagtcagaatagtccttgggcagttctcaaatgttggagtggaacattggggaggaaattctgaggcaggtattagaaatgaaaaggaaacttgaaacctgggcatggtggctcacgcctgtaatcccagcactttgggaggccaaggtgggcagatcactggaggtcaggagttcgaaaccagcctggccaacatggtgaaaccccatctctactaaaaatacagaaattagccggtcatggtggtggacacctgtaatcccagctactcaggtggctaaggcaggagaatcacttcagcccgggaggtggaggttgcagtgagccaagatcataccacggcactccagcctgggtgacagtgagactgtggctcaaaaaaaaaaaaaaaaaaaggaaaatgaaactagaagagatttctaaaagtctgagatatatttgctagatttctaaagaatgtgttctaaaacagcagaagattttcaagaaccggtttccaaagacagtcttctaattcctcattagtaataagtaaaatgtttattgttgtagctctggtatataatccattcctcttaaaatataagacctctggcatgaatatttcatatctataaaatgacagatcccaccaggaaggaagctgttgctttctttgaggtgatttttttcctttgctccctgttgctgaaaccatacagcttcataaataattttgcttgctgaaggaagaaaaagtgtttttcataaacccattatccaggactgtttatagctgttggaaggactaggtcttccctagcccccccagtgtgcaagggcagtgaagacttgattgtacaaaatacgttttgtaaatgttgtgctgttaacactgcaaataaacttggtagcaaacacttcc

SEQ ID NO: 575 - DNA, 7094 bp, Homo sapiens
  source 1..7094: mol_type = genomic DNA
gagctcgctgagacttcctggacgggggacaggctgtggggtttctcagataactgggcccctgcgctcaggaggccttcaccctctgctctgggtaaagttcattggaacagaaagaaatggatttatctgctcttcgcgttgaagaagtacaaaatgtcattaatgctatgcagaaaatcttagagtgtcccatctgtctggagttgatcaaggaacctgtctccacaaagtgtgaccacatattttgcaaattttgcatgctgaaacttctcaaccagaagaaagggccttcacagtgtcctttatgtaagaatgatataaccaaaaggagcctacaagaaagtacgagatttagtcaacttgttgaagagctattgaaaatcatttgtgcttttcagcttgacacaggtttggagtatgcaaacagctataattttgcaaaaaaggaaaataactctcctgaacatctaaaagatgaagtttctatcatccaaagtatgggctacagaaaccgtgccaaaagacttctacagagtgaacccgaaaatccttccttgcaggaaaccagtctcagtgtccaactctctaaccttggaactgtgagaactctgaggacaaagcagcggatacaacctcaaaagacgtctgtctacattgaattgggatctgattcttctgaagataccgttaataaggcaacttattgcagtgtgggagatcaagaattgttacaaatcacccctcaaggaaccagggatgaaatcagtttggattctgcaaaaaaggctgcttgtgaattttctgagacggatgtaacaaatactgaacatcatcaacccagtaataatgatttgaacaccactgagaagcgtgcagctgagaggcatccagaaaagtatcagggtagttctgtttcaaacttgcatgtggagccatgtggcacaaatactcatgccagctcattacagcatgagaacagcagtttattactcactaaagacagaatgaatgtagaaaaggctgaattctgtaataaaagcaaacagcctggcttagcaaggagccaacataacagatgggctggaagtaaggaaacatgtaatgataggcggactcccagcacagaaaaaaaggtagatctgaatgctgatcccctgtgtgagagaaaagaatggaataagcagaaactgccatgctcagagaatcctagagatactgaagatgttccttggataacactaaatagcagcattcagaaagttaatgagtggttttccagaagtgatgaactgttaggttctgatgactcacatgatggggagtctgaatcaaatgccaaagtagctgatgtattggacgttctaaatgaggtagatgaatattctggttcttcagagaaaatagacttactggccagtgatcctcatgaggctttaatatgtaaaagtgaaagagttcactccaaatcagtagagagtaatattgaagacaaaatatttgggaaaacctatcggaagaaggcaagcctccccaacttaagccatgtaactgaaaatctaattataggagcatttgttactgagccacagataatacaagagcgtcccctcacaaataaattaaagcgtaaaaggagacctacatcaggccttcatcctgaggattttatcaagaaagcagatttggcagttcaaaagactcctgaaatgataaatcagggaactaaccaaacggagcagaatggtcaagtgatgaatattactaatagtggtcatgagaataaaacaaaaggtgattctattcagaatgagaaaaatcctaacccaatagaatcactcgaaaaagaatctgctttcaaaacgaaagctgaacctataagcagcagtataagcaatatggaactcgaattaaatatccacaattcaaaagcacctaaaaagaataggctgaggaggaagtcttctaccaggcatattcatgcgcttgaactagtagtcagtagaaatctaagcccacctaattgtactgaattgcaaattgatagttgttctagcagtgaagagataaagaaaaaaaagtacaaccaaatgccagtcaggcacagcagaaacctacaactcatggaaggtaaagaacctgcaactggagccaagaagagtaacaagccaaatgaacagacaagtaaaagacatgacagcgatactttcccagagctgaagttaacaaatgcacctggttcttttactaagtgttcaaataccagtgaacttaaagaatttgtcaatcctagccttccaagagaagaaaaagaagagaaactagaaacagttaaagtgtctaataatgctgaagaccccaaagatctcatgttaagtggagaaagggttttgcaaactgaaagatctgtagagagtagcagtatttcattggtacctggtactgattatggcactcaggaaagtatctcgttactggaagttagcactctagggaaggcaaaaacagaaccaaataaatgtgtgagtcagtgtgcagcatttgaaaaccccaagggactaattcatggttgttccaaagataatagaaatgacacagaaggctttaagtatccattgggacatgaagttaaccacagtcgggaaacaagcatagaaatggaagaaagtgaacttgatgctcagtatttgcagaatacattcaaggtttcaaagcgccagtcatttgctccgttttcaaatccaggaaatgcagaagaggaatgtgcaacattctctgcccactctgggtccttaaagaaacaaagtccaaaagtcacttttgaatgtgaacaaaaggaagaaaatcaaggaaagaatgagtctaatatcaagcctgtacagacagttaatatcactgcaggctttcctgtggttggtcagaaagataagccagttgataatgccaaatgtagtatcaaaggaggctctaggttttgtctatcatctcagttcagaggcaacgaaactggactcattactccaaataaacatggacttttacaaaacccatatcgtataccaccactttttcccatcaagtcatttgttaaaactaaatgtaagaaaaatctgctagaggaaaactttgaggaacattcaatgtcacctgaaagagaaatgggaaatgagaacattccaagtacagtgagcacaattagccgtaataacattagagaaaatgtttttaaagaagccagctcaagcaatattaatgaagtaggttccagtactaatgaagtgggctccagtattaatgaaataggttccagtgatgaaaacattcaagcagaactaggtagaaacagagggccaaaattgaatgctatgcttagattaggggttttgcaacctgaggtctataaacaaagtcttcctggaagtaattgtaagcatcctgaaataaaaaagcaagaatatgaagaagtagttcagactgttaatacagatttctctccatatctgatttcagataacttagaacagcctatgggaagtagtcatgcatctcaggtttgttctgagacacctgatgacctgttagatgatggtgaaataaaggaagatactagttttgctgaaaatgacattaaggaaagttctgctgtttttagcaaaagcgtccagaaaggagagcttagcaggagtcctagccctttcacccatacacatttggctcagggttaccgaagaggggccaagaaattagagtcctcagaagagaacttatctagtgaggatgaagagcttccctgcttccaacacttgttatttggtaaagtaaacaatataccttctcagtctactaggcatagcaccgttgctaccgagtgtctgtctaagaacacagaggagaatttattatcattgaagaatagcttaaatgactgcagtaaccaggtaatattggcaaaggcatctcaggaacatcaccttagtgaggaaacaaaatgttctgctagcttgttttcttcacagtgcagtgaattggaagacttgactgcaaatacaaacacccaggatcctttcttgattggttcttccaaacaaatgaggcatcagtctgaaagccagggagttggtctgagtgacaaggaattggtttcagatgatgaagaaagaggaacgggcttggaagaaaataatcaagaagagcaaagcatggattcaaacttaggtgaagcagcatctgggtgtgagagtgaaacaagcgtctctgaagactgctcagggctatcctctcagagtgacattttaaccactcagcagagggataccatgcaacataacctgataaagctccagcaggaaatggctgaactagaagctgtgttagaacagcatgggagccagccttctaacagctacccttccatcataagtgactcttctgcccttgaggacctgcgaaatccagaacaaagcacatcagaaaaagcagtattaacttcacagaaaagtagtgaataccctataagccagaatccagaaggcctttctgctgacaagtttgaggtgtctgcagatagttctaccagtaaaaataaagaaccaggagtggaaaggtcatccccttctaaatgcccatcattagatgataggtggtacatgcacagttgctctgggagtcttcagaatagaaactacccatctcaagaggagctcattaaggttgttgatgtggaggagcaacagctggaagagtctgggccacacgatttgacggaaacatcttacttgccaaggcaagatctagagggaaccccttacctggaatctggaatcagcctcttctctgatgaccctgaatctgatccttctgaagacagagccccagagtcagctcgtgttggcaacataccatcttcaacctctgcattgaaagttccccaattgaaagttgcagaatctgcccagagtccagctgctgctcatactactgatactgctgggtataatgcaatggaagaaagtgtgagcagggagaagccagaattgacagcttcaacagaaagggtcaacaaaagaatgtccatggtggtgtctggcctgaccccagaagaatttatgctcgtgtacaagtttgccagaaaacaccacatcactttaactaatctaattactgaagagactactcatgttgttatgaaaacagatgctgagtttgtgtgtgaacggacactgaaatattttctaggaattgcgggaggaaaatgggtagttagctatttctgggtgacccagtctattaaagaaagaaaaatgctgaatgagcatgattttgaagtcagaggagatgtggtcaatggaagaaaccaccaaggtccaaagcgagcaagagaatcccaggacagaaagatcttcagggggctagaaatctgttgctatgggcccttcaccaacatgcccacagatcaactggaatggatggtacagctgtgtggtgcttctgtggtgaaggagctttcatcattcacccttggcacaggtgtccacccaattgtggttgtgcagccagatgcctggacagaggacaatggcttccatgcaattgggcagatgtgtgaggcacctgtggtgacccgagagtgggtgttggacagtgtagcactctaccagtgccaggagctggacacctacctgataccccagatcccccacagccactactgactgcagccagccacaggtacagagccacaggaccccaagaatgagcttacaaagtggcctttccaggccctgggagctcctctcactcttcagtccttctactgtcctggctactaaatattttatgtacatcagcctgaaaaggacttctggctatgcaagggtcccttaaagattttctgcttgaagtctcccttggaaatctgccatgagcacaaaattatggtaatttttcacctgagaagattttaaaaccatttaaacgccaccaattgagcaagatgctgattcattatttatcagccctattctttctattcaggctgttgttggcttagggctggaagcacagagtggcttggcctcaagagaatagctggtttccctaagtttacttctctaaaaccctgtgttcacaaaggcagagagtcagacccttcaatggaaggagagtgcttgggatcgattatgtgacttaaagtcagaatagtccttgggcagttctcaaatgttggagtggaacattggggaggaaattctgaggcaggtattagaaatgaaaaggaaacttgaaacctgggcatggtggctcacgcctgtaatcccagcactttgggaggccaaggtgggcagatcactggaggtcaggagttcgaaaccagcctggccaacatggtgaaaccccatctctactaaaaatacagaaattagccggtcatggtggtggacacctgtaatcccagctactcaggtggctaaggcaggagaatcacttcagcccgggaggtggaggttgcagtgagccaagatcataccacggcactccagcctgggtgacagtgagactgtggctcaaaaaaaaaaaaaaaaaaaggaaaatgaaactagaagagatttctaaaagtctgagatatatttgctagatttctaaagaatgtgttctaaaacagcagaagattttcaagaaccggtttccaaagacagtcttctaattcctcattagtaataagtaaaatgtttattgttgtagctctggtatataatccattcctcttaaaatataagacctctggcatgaatatttcatatctataaaatgacagatcccaccaggaaggaagctgttgctttctttgaggtgatttttttcctttgctccctgttgctgaaaccatacagcttcataaataattttgcttgctgaaggaagaaaaagtgtttttcataaacccattatccaggactgtttatagctgttggaaggactaggtcttccctagcccccccagtgtgcaagggcagtgaagacttgattgtacaaaatacgttttgtaaatgttgtgctgttaacactgcaaataaacttggtagcaaacacttcca

SEQ ID NO: 576 - DNA, 2420 bp, Homo sapiens
  source 1..2420: mol_type = genomic DNA
attgctcagcggtttccgtggcaacagtaaagcgtgggaattacagataaattaaaactgtggaacccctttcctcggctgccgccaaggtgttcggtccttccgaggaagctaaggccgcgttggggtgagaccctcacttcatccgtctggagttgatcaaggaacctgtctccacaaagtgtgaccacatattttgcaaattttgcatgctgaaacttctcaaccagaagaaagggccttcacagtgtcctttatgtaagaatgatataaccaaaaggagcctacaagaaagtacgagatttagtcaacttgttgaagagctattgaaaatcatttgtgcttttcagcttgacacaggtttggagtatgcaaacagctataattttgcaaaaaaggaaaataactctcctgaacatctaaaagatgaagtttctatcatccaaagtatgggctacagaaaccgtgccaaaagacttctacagagtgaacccgaaaatccttccttgcaggaaaccagtctcagtgtccaactctctaaccttggaactgtgagaactctgaggacaaagcagcggatacaacctcaaaagacgtctgtctacattgaattgggatctgattcttctgaagataccgttaataaggcaacttattgcagtgtgggagatcaagaattgttacaaatcacccctcaaggaaccagggatgaaatcagtttggattctgcaaaaaaggctgcttgtgaattttctgagacggatgtaacaaatactgaacatcatcaacccagtaataatgatttgaacaccactgagaagcgtgcagctgagaggcatccagaaaagtatcagggtgaagcagcatctgggtgtgagagtgaaacaagcgtctctgaagactgctcagggctatcctctcagagtgacattttaaccactcagcagagggataccatgcaacataacctgataaagctccagcaggaaatggctgaactagaagctgtgttagaacagcatgggagccagccttctaacagctacccttccatcataagtgactcttctgcccttgaggacctgcgaaatccagaacaaagcacatcagaaaaagtattaacttcacagaaaagtagtgaataccctataagccagaatccagaaggcctttctgctgacaagtttgaggtgtctgcagatagttctaccagtaaaaataaagaaccaggagtggaaaggtcatccccttctaaatgcccatcattagatgataggtggtacatgcacagttgctctgggagtcttcagaatagaaactacccatctcaagaggagctcattaaggttgttgatgtggaggagcaacagctggaagagtctgggccacacgatttgacggaaacatcttacttgccaaggcaagatctagagggaaccccttacctggaatctggaatcagcctcttctctgatgaccctgaatctgatccttctgaagacagagccccagagtcagctcgtgttggcaacataccatcttcaacctctgcattgaaagttccccaattgaaagttgcagaatctgcccagagtccagctgctgctcatactactgatactgctgggtataatgcaatggaagaaagtgtgagcagggagaagccagaattgacagcttcaacagaaagggtcaacaaaagaatgtccatggtggtgtctggcctgaccccagaagaatttatgctcgtgtacaagtttgccagaaaacaccacatcactttaactaatctaattactgaagagactactcatgttgttatgaaaacagatgctgagtttgtgtgtgaacggacactgaaatattttctaggaattgcgggaggaaaatgggtagttagctatttctgggtgacccagtctattaaagaaagaaaaatgctgaatgagcatgattttgaagtcagaggagatgtggtcaatggaagaaaccaccaaggtccaaagcgagcaagagaatcccaggacagaaagatcttcagggggctagaaatctgttgctatgggcccttcaccaacatgcccacagatcaactggaatggatggtacagctgtgtggtgcttctgtggtgaaggagctttcatcattcacccttggcacaggtgtccacccaattgtggttgtgcagccagatgcctggacagaggacaatggcttccatgcaattgggcagatgtgtgaggcacctgtggtgacccgagagtgggtgttggacagtgtagcactctaccagtgccaggagctggacacctacctgataccccagatcccccacagccactactgactgcagccagccacaggtacagagccacaggaccccaagaatgagcttacaaagtggcctttccaggccctg

SEQ ID NO: 577 - DNA, 7269 bp, Homo sapiens
  source 1..7269: mol_type = genomic DNA
gtaccttgatttcgtattctgagaggctgctgcttagcggtagccccttggtttccgtggcaacggaaaagcgcgggaattacagataaattaaaactgcgactgcgcggcgtgagctcgctgagacttcctggacgggggacaggctgtggggtttctcagataactgggcccctgcgctcaggaggccttcaccctctgctctgggtaaagttcattggaacagaaagaaatggatttatctgctcttcgcgttgaagaagtacaaaatgtcattaatgctatgcagaaaatcttagagtgtcccatctgtctggagttgatcaaggaacctgtctccacaaagtgtgaccacatattttgcaaattttgcatgctgaaacttctcaaccagaagaaagggccttcacagtgtcctttatgtaagaatgatataaccaaaaggagcctacaagaaagtacgagatttagtcaacttgttgaagagctattgaaaatcatttgtgcttttcagcttgacacaggtttggagtatgcaaacagctataattttgcaaaaaaggaaaataactctcctgaacatctaaaagatgaagtttctatcatccaaagtatgggctacagaaaccgtgccaaaagacttctacagagtgaacccgaaaatccttccttgcaggaaaccagtctcagtgtccaactctctaaccttggaactgtgagaactctgaggacaaagcagcggatacaacctcaaaagacgtctgtctacattgaattgggatctgattcttctgaagataccgttaataaggcaacttattgcagtgtgggagatcaagaattgttacaaatcacccctcaaggaaccagggatgaaatcagtttggattctgcaaaaaaggctgcttgtgaattttctgagacggatgtaacaaatactgaacatcatcaacccagtaataatgatttgaacaccactgagaagcgtgcagctgagaggcatccagaaaagtatcagggtagttctgtttcaaacttgcatgtggagccatgtggcacaaatactcatgccagctcattacagcatgagaacagcagtttattactcactaaagacagaatgaatgtagaaaaggctgaattctgtaataaaagcaaacagcctggcttagcaaggagccaacataacagatgggctggaagtaaggaaacatgtaatgataggcggactcccagcacagaaaaaaaggtagatctgaatgctgatcccctgtgtgagagaaaagaatggaataagcagaaactgccatgctcagagaatcctagagatactgaagatgttccttggataacactaaatagcagcattcagaaagttaatgagtggttttccagaagtgatgaactgttaggttctgatgactcacatgatggggagtctgaatcaaatgccaaagtagctgatgtattggacgttctaaatgaggtagatgaatattctggttcttcagagaaaatagacttactggccagtgatcctcatgaggctttaatatgtaaaagtgaaagagttcactccaaatcagtagagagtaatattgaagacaaaatatttgggaaaacctatcggaagaaggcaagcctccccaacttaagccatgtaactgaaaatctaattataggagcatttgttactgagccacagataatacaagagcgtcccctcacaaataaattaaagcgtaaaaggagacctacatcaggccttcatcctgaggattttatcaagaaagcagatttggcagttcaaaagactcctgaaatgataaatcagggaactaaccaaacggagcagaatggtcaagtgatgaatattactaatagtggtcatgagaataaaacaaaaggtgattctattcagaatgagaaaaatcctaacccaatagaatcactcgaaaaagaatctgctttcaaaacgaaagctgaacctataagcagcagtataagcaatatggaactcgaattaaatatccacaattcaaaagcacctaaaaagaataggctgaggaggaagtcttctaccaggcatattcatgcgcttgaactagtagtcagtagaaatctaagcccacctaattgtactgaattgcaaattgatagttgttctagcagtgaagagataaagaaaaaaaagtacaaccaaatgccagtcaggcacagcagaaacctacaactcatggaaggtaaagaacctgcaactggagccaagaagagtaacaagccaaatgaacagacaagtaaaagacatgacagcgatactttcccagagctgaagttaacaaatgcacctggttcttttactaagtgttcaaataccagtgaacttaaagaatttgtcaatcctagccttccaagagaagaaaaagaagagaaactagaaacagttaaagtgtctaataatgctgaagaccccaaagatctcatgttaagtggagaaagggttttgcaaactgaaagatctgtagagagtagcagtatttcattggtacctggtactgattatggcactcaggaaagtatctcgttactggaagttagcactctagggaaggcaaaaacagaaccaaataaatgtgtgagtcagtgtgcagcatttgaaaaccccaagggactaattcatggttgttccaaagataatagaaatgacacagaaggctttaagtatccattgggacatgaagttaaccacagtcgggaaacaagcatagaaatggaagaaagtgaacttgatgctcagtatttgcagaatacattcaaggtttcaaagcgccagtcatttgctccgttttcaaatccaggaaatgcagaagaggaatgtgcaacattctctgcccactctgggtccttaaagaaacaaagtccaaaagtcacttttgaatgtgaacaaaaggaagaaaatcaaggaaagaatgagtctaatatcaagcctgtacagacagttaatatcactgcaggctttcctgtggttggtcagaaagataagccagttgataatgccaaatgtagtatcaaaggaggctctaggttttgtctatcatctcagttcagaggcaacgaaactggactcattactccaaataaacatggacttttacaaaacccatatcgtataccaccactttttcccatcaagtcatttgttaaaactaaatgtaagaaaaatctgctagaggaaaactttgaggaacattcaatgtcacctgaaagagaaatgggaaatgagaacattccaagtacagtgagcacaattagccgtaataacattagagaaaatgtttttaaagaagccagctcaagcaatattaatgaagtaggttccagtactaatgaagtgggctccagtattaatgaaataggttccagtgatgaaaacattcaagcagaactaggtagaaacagagggccaaaattgaatgctatgcttagattaggggttttgcaacctgaggtctataaacaaagtcttcctggaagtaattgtaagcatcctgaaataaaaaagcaagaatatgaagaagtagttcagactgttaatacagatttctctccatatctgatttcagataacttagaacagcctatgggaagtagtcatgcatctcaggtttgttctgagacacctgatgacctgttagatgatggtgaaataaaggaagatactagttttgctgaaaatgacattaaggaaagttctgctgtttttagcaaaagcgtccagaaaggagagcttagcaggagtcctagccctttcacccatacacatttggctcagggttaccgaagaggggccaagaaattagagtcctcagaagagaacttatctagtgaggatgaagagcttccctgcttccaacacttgttatttggtaaagtaaacaatataccttctcagtctactaggcatagcaccgttgctaccgagtgtctgtctaagaacacagaggagaatttattatcattgaagaatagcttaaatgactgcagtaaccaggtaatattggcaaaggcatctcaggaacatcaccttagtgaggaaacaaaatgttctgctagcttgttttcttcacagtgcagtgaattggaagacttgactgcaaatacaaacacccaggatcctttcttgattggttcttccaaacaaatgaggcatcagtctgaaagccagggagttggtctgagtgacaaggaattggtttcagatgatgaagaaagaggaacgggcttggaagaaaataatcaagaagagcaaagcatggattcaaacttaggtgaagcagcatctgggtgtgagagtgaaacaagcgtctctgaagactgctcagggctatcctctcagagtgacattttaaccactcagcagagggataccatgcaacataacctgataaagctccagcaggaaatggctgaactagaagctgtgttagaacagcatgggagccagccttctaacagctacccttccatcataagtgactcttctgcccttgaggacctgcgaaatccagaacaaagcacatcagaaaaagattcgcatatacatggccaaaggaacaactccatgttttctaaaaggcctagagaacatatatcagtattaacttcacagaaaagtagtgaataccctataagccagaatccagaaggcctttctgctgacaagtttgaggtgtctgcagatagttctaccagtaaaaataaagaaccaggagtggaaaggtcatccccttctaaatgcccatcattagatgataggtggtacatgcacagttgctctgggagtcttcagaatagaaactacccatctcaagaggagctcattaaggttgttgatgtggaggagcaacagctggaagagtctgggccacacgatttgacggaaacatcttacttgccaaggcaagatctagagggaaccccttacctggaatctggaatcagcctcttctctgatgaccctgaatctgatccttctgaagacagagccccagagtcagctcgtgttggcaacataccatcttcaacctctgcattgaaagttccccaattgaaagttgcagaatctgcccagagtccagctgctgctcatactactgatactgctgggtataatgcaatggaagaaagtgtgagcagggagaagccagaattgacagcttcaacagaaagggtcaacaaaagaatgtccatggtggtgtctggcctgaccccagaagaatttatgctcgtgtacaagtttgccagaaaacaccacatcactttaactaatctaattactgaagagactactcatgttgttatgaaaacagatgctgagtttgtgtgtgaacggacactgaaatattttctaggaattgcgggaggaaaatgggtagttagctatttctgggtgacccagtctattaaagaaagaaaaatgctgaatgagcatgattttgaagtcagaggagatgtggtcaatggaagaaaccaccaaggtccaaagcgagcaagagaatcccaggacagaaagatcttcagggggctagaaatctgttgctatgggcccttcaccaacatgcccacagatcaactggaatggatggtacagctgtgtggtgcttctgtggtgaaggagctttcatcattcacccttggcacaggtgtccacccaattgtggttgtgcagccagatgcctggacagaggacaatggcttccatgcaattgggcagatgtgtgaggcacctgtggtgacccgagagtgggtgttggacagtgtagcactctaccagtgccaggagctggacacctacctgataccccagatcccccacagccactactgactgcagccagccacaggtacagagccacaggaccccaagaatgagcttacaaagtggcctttccaggccctgggagctcctctcactcttcagtccttctactgtcctggctactaaatattttatgtacatcagcctgaaaaggacttctggctatgcaagggtcccttaaagattttctgcttgaagtctcccttggaaatctgccatgagcacaaaattatggtaatttttcacctgagaagattttaaaaccatttaaacgccaccaattgagcaagatgctgattcattatttatcagccctattctttctattcaggctgttgttggcttagggctggaagcacagagtggcttggcctcaagagaatagctggtttccctaagtttacttctctaaaaccctgtgttcacaaaggcagagagtcagacccttcaatggaaggagagtgcttgggatcgattatgtgacttaaagtcagaatagtccttgggcagttctcaaatgttggagtggaacattggggaggaaattctgaggcaggtattagaaatgaaaaggaaacttgaaacctgggcatggtggctcacgcctgtaatcccagcactttgggaggccaaggtgggcagatcactggaggtcaggagttcgaaaccagcctggccaacatggtgaaaccccatctctactaaaaatacagaaattagccggtcatggtggtggacacctgtaatcccagctactcaggtggctaaggcaggagaatcacttcagcccgggaggtggaggttgcagtgagccaagatcataccacggcactccagcctgggtgacagtgagactgtggctcaaaaaaaaaaaaaaaaaaaggaaaatgaaactagaagagatttctaaaagtctgagatatatttgctagatttctaaagaatgtgttctaaaacagcagaagattttcaagaaccggtttccaaagacagtcttctaattcctcattagtaataagtaaaatgtttattgttgtagctctggtatataatccattcctcttaaaatataagacctctggcatgaatatttcatatctataaaatgacagatcccaccaggaaggaagctgttgctttctttgaggtgatttttttcctttgctccctgttgctgaaaccatacagcttcataaataattttgcttgctgaaggaagaaaaagtgtttttcataaacccattatccaggactgtttatagctgttggaaggactaggtcttccctagcccccccagtgtgcaagggcagtgaagacttgattgtacaaaatacgttttgtaaatgttgtgctgttaacactgcaaataaacttggtagcaaacacttcc

SEQ ID NO: 578 - DNA, 5693 bp, Homo sapiens
  source 1..5693: mol_type = genomic DNA
cctctgctctgggtaaaggtagtagagtcccgggaaagggacagggggcccaagtgatgctctggggtactggcgtgggagagtggatttccgaagctgacagatggttcattggaacagaaagaaatggatttatctgctcttcgcgttgaagaagtacaaaatgtcattaatgctatgcagaaaatcttagagtgtcccatctgtctggagttgatcaaggaacctgtctccacaaagtgtgaccacatattttgcaaattttgcatgctgaaacttctcaaccagaagaaagggccttcacagtgtcctttatgagcctacaagaaagtacgagatttagtcaacttgttgaagagctattgaaaatcatttgtgcttttcagcttgacacaggtttggagtatgcaaacagctataattttgcaaaaaaggaaaataactctcctgaacatctaaaagatgaagtttctatcatccaaagtatgggctacagaaaccgtgccaaaagacttctacagagtgaacccgaaaatccttccttggaaaccagtctcagtgtccaactctctaaccttggaactgtgagaactctgaggacaaagcagcggatacaacctcaaaagacgtctgtctacattgaattgggatctgattcttctgaagataccgttaataaggcaacttattgcagtgtgggagatcaagaattgttacaaatcacccctcaaggaaccagggatgaaatcagtttggattctgcaaaaaaggctgcttgtgaattttctgagacggatgtaacaaatactgaacatcatcaacccagtaataatgatttgaacaccactgagaagcgtgcagctgagaggcatccagaaaagtatcagggtagttctgtttcaaacttgcatgtggagccatgtggcacaaatactcatgccagctcattacagcatgagaacagcagtttattactcactaaagacagaatgaatgtagaaaaggctgaattctgtaataaaagcaaacagcctggcttagcaaggagccaacataacagatgggctggaagtaaggaaacatgtaatgataggcggactcccagcacagaaaaaaaggtagatctgaatgctgatcccctgtgtgagagaaaagaatggaataagcagaaactgccatgctcagagaatcctagagatactgaagatgttccttggataacactaaatagcagcattcagaaagttaatgagtggttttccagaagtgatgaactgttaggttctgatgactcacatgatggggagtctgaatcaaatgccaaagtagctgatgtattggacgttctaaatgaggtagatgaatattctggttcttcagagaaaatagacttactggccagtgatcctcatgaggctttaatatgtaaaagtgaaagagttcactccaaatcagtagagagtaatattgaagacaaaatatttgggaaaacctatcggaagaaggcaagcctccccaacttaagccatgtaactgaaaatctaattataggagcatttgttactgagccacagataatacaagagcgtcccctcacaaataaattaaagcgtaaaaggagacctacatcaggccttcatcctgaggattttatcaagaaagcagatttggcagttcaaaagactcctgaaatgataaatcagggaactaaccaaacggagcagaatggtcaagtgatgaatattactaatagtggtcatgagaataaaacaaaaggtgattctattcagaatgagaaaaatcctaacccaatagaatcactcgaaaaagaatctgctttcaaaacgaaagctgaacctataagcagcagtataagcaatatggaactcgaattaaatatccacaattcaaaagcacctaaaaagaataggctgaggaggaagtcttctaccaggcatattcatgcgcttgaactagtagtcagtagaaatctaagcccacctaattgtactgaattgcaaattgatagttgttctagcagtgaagagataaagaaaaaaaagtacaaccaaatgccagtcaggcacagcagaaacctacaactcatggaaggtaaagaacctgcaactggagccaagaagagtaacaagccaaatgaacagacaagtaaaagacatgacagcgatactttcccagagctgaagttaacaaatgcacctggttcttttactaagtgttcaaataccagtgaacttaaagaatttgtcaatcctagccttccaagagaagaaaaagaagagaaactagaaacagttaaagtgtctaataatgctgaagaccccaaagatctcatgttaagtggagaaagggttttgcaaactgaaagatctgtagagagtagcagtatttcattggtacctggtactgattatggcactcaggaaagtatctcgttactggaagttagcactctagggaaggcaaaaacagaaccaaataaatgtgtgagtcagtgtgcagcatttgaaaaccccaagggactaattcatggttgttccaaagataatagaaatgacacagaaggctttaagtatccattgggacatgaagttaaccacagtcgggaaacaagcatagaaatggaagaaagtgaacttgatgctcagtatttgcagaatacattcaaggtttcaaagcgccagtcatttgctccgttttcaaatccaggaaatgcagaagaggaatgtgcaacattctctgcccactctgggtccttaaagaaacaaagtccaaaagtcacttttgaatgtgaacaaaaggaagaaaatcaaggaaagaatgagtctaatatcaagcctgtacagacagttaatatcactgcaggctttcctgtggttggtcagaaagataagccagttgataatgccaaatgtagtatcaaaggaggctctaggttttgtctatcatctcagttcagaggcaacgaaactggactcattactccaaataaacatggacttttacaaaacccatatcgtataccaccactttttcccatcaagtcatttgttaaaactaaatgtaagaaaaatctgctagaggaaaactttgaggaacattcaatgtcacctgaaagagaaatgggaaatgagaacattccaagtacagtgagcacaattagccgtaataacattagagaaaatgtttttaaagaagccagctcaagcaatattaatgaagtaggttccagtactaatgaagtgggctccagtattaatgaaataggttccagtgatgaaaacattcaagcagaactaggtagaaacagagggccaaaattgaatgctatgcttagattaggggttttgcaacctgaggtctataaacaaagtcttcctggaagtaattgtaagcatcctgaaataaaaaagcaagaatatgaagaagtagttcagactgttaatacagatttctctccatatctgatttcagataacttagaacagcctatgggaagtagtcatgcatctcaggtttgttctgagacacctgatgacctgttagatgatggtgaaataaaggaagatactagttttgctgaaaatgacattaaggaaagttctgctgtttttagcaaaagcgtccagaaaggagagcttagcaggagtcctagccctttcacccatacacatttggctcagggttaccgaagaggggccaagaaattagagtcctcagaagagaacttatctagtgaggatgaagagcttccctgcttccaacacttgttatttggtaaagtaaacaatataccttctcagtctactaggcatagcaccgttgctaccgagtgtctgtctaagaacacagaggagaatttattatcattgaagaatagcttaaatgactgcagtaaccaggtaatattggcaaaggcatctcaggaacatcaccttagtgaggaaacaaaatgttctgctagcttgttttcttcacagtgcagtgaattggaagacttgactgcaaatacaaacacccaggatcctttcttgattggttcttccaaacaaatgaggcatcagtctgaaagccagggagttggtctgagtgacaaggaattggtttcagatgatgaagaaagaggaacgggcttggaagaaaataatcaagaagagcaaagcatggattcaaacttaggtgaagcagcatctgggtgtgagagtgaaacaagcgtctctgaagactgctcagggctatcctctcagagtgacattttaaccactcagcagagggataccatgcaacataacctgataaagctccagcaggaaatggctgaactagaagctgtgttagaacagcatgggagccagccttctaacagctacccttccatcataagtgactcttctgcccttgaggacctgcgaaatccagaacaaagcacatcagaaaaagcagtattaacttcacagaaaagtagtgaataccctataagccagaatccagaaggcctttctgctgacaagtttgaggtgtctgcagatagttctaccagtaaaaataaagaaccaggagtggaaaggtcatccccttctaaatgcccatcattagatgataggtggtacatgcacagttgctctgggagtcttcagaatagaaactacccatctcaagaggagctcattaaggttgttgatgtggaggagcaacagctggaagagtctgggccacacgatttgacggaaacatcttacttgccaaggcaagatctagagggaaccccttacctggaatctggaatcagcctcttctctgatgaccctgaatctgatccttctgaagacagagccccagagtcagctcgtgttggcaacataccatcttcaacctctgcattgaaagttccccaattgaaagttgcagaatctgcccagagtccagctgctgctcatactactgatactgctgggtataatgcaatggaagaaagtgtgagcagggagaagccagaattgacagcttcaacagaaagggtcaacaaaagaatgtccatggtggtgtctggcctgaccccagaagaatttatgctcgtgtacaagtttgccagaaaacaccacatcactttaactaatctaattactgaagagactactcatgttgttatgaaaacagatgctgagtttgtgtgtgaacggacactgaaatattttctaggaattgcgggaggaaaatgggtagttagctatttctgggtgacccagtctattaaagaaagaaaaatgctgaatgagcatgattttgaagtcagaggagatgtggtcaatggaagaaaccaccaaggtccaaagcgagcaagagaatcccaggacagaaagatcttcagggggctagaaatctgttgctatgggcccttcaccaacatgcccacagatcaactggaatggatggtacagctgtgtggtgcttctgtggtgaaggagctttcatcattcacccttggcacaggtgtccacccaattgtggttgtgcagccagatgcctggacagaggacaatggcttccatgcaattgggcagatgtgtgaggcacctgtggtgacccgagagtgggtgttggacagtgtagcactctaccagtgccaggagctggacacctacctgataccccagatcccccacagccactactga

SEQ ID NO: 579 - DNA, 582 bp, Homo sapiens
  source 1..582: mol_type = genomic DNA
gagctcgctgagacttcctggacgggggacaggctgtggggtttctcagataactgggcccctgcgctcaggaggccttcaccctctgctctggttcattggaacagaaagaaatggatttatctgctcttcgcgttgaagaagtacaaaatgtcattaatgctatgcagaaaatcttagagtgtcccatctgtctggagttgatcaaggaacctgtctccacaaagtgtgaccacatattttgcaaattttgcatgctgaaacttctcaaccagaagaaagggccttcacagtgtcctttatgagcctacaagaaagtacgagatttagtcaacttgttgaagagctattgaaaatcatttgtgcttttcagcttgacacaggtttggagtatgcaaacagctataattttgcaaaaaaggaaaataactctcctgaacatctaaaagatgaagtttctatcatccaaagtatgggctacagaaaccgtgccaaaagacttctacagagtgaacccgaaaatccttccttgcaggaaaccagtctcagtgtccaactctctaaccttggaactgtgagaac

SEQ ID NO: 580 - DNA, 3273 bp, Homo sapiens
  source 1..3273: mol_type = genomic DNA
cttagcggtagccccttggtttccgtggcaacggaaaagcgcgggaattacagataaattaaaactgcgactgcgcggcgtgagctcgctgagacttcctggacgggggacaggctgtggggtttctcagataactgggcccctgcgctcaggaggccttcaccctctgctctggttcattggaacagaaagaaatggatttatctgctcttcgcgttgaagaagtacaaaatgtcattaatgctatgcagaaaatcttagagtgtcccatctgtctggagttgatcaaggaacctgtctccacaaagtgtgaccacatattttgcaaattttgcatgctgaaacttctcaaccagaagaaagggccttcacagtgtcctttatgtaagaatgatataaccaaaaggagcctacaagaaagtacgagatttagtcaacttgttgaagagctattgaaaatcatttgtgcttttcagcttgacacaggtttggagtatgcaaacagctataattttgcaaaaaaggaaaataactctcctgaacatctaaaagatgaagtttctatcatccaaagtatgggctacagaaaccgtgccaaaagacttctacagagtgaacccgaaaatccttccttgcaggaaaccagtctcagtgtccaactctctaaccttggaactgtgagaactctgaggacaaagcagcggatacaacctcaaaagacgtctgtctacattgaattgggatctgattcttctgaagataccgttaataaggcaacttattgcagtgtgggagatcaagaattgttacaaatcacccctcaaggaaccagggatgaaatcagtttggattctgcaaaaaaggctgcttgtgaattttctgagacggatgtaacaaatactgaacatcatcaacccagtaataatgatttgaacaccactgagaagcgtgcagctgagaggcatccagaaaagtatcagggtgaagcagcatctgggtgtgagagtgaaacaagcgtctctgaagactgctcagggctatcctctcagagtgacattttaaccactcagcagagggataccatgcaacataacctgataaagctccagcaggaaatggctgaactagaagctgtgttagaacagcatgggagccagccttctaacagctacccttccatcataagtgactcttctgcccttgaggacctgcgaaatccagaacaaagcacatcagaaaaagtattaacttcacagaaaagtagtgaataccctataagccagaatccagaaggcctttctgctgacaagtttgaggtgtctgcagatagttctaccagtaaaaataaagaaccaggagtggaaaggtcatccccttctaaatgcccatcattagatgataggtggtacatgcacagttgctctgggagtcttcagaatagaaactacccatctcaagaggagctcattaaggttgttgatgtggaggagcaacagctggaagagtctgggccacacgatttgacggaaacatcttacttgccaaggcaagatctagagggaaccccttacctggaatctggaatcagcctcttctctgatgaccctgaatctgatccttctgaagacagagccccagagtcagctcgtgttggcaacataccatcttcaacctctgcattgaaagttccccaattgaaagttgcagaatctgcccagagtccagctgctgctcatactactgatactgctgggtataatgcaatggaagaaagtgtgagcagggagaagccagaattgacagcttcaacagaaagggtcaacaaaagaatgtccatggtggtgtctggcctgaccccagaagaatttatgctcgtgtacaagtttgccagaaaacaccacatcactttaactaatctaattactgaagagactactcatgttgttatgaaaacagatgctgagtttgtgtgtgaacggacactgaaatattttctaggaattgcgggaggaaaatgggtagttagctatttctgggtgacccagtctattaaagaaagaaaaatgctgaatgagcatgattttgaagtcagaggagatgtggtcaatggaagaaaccaccaaggtccaaagcgagcaagagaatcccaggacagaaagatcttcagggggctagaaatctgttgctatgggcccttcaccaacatgcccacagggtgtccacccaattgtggttgtgcagccagatgcctggacagaggacaatggcttccatgcaattgggcagatgtgtgaggcacctgtggtgacccgagagtgggtgttggacagtgtagcactctaccagtgccaggagctggacacctacctgataccccagatcccccacagccactactgactgcagccagccacaggtacagagccacaggaccccaagaatgagcttacaaagtggcctttccaggccctgggagctcctctcactcttcagtccttctactgtcctggctactaaatattttatgtacatcagcctgaaaaggacttctggctatgcaagggtcccttaaagattttctgcttgaagtctcccttggaaatctgccatgagcacaaaattatggtaatttttcacctgagaagattttaaaaccatttaaacgccaccaattgagcaagatgctgattcattatttatcagccctattctttctattcaggctgttgttggcttagggctggaagcacagagtggcttggcctcaagagaatagctggtttccctaagtttacttctctaaaaccctgtgttcacaaaggcagagagtcagacccttcaatggaaggagagtgcttgggatcgattatgtgacttaaagtcagaatagtccttgggcagttctcaaatgttggagtggaacattggggaggaaattctgaggcaggtattagaaatgaaaaggaaacttgaaacctgggcatggtggctcacgcctgtaatcccagcactttgggaggccaaggtgggcagatcactggaggtcaggagttcgaaaccagcctggccaacatggtgaaaccccatctctactaaaaatacagaaattagccggtcatggtggtggacacctgtaatcccagctactcaggtggctaaggcaggagaatcacttcagcccgggaggtggaggttgcagtgagccaagatcataccacggcactccagcctgggtgacagtgagactgtggctcaaaaaaaaaaaaaaaaaaa

SEQ ID NO: 581 - DNA, 2108 bp, Homo sapiens
  source 1..2108: mol_type = genomic DNA
agataactgggcccctgcgctcaggaggccttcaccctctgctctgggtaaaggtagtagagtcccgggaaagggacagggggcccaagtgatgctctggggtactggcgtgggagagtggatttccgaagctgacagatggttcattggaacagaaagaaatggatttatctgctcttcgcgttgaagaagtacaaaatgtcattaatgctatgcagaaaatcttagagtgtcccatctgtctggagttgatcaaggaacctgtctccacaaagtgtgaccacatattttgcaaattttgcatgctgaaacttctcaaccagaagaaagggccttcacagtgtcctttatgtaagaatgatataaccaaaaggagcctacaagaaagtacgagatttagtcaacttgttgaagagctattgaaaatcatttgtgcttttcagcttgacacaggtttggagtatgcaaacagctataattttgcaaaaaaggaaaataactctcctgaacatctaaaagatgaagtttctatcatccaaagtatgggctacagaaaccgtgccaaaagacttctacagagtgaacccgaaaatccttccttgcaggaaaccagtctcagtgtccaactctctaaccttggaactgtgagaactctgaggacaaagcagcggatacaacctcaaaagacgtctgtctacattgaattgggatctgattcttctgaagataccgttaataaggcaacttattgcagtgtgggagatcaagaattgttacaaatcacccctcaaggaaccagggatgaaatcagtttggattctgcaaaaaaggctgcttgtgaattttctgagacggatgtaacaaatactgaacatcatcaacccagtaataatgatttgaacaccactgagaagcgtgcagctgagaggcatccagaaaagtatcagggtagttctgtttcaaacttgcatgtggagccatgtggcacaaatactcatgccagctcattacagcatgagaacagcagtttattactcactaaagacagaatgaatgtagaaaaggctgaattctgtaataaaagcaaacagcctggcttagcaaggagccaacataacagatgggctggaagtaaggaaacatgtaatgataggcggactcccagcacagaaaaaaaggtagatctgaatgctgatcccctgtgtgagagaaaagaatggaataagcagaaactgccatgctcagagaatcctagagatactgaagatgttccttggataacactaaatagcagcattcagaaagttaatgagtggttttccagaagtgatgaactgttaggttctgatgactcacatgatggggagtctgaatcaaatgccaaagtagctgatgtattggacgttctaaatgaggtagatgaatattctggttcttcagagaaaatagacttactggccagtgatcctcatgaggctttaatatgtaaaagtgaaagagttcactccaaatcagtagagagtaatattgaagacaaaatatttgggaaaacctatcggaagaaggcaagcctccccaacttaagccatgtaactgaaaatctaattataggagcatttgttactgagccacagataatacaagagcgtcccctcacaaataaattaaagcgtaaaaggagacctacatcaggccttcatcctgaggattttatcaagaaagcagatttggcagttcaaaagactcctgaaatgataaatcagggaactaaccaaacggagcagaatggtcaagtgatgaatattactaatagtggtcatgagaataaaacaaaaggtgattctattcagaatgagaaaaatcctaacccaatagaatcactcgaaaaagaatctgctttcaaaacgaaagctgaacctataagcagcagtataagcaatatggaactcgaattaaatatccacaattcaaaagcacctaaaaagaataggctgaggaggaagtcttctaccaggcatattcatgcgcttgaactagtagtcagtagaaatctaagcccacctaattgtactgaattgcaaattgatagttgttctagcagtgaagag

SEQ ID NO: 582 - DNA, 5939 bp, Homo sapiens
  source 1..5939: mol_type = genomic DNA
gtaccttgatttcgtattctgagaggctgctgcttagcggtagccccttggtttccgtggcaacggaaaagcgcgggaattacagataaattaaaactgcgactgcgcggcgtgagctcgctgagacttcctggacgggggacaggctgtggggtttctcagataactgggcccctgcgctcaggaggccttcaccctctgctctgggtaaagttcattggaacagaaagaaatggatttatctgctcttcgcgttgaagaagtacaaaatgtcattaatgctatgcagaaaatcttagagtgtcccatctgtctggagttgatcaaggaacctgtctccacaaagtgtgaccacatattttgcaaattttgcatgctgaaacttctcaaccagaagaaagggccttcacagtgtcctttatgtaagaatgatataaccaaaaggagcctacaagaaagtacgagatttagtcaacttgttgaagagctattgaaaatcatttgtgcttttcagcttgacacaggtttggagtatgcaaacagctataattttgcaaaaaaggaaaataactctcctgaacatctaaaagatgaagtttctatcatccaaagtatgggctacagaaaccgtgccaaaagacttctacagagtgaacccgaaaatccttccttgcaggaaaccagtctcagtgtccaactctctaaccttggaactgtgagaactctgaggacaaagcagcggatacaacctcaaaagacgtctgtctacattgaattgggatctgattcttctgaagataccgttaataaggcaacttattgcagtgtgggagatcaagaattgttacaaatcacccctcaaggaaccagggatgaaatcagtttggattctgcaaaaaaggctgcttgtgaattttctgagacggatgtaacaaatactgaacatcatcaacccagtaataatgatttgaacaccactgagaagcgtgcagctgagaggcatccagaaaagtatcagggtagttctgtttcaaacttgcatgtggagccatgtggcacaaatactcatgccagctcattacagcatgagaacagcagtttattactcactaaagacagaatgaatgtagaaaaggctgaattctgtaataaaagcaaacagcctggcttagcaaggagccaacataacagatgggctggaagtaaggaaacatgtaatgataggcggactcccagcacagaaaaaaaggtagatctgaatgctgatcccctgtgtgagagaaaagaatggaataagcagaaactgccatgctcagagaatcctagagatactgaagatgttccttggataacactaaatagcagcattcagaaagttaatgagtggttttccagaagtgatgaactgttaggttctgatgactcacatgatggggagtctgaatcaaatgccaaagtagctgatgtattggacgttctaaatgaggtagatgaatattctggttcttcagagaaaatagacttactggccagtgatcctcatgaggctttaatatgtaaaagtgaaagagttcactccaaatcagtagagagtaatattgaagacaaaatatttgggaaaacctatcggaagaaggcaagcctccccaacttaagccatgtaactgaaaatctaattataggagcatttgttactgagccacagataatacaagagcgtcccctcacaaataaattaaagcgtaaaaggagacctacatcaggccttcatcctgaggattttatcaagaaagcagatttggcagttcaaaagactcctgaaatgataaatcagggaactaaccaaacggagcagaatggtcaagtgatgaatattactaatagtggtcatgagaataaaacaaaaggtgattctattcagaatgagaaaaatcctaacccaatagaatcactcgaaaaagaatctgctttcaaaacgaaagctgaacctataagcagcagtataagcaatatggaactcgaattaaatatccacaattcaaaagcacctaaaaagaataggctgaggaggaagtcttctaccaggcatattcatgcgcttgaactagtagtcagtagaaatctaagcccacctaattgtactgaattgcaaattgatagttgttctagcagtgaagagataaagaaaaaaaagtacaaccaaatgccagtcaggcacagcagaaacctacaactcatggaaggtaaagaacctgcaactggagccaagaagagtaacaagccaaatgaacagacaagtaaaagacatgacagcgatactttcccagagctgaagttaacaaatgcacctggttcttttactaagtgttcaaataccagtgaacttaaagaatttgtcaatcctagccttccaagagaagaaaaagaagagaaactagaaacagttaaagtgtctaataatgctgaagaccccaaagatctcatgttaagtggagaaagggttttgcaaactgaaagatctgtagagagtagcagtatttcattggtacctggtactgattatggcactcaggaaagtatctcgttactggaagttagcactctagggaaggcaaaaacagaaccaaataaatgtgtgagtcagtgtgcagcatttgaaaaccccaagggactaattcatggttgttccaaagataatagaaatgacacagaaggctttaagtatccattgggacatgaagttaaccacagtcgggaaacaagcatagaaatggaagaaagtgaacttgatgctcagtatttgcagaatacattcaaggtttcaaagcgccagtcatttgctccgttttcaaatccaggaaatgcagaagaggaatgtgcaacattctctgcccactctgggtccttaaagaaacaaagtccaaaagtcacttttgaatgtgaacaaaaggaagaaaatcaaggaaagaatgagtctaatatcaagcctgtacagacagttaatatcactgcaggctttcctgtggttggtcagaaagataagccagttgataatgccaaatgtagtatcaaaggaggctctaggttttgtctatcatctcagttcagaggcaacgaaactggactcattactccaaataaacatggacttttacaaaacccatatcgtataccaccactttttcccatcaagtcatttgttaaaactaaatgtaagaaaaatctgctagaggaaaactttgaggaacattcaatgtcacctgaaagagaaatgggaaatgagaacattccaagtacagtgagcacaattagccgtaataacattagagaaaatgtttttaaagaagccagctcaagcaatattaatgaagtaggttccagtactaatgaagtgggctccagtattaatgaaataggttccagtgatgaaaacattcaagcagaactaggtagaaacagagggccaaaattgaatgctatgcttagattaggggttttgcaacctgaggtctataaacaaagtcttcctggaagtaattgtaagcatcctgaaataaaaaagcaagaatatgaagaagtagttcagactgttaatacagatttctctccatatctgatttcagataacttagaacagcctatgggaagtagtcatgcatctcaggtttgttctgagacacctgatgacctgttagatgatggtgaaataaaggaagatactagttttgctgaaaatgacattaaggaaagttctgctgtttttagcaaaagcgtccagaaaggagagcttagcaggagtcctagccctttcacccatacacatttggctcagggttaccgaagaggggccaagaaattagagtcctcagaagagaacttatctagtgaggatgaagagcttccctgcttccaacacttgttatttggtaaagtaaacaatataccttctcagtctactaggcatagcaccgttgctaccgagtgtctgtctaagaacacagaggagaatttattatcattgaagaatagcttaaatgactgcagtaaccaggtaatattggcaaaggcatctcaggaacatcaccttagtgaggaaacaaaatgttctgctagcttgttttcttcacagtgcagtgaattggaagacttgactgcaaatacaaacacccaggatcctttcttgattggttcttccaaacaaatgaggcatcagtctgaaagccagggagttggtctgagtgacaaggaattggtttcagatgatgaagaaagaggaacgggcttggaagaaaataatcaagaagagcaaagcatggattcaaacttaggtgaagcagcatctgggtgtgagagtgaaacaagcgtctctgaagactgctcagggctatcctctcagagtgacattttaaccactcagcagagggataccatgcaacataacctgataaagctccagcaggaaatggctgaactagaagctgtgttagaacagcatgggagccagccttctaacagctacccttccatcataagtgactcttctgcccttgaggacctgcgaaatccagaacaaagcacatcagaaaaagattcgcatatacatggccaaaggaacaactccatgttttctaaaaggcctagagaacatatatcagcagtattaacttcacagaaaagtagtgaataccctataagccagaatccagaaggcctttctgctgacaagtttgaggtgtctgcagatagttctaccagtaaaaataaagaaccaggagtggaaaggtcatccccttctaaatgcccatcattagatgataggtggtacatgcacagttgctctgggagtcttcagaatagaaactacccatctcaagaggagctcattaaggttgttgatgtggaggagcaacagctggaagagtctgggccacacgatttgacggaaacatcttacttgccaaggcaagatctagagggaaccccttacctggaatctggaatcagcctcttctctgatgaccctgaatctgatccttctgaagacagagccccagagtcagctcgtgttggcaacataccatcttcaacctctgcattgaaagttccccaattgaaagttgcagaatctgcccagagtccagctgctgctcatactactgatactgctgggtataatgcaatggaagaaagtgtgagcagggagaagccagaattgacagcttcaacagaaagggtcaacaaaagaatgtccatggtggtgtctggcctgaccccagaagaatttatgctcgtgtacaagtttgccagaaaacaccacatcactttaactaatctaattactgaagagactactcatgttgttatgaaaacagatgctgagtttgtgtgtgaacggacactgaaatattttctaggaattgcgggaggaaaatgggtagttagctatttctgggtgacccagtctattaaagaaagaaaaatgctgaatgagcatgattttgaagtcagaggagatgtggtcaatggaagaaaccaccaaggtccaaagcgagcaagagaatcccaggacagaaagatcttcagggggctagaaatctgttgctatgggcccttcaccaacatgcccacagatcaactggaatggatggtacagctgtgtggtgcttctgtggtgaaggagctttcatcattcacccttggcacaggtgtccacccaattgtggttgtgcagccagatgcctggacagaggacaatggcttccatgcaattgggcagatgtgtgaggcacctgtggtgacccgagagtgggtgttggacagtgtagcactctaccagtgccaggagctggacacctacctgataccccagatcccccacagccactactgactgcagccagccacaggtacagagccacaggaccccaagaatgagctta

SEQ ID NO: 583 - DNA, 769 bp, Homo sapiens
  source 1..769: mol_type = genomic DNA
ctggacgggggacaggctgtggggtttctcagataactgggcccctgcgctcaggaggccttcaccctctgctctgggtaaagttcattggaacagaaagaaatggatttatctgctcttcgcgttgaagaagtacaaaatgtcattaatgctatgcagaaaatcttagagtgtcccatctgtctggagttgatcaaggaacctgtctccacaaagtgtgaccacatattttgcaaattttgcatgctgaaacttctcaaccagaagaaagggccttcacagtgtcctttatgtaagaatgatataaccaaaaggagcctacaagaaagtacgagatttagtcaacttgttgaagagctattgaaaatcatttgtgcttttcagcttgacacaggtttggagtatgcaaacagctataattttgcaaaaaaggaaaataactctcctgaacatctaaaagatgaagtttctatcatccaaagtatgggctacagaaaccgtgccaaaagacttctacagagtgaacccgaaaatccttccttggaaaccagtctcagtgtccaactctctaaccttggaactgtgagaactctgaggacaaagcagcggatacaacctcaaaagacgtctgtctacattgaattgggatctgattcttctgaagataccgttaataaggcaacttattgcagtgtgggagatcaagaattgttacaaatcacccctcaaggaaccagggatgaaatcagtttggattctgcaaaaaagg

SEQ ID NO: 584 - DNA, 1980 bp, Homo sapiens
  source 1..1980: mol_type = genomic DNA
gctgagacttcctggacgggggacaggctgtggggtttctcagataactgggcccctgcgctcaggaggccttcaccctctgctctgggtaaagttcattggaacagaaagaaatggatttatctgctcttcgcgttgaagaagtacaaaatgtcattaatgctatgcagaaaatcttagagtgtcccatctgtctggagttgatcaaggaacctgtctccacaaagtgtgaccacatattttgcaagagcctacaagaaagtacgagatttagtcaacttgttgaagagctattgaaaatcatttgtgcttttcagcttgacacaggtttggagtatgcaaacagctataattttgcaaaaaaggaaaataactctcctgaacatctaaaagatgaagtttctatcatccaaagtatgggctacagaaaccgtgccaaaagacttctacagagtgaacccgaaaatccttccttgcaggaaaccagtctcagtgtccaactctctaaccttggaactgtgagaactctgaggacaaagcagcggatacaacctcaaaagacgtctgtctacattgaattgggatctgattcttctgaagataccgttaataaggcaacttattgcagtgtgggagatcaagaattgttacaaatcacccctcaaggaaccagggatgaaatcagtttggattctgcaaaaaaggctgcttgtgaattttctgagacggatgtaacaaatactgaacatcatcaacccagtaataatgatttgaacaccactgagaagcgtgcagctgagaggcatccagaaaagtatcagggtagttctgtttcaaacttgcatgtggagccatgtggcacaaatactcatgccagctcattacagcatgagaacagcagtttattactcactaaagacagaatgaatgtagaaaaggctgaattctgtaataaaagcaaacagcctggcttagcaaggagccaacataacagatgggctggaagtaaggaaacatgtaatgataggcggactcccagcacagaaaaaaaggtagatctgaatgctgatcccctgtgtgagagaaaagaatggaataagcagaaactgccatgctcagagaatcctagagatactgaagatgttccttggataacactaaatagcagcattcagaaagttaatgagtggttttccagaagtgatgaactgttaggttctgatgactcacatgatggggagtctgaatcaaatgccaaagtagctgatgtattggacgttctaaatgaggtagatgaatattctggttcttcagagaaaatagacttactggccagtgatcctcatgaggctttaatatgtaaaagtgaaagagttcactccaaatcagtagagagtaatattgaagacaaaatatttgggaaaacctatcggaagaaggcaagcctccccaacttaagccatgtaactgaaaatctaattataggagcatttgttactgagccacagataatacaagagcgtcccctcacaaataaattaaagcgtaaaaggagacctacatcaggccttcatcctgaggattttatcaagaaagcagatttggcagttcaaaagactcctgaaatgataaatcagggaactaaccaaacggagcagaatggtcaagtgatgaatattactaatagtggtcatgagaataaaacaaaaggtgattctattcagaatgagaaaaatcctaacccaatagaatcactcgaaaaagaatctgctttcaaaacgaaagctgaacctataagcagcagtataagcaatatggaactcgaattaaatatccacaattcaaaagcacctaaaaagaataggctgaggaggaagtcttctaccaggcatattcatgcgcttgaactagtagtcagtagaaatctaagcccacctaattgtactgaattgcaaattgatagttgttctagcagtgaag

SEQ ID NO: 585 - DNA, 1972 bp, Homo sapiens
  source 1..1972: mol_type = genomic DNA
gacttcctggacgggggacaggctgtggggtttctcagataactgggcccctgcgctcaggaggccttcaccctctgctctggttcattggaacagaaagaaatggatttatctgctcttcgcgttgaagaagtacaaaatgtcattaatgctatgcagaaaatcttagagtgtcccatctgtctggagttgatcaaggaacctgtctccacaaagtgtgaccacatattttgcaaattttgcatgctgaaacttctcaaccagaagaaagggccttcacagtgtcctttatgtaagaatgatataaccaaaaggagcctacaagaaagtacgagatttagtcaacttgttgaagagctattgaaaatcatttgtgcttttcagcttgacacaggtttggagtatgcaaacagctataattttgcaaaaaaggaaaataactctcctgaacatctaaaagatgaagtttctatcatccaaagtatgggctacagaaaccgtgccaaaagacttctacagagtgaacccgaaaatccttccttggaaaccagtctcagtgtccaactctctaaccttggaactgtgagaactctgaggacaaagcagcggatacaacctcaaaagacgtctgtctacattgaattgggatctgattcttctgaagataccgttaataaggcaacttattgcagtgtgggagatcaagaattgttacaaatcacccctcaaggaaccagggatgaaatcagtttggattctgcaaaaaaggctgcttgtgaattttctgagacggatgtaacaaatactgaacatcatcaacccagtaataatgatttgaacaccactgagaagcgtgcagctgagaggcatccagaaaagtatcagggtgaagcagcatctgggtgtgagagtgaaacaagcgtctctgaagactgctcagggctatcctctcagagtgacattttaaccactcagcagagggataccatgcaacataacctgataaagctccagcaggaaatggctgaactagaagctgtgttagaacagcatgggagccagccttctaacagctacccttccatcataagtgactcttctgcccttgaggacctgcgaaatccagaacaaagcacatcagaaaaagcagtattaacttcacagaaaagtagtgaataccctataagccagaatccagaaggcctttctgctgacaagtttgaggtgtctgcagatagttctaccagtaaaaataaagaaccaggagtggaaaggtcatccccttctaaatgcccatcattagatgataggtggtacatgcacagttgctctgggagtcttcagaatagaaactacccatctcaagaggagctcattaaggttgttgatgtggaggagcaacagctggaagagtctgggccacacgatttgacggaaacatcttacttgccaaggcaagatctagagggaaccccttacctggaatctggaatcagcctcttctctgatgaccctgaatctgatccttctgaagacagagccccagagtcagctcgtgttggcaacataccatcttcaacctctgcattgaaagttccccaattgaaagttgcagaatctgcccagagtccagctgctgctcatactactgatactgctgggtataatgcaatggaagaaagtgtgagcagggagaagccagaattgacagcttcaacagaaagggtcaacaaaagaatgtccatggtggtgtctggcctgaccccagaagaatttatgctcgtgtacaagtttgccagaaaacaccacatcactttaactaatctaattactgaagagactactcatgttgttatgaaaacagatgctgagtttgtgtgtgaacggacactgaaatattttctaggaattgcgggaggaaaatgggtagttagctatttctgggtgacccagtctattaaagaaagaaaaa

SEQ ID NO: 586 - DNA, 1495 bp, Homo sapiens
  source 1..1495: mol_type = genomic DNA
gagctattgaaaatcatttgtgcttttcagcttgacacaggtttggagtatgcaaacagctataattttgcaaaaaaggaaaataactctcctgaacatctaaaagatgaagtttctatcatccaaagtatgggctacagaaaccgtgccaaaagacttctacagagtgaacccgaaaatccttccttggaaaccagtctcagtgtccaactctctaaccttggaactgtgagaactctgaggacaaagcagcggatacaacctcaaaagacgtctgtctacattgaattggctgcttgtgaattttctgagacggatgtaacaaatactgaacatcatcaacccagtaataatgatttgaacaccactgagaagcgtgcagctgagaggcatccagaaaagtatcagggtgaagcagcatctgggtgtgagagtgaaacaagcgtctctgaagactgctcagggctatcctctcagagtgacattttaaccactcagcagagggataccatgcaacataacctgataaagctccagcaggaaatggctgaactagaagctgtgttagaacagcatgggagccagccttctaacagctacccttccatcataagtgactcttctgcccttgaggacctgcgaaatccagaacaaagcacatcagaaaaagcagtattaacttcacagaaaagtagtgaataccctataagccagaatccagaaggcctttctgctgacaagtttgaggtgtctgcagatagttctaccagtaaaaataaagaaccaggagtggaaaggtcatccccttctaaatgcccatcattagatgataggtggtacatgcacagttgctctgggagtcttcagaatagaaactacccatctcaagaggagctcattaaggttgttgatgtggaggagcaacagctggaagagtctgggccacacgatttgacggaaacatcttacttgccaaggcaagatctagagggaaccccttacctggaatctggaatcagcctcttctctgatgaccctgaatctgatccttctgaagacagagccccagagtcagctcgtgttggcaacataccatcttcaacctctgcattgaaagttccccaattgaaagttgcagaatctgcccagagtccagctgctgctcatactactgatactgctgggtataatgcaatggaagaaagtgtgagcagggagaagccagaattgacagcttcaacagaaagggtcaacaaaagaatgtccatggtggtgtctggcctgaccccagaagaatttatgctcgtgtacaagtttgccagaaaacaccacatcactttaactaatctaattactgaagagactactcatgttgttatgaaaacagatgctgagtttgtgtgtgaacggacactgaaatattttctaggaattgcgggaggaaaatgggtagttagctatttctgggtgacccagtctattaaagaaagaaaaa

SEQ ID NO: 587 - DNA, 455 bp, Homo sapiens
  source 1..455: mol_type = genomic DNA
ataactgggcccctgcgctcaggaggccttcaccctctgctctgggtaaaggtagtagagtcccgggaaagggacagggggcccaagtgatgctctggggtactggcgtgggagagtggatttccgaagctgacagatggttcattggaacagaaagaaatggatttatctgctcttcgcgttgaagaagtacaaaatgtcattaatgctatgcagaaaatcttagagtgtcccatctgtctggagttgatcaaggaacctgtctccacaaagtgtgaccacatattttgcaagagcctacaagaaagtacgagatttagtcaacttgttgaagagctattgaaaatcatttgtgcttttcagcttgacacaggtttggagtatgcaaacagctataattttgcaaaaaaggaaaataactctcctgaacatctaaaagatgaagtttctatcat

SEQ ID NO: 588 - DNA, 2379 bp, Homo sapiens
  source 1..2379: mol_type = genomic DNA
ttcctggacgggggacaggctgtggggtttctcagataactgggcccctgcgctcaggaggccttcaccctctgctctggttcattggaacagaaagaaatggatttatctgctcttcgcgttgaagaagtacaaaatgtcattaatgctatgcagaaaatcttagagtgtcccatctgtctggagttgatcaaggaacctgtctccacaaagtgtgaccacatattttgcaaattttgcatgctgaaacttctcaaccagaagaaagggccttcacagtgtcctttatgtaagaatgatataaccaaaaggagcctacaagaaagtacgagatttagtcaacttgttgaagagctattgaaaatcatttgtgcttttcagcttgacacaggtttggagtatgcaaacagctataattttgcaaaaaaggaaaataactctcctgaacatctaaaagatgaagtttctatcatccaaagtatgggctacagaaaccgtgccaaaagacttctacagagtgaacccgaaaatccttccttgcaggaaaccagtctcagtgtccaactctctaaccttggaactgtgagaactctgaggacaaagcagcggatacaacctcaaaagacgtctgtctacattgaattgggatctgattcttctgaagataccgttaataaggcaacttattgcagtgtgggagatcaagaattgttacaaatcacccctcaaggaaccagggatgaaatcagtttggattctgcaaaaaaggctgcttgtgaattttctgagacggatgtaacaaatactgaacatcatcaacccagtaataatgatttgaacaccactgagaagcgtgcagctgagaggcatccagaaaagtatcagggtgaagcagcatctgggtgtgagagtgaaacaagcgtctctgaagactgctcagggctatcctctcagagtgacattttaaccactcagcagagggataccatgcaacataacctgataaagctccagcaggaaatggctgaactagaagctgtgttagaacagcatgggagccagccttctaacagctacccttccatcataagtgactcttctgcccttgaggacctgcgaaatccagaacaaagcacatcagaaaaagtattaacttcacagaaaagtagtgaataccctataagccagaatccagaaggcctttctgctgacaagtttgaggtgtctgcagatagttctaccagtaaaaataaagaaccaggagtggaaaggtcatccccttctaaatgcccatcattagatgataggtggtacatgcacagttgctctgggagtcttcagaatagaaactacccatctcaagaggagctcattaaggttgttgatgtggaggagcaacagctggaagagtctgggccacacgatttgacggaaacatcttacttgccaaggcaagatctagagggaaccccttacctggaatctggaatcagcctcttctctgatgaccctgaatctgatccttctgaagacagagccccagagtcagctcgtgttggcaacataccatcttcaacctctgcattgaaagttccccaattgaaagttgcagaatctgcccagagtccagctgctgctcatactactgatactgctgggtataatgcaatggaagaaagtgtgagcagggagaagccagaattgacagcttcaacagaaagggtcaacaaaagaatgtccatggtggtgtctggcctgaccccagaagaatttatgctcgtgtacaagtttgccagaaaacaccacatcactttaactaatctaattactgaagagactactcatgttgttatgaaaacagatgctgagtttgtgtgtgaacggacactgaaatattttctaggaattgcgggaggaaaatgggtagttagctatttctgggtgacccagtctattaaagaaagaaaaatgctgaatgagcatgattttgaagtcagaggagatgtggtcaatggaagaaaccaccaaggtccaaagcgagcaagagaatcccaggacagaaagatcttcagggggctagaaatctgttgctatgggcccttcaccaacatgcccacagatcaactggaatggatggtacagctgtgtggtgcttctgtggtgaaggagctttcatcattcacccttggcacaggtgtccacccaattgtggttgtgcagccagatgcctggacagaggacaatggcttccatgcaattgggcagatgtgtgaggcacctgtggtgacccgagagtgggtgttggacagtgtagcactctaccagtgccaggagctggacacctacctgataccccagatcccccacagccactactga

SEQ ID NO: 589 - DNA, 1584 bp, Homo sapiens
  source 1..1584: mol_type = genomic DNA
ggaggccttcaccctctgctctgggtaaagttcattggaacagaaagaaatggatttatctgctcttcgcgttgaagaagtacaaaatgtcattaatgctatgcagaaaatcttagagtgtcccatctgtctggagttgatcaaggaacctgtctccacaaagtgtgaccacatattttgcaaggtcttactctgttgtcccagctggagtacagtggtgcgatcatgaggcttactgttgccttgacctcctaggctcaagcgatcctatcacctcagtctcccaagtagctgggactattttgcatgctgaaacttctcaaccagaagaaagggccttcacagtgtcctttatgtaagaatgatataaccaaaaggagcctacaagaaagtacgagatttagtcaacttgttgaagagctattgaaaatcatttgtgcttttcagcttgacacaggtttggagtatgcaaacagctataattttgcaaaaaaggaaaataactctcctgaacatctaaaagatgaagtttctatcatccaaagtatgggctacagaaaccgtgccaaaagacttctacagagtgaacccgaaaatccttccttgcaggaaaccagtctcagtgtccaactctctaaccttggaactgtgagaactctgaggacaaagcagcggatacaacctcaaaagacgtctgtctacattgaattgggatctgattcttctgaagataccgttaataaggcaacttattgcagtgtgggagatcaagaattgttacaaatcacccctcaaggaaccagggatgaaatcagtttggattctgcaaaaaaggctgcttgtgaattttctgagacggatgtaacaaatactgaacatcatcaacccagtaataatgatttgaacaccactgagaagcgtgcagctgagaggcatccagaaaagtatcagggtagttctgtttcaaacttgcatgtggagccatgtggcacaaatactcatgccagctcattacagcatgagaacagcagtttattactcactaaagacagaatgaatgtagaaaaggctgaattctgtaataaaagcaaacagcctggcttagcaaggagccaacataacagatgggctggaagtaaggaaacatgtaatgataggcggactcccagcacagaaaaaaaggtagatctgaatgctgatcccctgtgtgagagaaaagaatggaataagcagaaactgccatgctcagagaatcctagagatactgaagatgttccttggataacactaaatagcagcattcagaaagttaatgagtggttttccagaagtgatgaactgttaggttctgatgactcacatgatggggagtctgaatcaaatgccaaagtagctgatgtattggacgttctaaatgaggtagatgaatattctggttcttcagagaaaatagacttactggccagtgatcctcatgaggctttaatatgtaaaagtgaaagagttcactccaaatcagtagagagtaatattgaagacaaaatatttgggaaaacctatcggaagaaggcaagcctccccaac

SEQ ID NO: 590 - DNA, 5732 bp, Homo sapiens
  source 1..5732: mol_type = genomic DNA
acagataaattaaaactgcgactgcgcggcgtgagctcgctgagacttcctggacgggggacaggctgtggggtttctcagataactgggcccctgcgctcaggaggccttcaccctctgctctggttcattggaacagaaagaaatggatttatctgctcttcgcgttgaagaagtacaaaatgtcattaatgctatgcagaaaatcttagagtgtcccatctgattttgcatgctgaaacttctcaaccagaagaaagggccttcacagtgtcctttatgtaagaatgatataaccaaaaggagcctacaagaaagtacgagatttagtcaacttgttgaagagctattgaaaatcatttgtgcttttcagcttgacacaggtttggagtatgcaaacagctataattttgcaaaaaaggaaaataactctcctgaacatctaaaagatgaagtttctatcatccaaagtatgggctacagaaaccgtgccaaaagacttctacagagtgaacccgaaaatccttccttgcaggaaaccagtctcagtgtccaactctctaaccttggaactgtgagaactctgaggacaaagcagcggatacaacctcaaaagacgtctgtctacattgaattgggatctgattcttctgaagataccgttaataaggcaacttattgcagtgtgggagatcaagaattgttacaaatcacccctcaaggaaccagggatgaaatcagtttggattctgcaaaaaaggctgcttgtgaattttctgagacggatgtaacaaatactgaacatcatcaacccagtaataatgatttgaacaccactgagaagcgtgcagctgagaggcatccagaaaagtatcagggtagttctgtttcaaacttgcatgtggagccatgtggcacaaatactcatgccagctcattacagcatgagaacagcagtttattactcactaaagacagaatgaatgtagaaaaggctgaattctgtaataaaagcaaacagcctggcttagcaaggagccaacataacagatgggctggaagtaaggaaacatgtaatgataggcggactcccagcacagaaaaaaaggtagatctgaatgctgatcccctgtgtgagagaaaagaatggaataagcagaaactgccatgctcagagaatcctagagatactgaagatgttccttggataacactaaatagcagcattcagaaagttaatgagtggttttccagaagtgatgaactgttaggttctgatgactcacatgatggggagtctgaatcaaatgccaaagtagctgatgtattggacgttctaaatgaggtagatgaatattctggttcttcagagaaaatagacttactggccagtgatcctcatgaggctttaatatgtaaaagtgaaagagttcactccaaatcagtagagagtaatattgaagacaaaatatttgggaaaacctatcggaagaaggcaagcctccccaacttaagccatgtaactgaaaatctaattataggagcatttgttactgagccacagataatacaagagcgtcccctcacaaataaattaaagcgtaaaaggagacctacatcaggccttcatcctgaggattttatcaagaaagcagatttggcagttcaaaagactcctgaaatgataaatcagggaactaaccaaacggagcagaatggtcaagtgatgaatattactaatagtggtcatgagaataaaacaaaaggtgattctattcagaatgagaaaaatcctaacccaatagaatcactcgaaaaagaatctgctttcaaaacgaaagctgaacctataagcagcagtataagcaatatggaactcgaattaaatatccacaattcaaaagcacctaaaaagaataggctgaggaggaagtcttctaccaggcatattcatgcgcttgaactagtagtcagtagaaatctaagcccacctaattgtactgaattgcaaattgatagttgttctagcagtgaagagataaagaaaaaaaagtacaaccaaatgccagtcaggcacagcagaaacctacaactcatggaaggtaaagaacctgcaactggagccaagaagagtaacaagccaaatgaacagacaagtaaaagacatgacagcgatactttcccagagctgaagttaacaaatgcacctggttcttttactaagtgttcaaataccagtgaacttaaagaatttgtcaatcctagccttccaagagaagaaaaagaagagaaactagaaacagttaaagtgtctaataatgctgaagaccccaaagatctcatgttaagtggagaaagggttttgcaaactgaaagatctgtagagagtagcagtatttcattggtacctggtactgattatggcactcaggaaagtatctcgttactggaagttagcactctagggaaggcaaaaacagaaccaaataaatgtgtgagtcagtgtgcagcatttgaaaaccccaagggactaattcatggttgttccaaagataatagaaatgacacagaaggctttaagtatccattgggacatgaagttaaccacagtcgggaaacaagcatagaaatggaagaaagtgaacttgatgctcagtatttgcagaatacattcaaggtttcaaagcgccagtcatttgctccgttttcaaatccaggaaatgcagaagaggaatgtgcaacattctctgcccactctgggtccttaaagaaacaaagtccaaaagtcacttttgaatgtgaacaaaaggaagaaaatcaaggaaagaatgagtctaatatcaagcctgtacagacagttaatatcactgcaggctttcctgtggttggtcagaaagataagccagttgataatgccaaatgtagtatcaaaggaggctctaggttttgtctatcatctcagttcagaggcaacgaaactggactcattactccaaataaacatggacttttacaaaacccatatcgtataccaccactttttcccatcaagtcatttgttaaaactaaatgtaagaaaaatctgctagaggaaaactttgaggaacattcaatgtcacctgaaagagaaatgggaaatgagaacattccaagtacagtgagcacaattagccgtaataacattagagaaaatgtttttaaagaagccagctcaagcaatattaatgaagtaggttccagtactaatgaagtgggctccagtattaatgaaataggttccagtgatgaaaacattcaagcagaactaggtagaaacagagggccaaaattgaatgctatgcttagattaggggttttgcaacctgaggtctataaacaaagtcttcctggaagtaattgtaagcatcctgaaataaaaaagcaagaatatgaagaagtagttcagactgttaatacagatttctctccatatctgatttcagataacttagaacagcctatgggaagtagtcatgcatctcaggtttgttctgagacacctgatgacctgttagatgatggtgaaataaaggaagatactagttttgctgaaaatgacattaaggaaagttctgctgtttttagcaaaagcgtccagaaaggagagcttagcaggagtcctagccctttcacccatacacatttggctcagggttaccgaagaggggccaagaaattagagtcctcagaagagaacttatctagtgaggatgaagagcttccctgcttccaacacttgttatttggtaaagtaaacaatataccttctcagtctactaggcatagcaccgttgctaccgagtgtctgtctaagaacacagaggagaatttattatcattgaagaatagcttaaatgactgcagtaaccaggtaatattggcaaaggcatctcaggaacatcaccttagtgaggaaacaaaatgttctgctagcttgttttcttcacagtgcagtgaattggaagacttgactgcaaatacaaacacccaggatcctttcttgattggttcttccaaacaaatgaggcatcagtctgaaagccagggagttggtctgagtgacaaggaattggtttcagatgatgaagaaagaggaacgggcttggaagaaaataatcaagaagagcaaagcatggattcaaacttaggtgaagcagcatctgggtgtgagagtgaaacaagcgtctctgaagactgctcagggctatcctctcagagtgacattttaaccactcagcagagggataccatgcaacataacctgataaagctccagcaggaaatggctgaactagaagctgtgttagaacagcatgggagccagccttctaacagctacccttccatcataagtgactcttctgcccttgaggacctgcgaaatccagaacaaagcacatcagaaaaagcagtattaacttcacagaaaagtagtgaataccctataagccagaatccagaaggcctttctgctgacaagtttgaggtgtctgcagatagttctaccagtaaaaataaagaaccaggagtggaaaggtcatccccttctaaatgcccatcattagatgataggtggtacatgcacagttgctctgggagtcttcagaatagaaactacccatctcaagaggagctcattaaggttgttgatgtggaggagcaacagctggaagagtctgggccacacgatttgacggaaacatcttacttgccaaggcaagatctagagggaaccccttacctggaatctggaatcagcctcttctctgatgaccctgaatctgatccttctgaagacagagccccagagtcagctcgtgttggcaacataccatcttcaacctctgcattgaaagttccccaattgaaagttgcagaatctgcccagagtccagctgctgctcatactactgatactgctgggtataatgcaatggaagaaagtgtgagcagggagaagccagaattgacagcttcaacagaaagggtcaacaaaagaatgtccatggtggtgtctggcctgaccccagaagaatttatgctcgtgtacaagtttgccagaaaacaccacatcactttaactaatctaattactgaagagactactcatgttgttatgaaaacagatgctgagtttgtgtgtgaacggacactgaaatattttctaggaattgcgggaggaaaatgggtagttagctatttctgggtgacccagtctattaaagaaagaaaaatgctgaatgagcatgattttgaagtcagaggagatgtggtcaatggaagaaaccaccaaggtccaaagcgagcaagagaatcccaggacagaaagatcttcagggggctagaaatctgttgctatgggcccttcaccaacatgcccacagatcaactggaatggatggtacagctgtgtggtgcttctgtggtgaaggagctttcatcattcacccttggcacaggtgtccacccaattgtggttgtgcagccagatgcctggacagaggacaatggcttccatgcaattgggcagatgtgtgaggcacctgtggtgacccgagagtgggtgttggacagtgtagcactctaccagtgccaggagctggacacctacctgataccccagatcccccacagccactactgactgcagccagccacaggtacagagccacaggaccccaagaatgagctta

SEQ ID NO: 591 - DNA, 1948 bp, Homo sapiens
  source 1..1948: mol_type = genomic DNA
acagataaattaaaactgcgactgcgcggcgtgagctcgctgagacttcctggacgggggacaggctgtggggtttctcagataactgggcccctgcgctcaggaggccttcaccctctgctctggttcattggaacagaaagaaatggatttatctgctcttcgcgttgaagaagtacaaaatgtcattaatgctatgcagaaaatcttagagtgtcccatctgattttgcatgctgaaacttctcaaccagaagaaagggccttcacagtgtcctttatgtaagaatgatataaccaaaaggagcctacaagaaagtacgagatttagtcaacttgttgaagagctattgaaaatcatttgtgcttttcagcttgacacaggtttggagtatgcaaacagctataattttgcaaaaaaggaaaataactctcctgaacatctaaaagatgaagtttctatcatccaaagtatgggctacagaaaccgtgccaaaagacttctacagagtgaacccgaaaatccttccttgcaggaaaccagtctcagtgtccaactctctaaccttggaactgtgagaactctgaggacaaagcagcggatacaacctcaaaagacgtctgtctacattgaattgggatctgattcttctgaagataccgttaataaggcaacttattgcagtgtgggagatcaagaattgttacaaatcacccctcaaggaaccagggatgaaatcagtttggattctgcaaaaaaggctgcttgtgaattttctgagacggatgtaacaaatactgaacatcatcaacccagtaataatgatttgaacaccactgagaagcgtgcagctgagaggcatccagaaaagtatcagggtgaagcagcatctgggtgtgagagtgaaacaagcgtctctgaagactgctcagggctatcctctcagagtgacattttaaccactcagcagagggataccatgcaacataacctgataaagctccagcaggaaatggctgaactagaagctgtgttagaacagcatgggagccagccttctaacagctacccttccatcataagtgactcttctgcccttgaggacctgcgaaatccagaacaaagcacatcagaaaaagcagtattaacttcacagaaaagtagtgaataccctataagccagaatccagaaggcctttctgctgacaagtttgaggtgtctgcagatagttctaccagtaaaaataaagaaccaggagtggaaaggtcatccccttctaaatgcccatcattagatgataggtggtacatgcacagttgctctgggagtcttcagaatagaaactacccatctcaagaggagctcattaaggttgttgatgtggaggagcaacagctggaagagtctgggccacacgatttgacggaaacatcttacttgccaaggcaagatctagagggaaccccttacctggaatctggaatcagcctcttctctgatgaccctgaatctgatccttctgaagacagagccccagagtcagctcgtgttggcaacataccatcttcaacctctgcattgaaagttccccaattgaaagttgcagaatctgcccagagtccagctgctgctcatactactgatactgctgggtataatgcaatggaagaaagtgtgagcagggagaagccagaattgacagcttcaacagaaagggtcaacaaaagaatgtccatggtggtgtctggcctgaccccagaagaatttatgctcgtgtacaagtttgccagaaaacaccacatcactttaactaatctaattactgaagagactactcatgttgttatgaaaacagatgctgagtttgtgtgtgaacggacactgaaatattttctaggaattgcgggaggaaaatgggtagttagctatttctgggtgacccagtct

SEQ ID NO: 592 - DNA, 1612 bp, Homo sapiens
  source 1..1612: mol_type = genomic DNA
ttagcggtagccccttggtttccgtggcaacggaaaagcgcgggaattacagataaattaaaactgcgactgcgcggcgtgagctcgctgagacttcctggacgggggacaggctgtggggtttctcagataactgggcccctgcgctcaggaggccttcaccctctgctctggttcattggaacagaaagaaatggatttatctgctcttcgcgttgaagaagtacaaaatgtcattaatgctatgcagaaaatcttagagtgtcccatctgtctggagttgatcaaggaacctgtctccacaaagtgtgaccacatattttgcaaattttgcatgctgaaacttctcaaccagaagaaagggccttcacagtgtcctttatgtaagaatgatataaccaaaaggagcctacaagaaagtacgagatttagtcaacttgttgaagagctattgaaaatcatttgtgcttttcagcttgacacaggtttggagtatgcaaacagctataattttgcaaaaaaggaaaataactctcctgaacatctaaaagatgaagtttctatcatccaaagtatgggctacagaaaccgtgccaaaagacttctacagagtgaacccgaaaatccttccttgcaggaaaccagtctcagtgtccaactctctaaccttggaactgtgagaactctgaggacaaagcagcggatacaacctcaaaagacgtctgtctacattgaattgggatctgattcttctgaagataccgttaataaggcaacttattgcagtgtgggagatcaagaattgttacaaatcacccctcaaggaaccagggatgaaatcagtttggattctgcaaaaaaggctgcttgtgaattttctgagacggatgtaacaaatactgaacatcatcaacccagtaataatgatttgaacaccactgagaagcgtgcagctgagaggcatccagaaaagtatcagggtagttctgtttcaaacttgcatgtggagccatgtggcacaaatactcatgccagctcattacagcatgagaacagcagtttattactcactaaagacagaatgaatgtagaaaaggctgaattctgtaataaaagcaaacagcctggcttagcaaggagccaacataacagatgggctggaagtaaggaaacatgtaatgataggcggactcccagcacagaaaaaaaggtagatctgaatgctgatcccctgtgtgagagaaaagaatggaataagcagaaactgccatgctcagagaatcctagagatactgaagatgttccttggataacactaaatagcagcattcagaaagttaatgagtggttttccagaagtgatgaactgttaggttctgatgactcacatgatggggagtctgaatcaaatgccaaagtagctgatgtattggacgttctaaatgaggtagatgaatattctggttcttcagagaaaatagacttactggccagtgatcctcatgaggctttaatatgtaaaagtgaaagagttcactccaaatcagtagagagtaatattgaagacaaaatatttgggaaaacctatcggaagaaggcaagcctccccaac

SEQ ID NO: 593 - DNA, 779 bp, Homo sapiens
  source 1..779: mol_type = genomic DNA
ggaggccttcaccctctgctctgggtaaagctgcttgtgaattttctgagacggatgtaacaaatactgaacatcatcaacccagtaataatgatttgaacaccactgagaagcgtgcagctgagaggcatccagaaaagtatcagggtagttctgtttcaaacttgcatgtggagccatgtggcacaaatactcatgccagctcattacagcatgagaacagcagtttattactcactaaagacagaatgaatgtagaaaaggctgaattctgtaataaaagcaaacagcctggcttagcaaggagccaacataacagatgggctggaagtaaggaaacatgtaatgataggcggactcccagcacagaaaaaaaggtagatctgaatgctgatcccctgtgtgagagaaaagaatggaataagcagaaactgccatgctcagagaatcctagagatactgaagatgttccttggataacactaaatagcagcattcagaaagttaatgagtggttttccagaagtgatgaactgttaggttctgatgactcacatgatggggagtctgaatcaaatgccaaagtagctgatgtattggacgttctaaatgaggtagatgaatattctggttcttcagagaaaatagacttactggccagtgatcctcatgaggctttaatatgtaaaagtgaaagagttcactccaaatcagtagagagtaatattgaagacaaaatatttgggaaaacctatcggaagaaggcaagcctccccaac

SEQ ID NO: 594 - DNA, 10930 bp, Homo sapiens
  source 1..10930: mol_type = genomic DNA
gggcttgtggcgcgagcttctgaaactaggcggcagaggcggagccgctgtggcactgctgcgcctctgctgcgcctcgggtgtcttttgcggcggtgggtcgccgccgggagaagcgtgaggggacagatttgtgaccggcgcggtttttgtcagcttactccggccaaaaaagaactgcacctctggagcggacttatttaccaagcattggaggaatatcgtaggtaaaaatgcctattggatccaaagagaggccaacattttttgaaatttttaagacacgctgcaacaaagcagatttaggaccaataagtcttaattggtttgaagaactttcttcagaagctccaccctataattctgaacctgcagaagaatctgaacataaaaacaacaattacgaaccaaacctatttaaaactccacaaaggaaaccatcttataatcagctggcttcaactccaataatattcaaagagcaagggctgactctgccgctgtaccaatctcctgtaaaagaattagataaattcaaattagacttaggaaggaatgttcccaatagtagacataaaagtcttcgcacagtgaaaactaaaatggatcaagcagatgatgtttcctgtccacttctaaattcttgtcttagtgaaagtcctgttgttctacaatgtacacatgtaacaccacaaagagataagtcagtggtatgtgggagtttgtttcatacaccaaagtttgtgaagggtcgtcagacaccaaaacatatttctgaaagtctaggagctgaggtggatcctgatatgtcttggtcaagttctttagctacaccacccacccttagttctactgtgctcatagtcagaaatgaagaagcatctgaaactgtatttcctcatgatactactgctaatgtgaaaagctatttttccaatcatgatgaaagtctgaagaaaaatgatagatttatcgcttctgtgacagacagtgaaaacacaaatcaaagagaagctgcaagtcatggatttggaaaaacatcagggaattcatttaaagtaaatagctgcaaagaccacattggaaagtcaatgccaaatgtcctagaagatgaagtatatgaaacagttgtagatacctctgaagaagatagtttttcattatgtttttctaaatgtagaacaaaaaatctacaaaaagtaagaactagcaagactaggaaaaaaattttccatgaagcaaacgctgatgaatgtgaaaaatctaaaaaccaagtgaaagaaaaatactcatttgtatctgaagtggaaccaaatgatactgatccattagattcaaatgtagcaaatcagaagccctttgagagtggaagtgacaaaatctccaaggaagttgtaccgtctttggcctgtgaatggtctcaactaaccctttcaggtctaaatggagcccagatggagaaaatacccctattgcatatttcttcatgtgaccaaaatatttcagaaaaagacctattagacacagagaacaaaagaaagaaagattttcttacttcagagaattctttgccacgtatttctagcctaccaaaatcagagaagccattaaatgaggaaacagtggtaaataagagagatgaagagcagcatcttgaatctcatacagactgcattcttgcagtaaagcaggcaatatctggaacttctccagtggcttcttcatttcagggtatcaaaaagtctatattcagaataagagaatcacctaaagagactttcaatgcaagtttttcaggtcatatgactgatccaaactttaaaaaagaaactgaagcctctgaaagtggactggaaatacatactgtttgctcacagaaggaggactccttatgtccaaatttaattgataatggaagctggccagccaccaccacacagaattctgtagctttgaagaatgcaggtttaatatccactttgaaaaagaaaacaaataagtttatttatgctatacatgatgaaacatcttataaaggaaaaaaaataccgaaagaccaaaaatcagaactaattaactgttcagcccagtttgaagcaaatgcttttgaagcaccacttacatttgcaaatgctgattcaggtttattgcattcttctgtgaaaagaagctgttcacagaatgattctgaagaaccaactttgtccttaactagctcttttgggacaattctgaggaaatgttctagaaatgaaacatgttctaataatacagtaatctctcaggatcttgattataaagaagcaaaatgtaataaggaaaaactacagttatttattaccccagaagctgattctctgtcatgcctgcaggaaggacagtgtgaaaatgatccaaaaagcaaaaaagtttcagatataaaagaagaggtcttggctgcagcatgtcacccagtacaacattcaaaagtggaatacagtgatactgactttcaatcccagaaaagtcttttatatgatcatgaaaatgccagcactcttattttaactcctacttccaaggatgttctgtcaaacctagtcatgatttctagaggcaaagaatcatacaaaatgtcagacaagctcaaaggtaacaattatgaatctgatgttgaattaaccaaaaatattcccatggaaaagaatcaagatgtatgtgctttaaatgaaaattataaaaacgttgagctgttgccacctgaaaaatacatgagagtagcatcaccttcaagaaaggtacaattcaaccaaaacacaaatctaagagtaatccaaaaaaatcaagaagaaactacttcaatttcaaaaataactgtcaatccagactctgaagaacttttctcagacaatgagaataattttgtcttccaagtagctaatgaaaggaataatcttgctttaggaaatactaaggaacttcatgaaacagacttgacttgtgtaaacgaacccattttcaagaactctaccatggttttatatggagacacaggtgataaacaagcaacccaagtgtcaattaaaaaagatttggtttatgttcttgcagaggagaacaaaaatagtgtaaagcagcatataaaaatgactctaggtcaagatttaaaatcggacatctccttgaatatagataaaataccagaaaaaaataatgattacatgaacaaatgggcaggactcttaggtccaatttcaaatcacagttttggaggtagcttcagaacagcttcaaataaggaaatcaagctctctgaacataacattaagaagagcaaaatgttcttcaaagatattgaagaacaatatcctactagtttagcttgtgttgaaattgtaaataccttggcattagataatcaaaagaaactgagcaagcctcagtcaattaatactgtatctgcacatttacagagtagtgtagttgtttctgattgtaaaaatagtcatataacccctcagatgttattttccaagcaggattttaattcaaaccataatttaacacctagccaaaaggcagaaattacagaactttctactatattagaagaatcaggaagtcagtttgaatttactcagtttagaaaaccaagctacatattgcagaagagtacatttgaagtgcctgaaaaccagatgactatcttaaagaccacttctgaggaatgcagagatgctgatcttcatgtcataatgaatgccccatcgattggtcaggtagacagcagcaagcaatttgaaggtacagttgaaattaaacggaagtttgctggcctgttgaaaaatgactgtaacaaaagtgcttctggttatttaacagatgaaaatgaagtggggtttaggggcttttattctgctcatggcacaaaactgaatgtttctactgaagctctgcaaaaagctgtgaaactgtttagtgatattgagaatattagtgaggaaacttctgcagaggtacatccaataagtttatcttcaagtaaatgtcatgattctgttgtttcaatgtttaagatagaaaatcataatgataaaactgtaagtgaaaaaaataataaatgccaactgatattacaaaataatattgaaatgactactggcacttttgttgaagaaattactgaaaattacaagagaaatactgaaaatgaagataacaaatatactgctgccagtagaaattctcataacttagaatttgatggcagtgattcaagtaaaaatgatactgtttgtattcataaagatgaaacggacttgctatttactgatcagcacaacatatgtcttaaattatctggccagtttatgaaggagggaaacactcagattaaagaagatttgtcagatttaacttttttggaagttgcgaaagctcaagaagcatgtcatggtaatacttcaaataaagaacagttaactgctactaaaacggagcaaaatataaaagattttgagacttctgatacattttttcagactgcaagtgggaaaaatattagtgtcgccaaagagtcatttaataaaattgtaaatttctttgatcagaaaccagaagaattgcataacttttccttaaattctgaattacattctgacataagaaagaacaaaatggacattctaagttatgaggaaacagacatagttaaacacaaaatactgaaagaaagtgtcccagttggtactggaaatcaactagtgaccttccagggacaacccgaacgtgatgaaaagatcaaagaacctactctattgggttttcatacagctagcgggaaaaaagttaaaattgcaaaggaatctttggacaaagtgaaaaacctttttgatgaaaaagagcaaggtactagtgaaatcaccagttttagccatcaatgggcaaagaccctaaagtacagagaggcctgtaaagaccttgaattagcatgtgagaccattgagatcacagctgccccaaagtgtaaagaaatgcagaattctctcaataatgataaaaaccttgtttctattgagactgtggtgccacctaagctcttaagtgataatttatgtagacaaactgaaaatctcaaaacatcaaaaagtatctttttgaaagttaaagtacatgaaaatgtagaaaaagaaacagcaaaaagtcctgcaacttgttacacaaatcagtccccttattcagtcattgaaaattcagccttagctttttacacaagttgtagtagaaaaacttctgtgagtcagacttcattacttgaagcaaaaaaatggcttagagaaggaatatttgatggtcaaccagaaagaataaatactgcagattatgtaggaaattatttgtatgaaaataattcaaacagtactatagctgaaaatgacaaaaatcatctctccgaaaaacaagatacttatttaagtaacagtagcatgtctaacagctattcctaccattctgatgaggtatataatgattcaggatatctctcaaaaaataaacttgattctggtattgagccagtattgaagaatgttgaagatcaaaaaaacactagtttttccaaagtaatatccaatgtaaaagatgcaaatgcatacccacaaactgtaaatgaagatatttgcgttgaggaacttgtgactagctcttcaccctgcaaaaataaaaatgcagccattaaattgtccatatctaatagtaataattttgaggtagggccacctgcatttaggatagccagtggtaaaatcgtttgtgtttcacatgaaacaattaaaaaagtgaaagacatatttacagacagtttcagtaaagtaattaaggaaaacaacgagaataaatcaaaaatttgccaaacgaaaattatggcaggttgttacgaggcattggatgattcagaggatattcttcataactctctagataatgatgaatgtagcacgcattcacataaggtttttgctgacattcagagtgaagaaattttacaacataaccaaaatatgtctggattggagaaagtttctaaaatatcaccttgtgatgttagtttggaaacttcagatatatgtaaatgtagtatagggaagcttcataagtcagtctcatctgcaaatacttgtgggatttttagcacagcaagtggaaaatctgtccaggtatcagatgcttcattacaaaacgcaagacaagtgttttctgaaatagaagatagtaccaagcaagtcttttccaaagtattgtttaaaagtaacgaacattcagaccagctcacaagagaagaaaatactgctatacgtactccagaacatttaatatcccaaaaaggcttttcatataatgtggtaaattcatctgctttctctggatttagtacagcaagtggaaagcaagtttccattttagaaagttccttacacaaagttaagggagtgttagaggaatttgatttaatcagaactgagcatagtcttcactattcacctacgtctagacaaaatgtatcaaaaatacttcctcgtgttgataagagaaacccagagcactgtgtaaactcagaaatggaaaaaacctgcagtaaagaatttaaattatcaaataacttaaatgttgaaggtggttcttcagaaaataatcactctattaaagtttctccatatctctctcaatttcaacaagacaaacaacagttggtattaggaaccaaagtgtcacttgttgagaacattcatgttttgggaaaagaacaggcttcacctaaaaacgtaaaaatggaaattggtaaaactgaaactttttctgatgttcctgtgaaaacaaatatagaagtttgttctacttactccaaagattcagaaaactactttgaaacagaagcagtagaaattgctaaagcttttatggaagatgatgaactgacagattctaaactgccaagtcatgccacacattctctttttacatgtcccgaaaatgaggaaatggttttgtcaaattcaagaattggaaaaagaagaggagagccccttatcttagtgggagaaccctcaatcaaaagaaacttattaaatgaatttgacaggataatagaaaatcaagaaaaatccttaaaggcttcaaaaagcactccagatggcacaataaaagatcgaagattgtttatgcatcatgtttctttagagccgattacctgtgtaccctttcgcacaactaaggaacgtcaagagatacagaatccaaattttaccgcacctggtcaagaatttctgtctaaatctcatttgtatgaacatctgactttggaaaaatcttcaagcaatttagcagtttcaggacatccattttatcaagtttctgctacaagaaatgaaaaaatgagacacttgattactacaggcagaccaaccaaagtctttgttccaccttttaaaactaaatcacattttcacagagttgaacagtgtgttaggaatattaacttggaggaaaacagacaaaagcaaaacattgatggacatggctctgatgatagtaaaaataagattaatgacaatgagattcatcagtttaacaaaaacaactccaatcaagcagtagctgtaactttcacaaagtgtgaagaagaacctttagatttaattacaagtcttcagaatgccagagatatacaggatatgcgaattaagaagaaacaaaggcaacgcgtctttccacagccaggcagtctgtatcttgcaaaaacatccactctgcctcgaatctctctgaaagcagcagtaggaggccaagttccctctgcgtgttctcataaacagctgtatacgtatggcgtttctaaacattgcataaaaattaacagcaaaaatgcagagtcttttcagtttcacactgaagattattttggtaaggaaagtttatggactggaaaaggaatacagttggctgatggtggatggctcataccctccaatgatggaaaggctggaaaagaagaattttatagggctctgtgtgacactccaggtgtggatccaaagcttatttctagaatttgggtttataatcactatagatggatcatatggaaactggcagctatggaatgtgcctttcctaaggaatttgctaatagatgcctaagcccagaaagggtgcttcttcaactaaaatacagatatgatacggaaattgatagaagcagaagatcggctataaaaaagataatggaaagggatgacacagctgcaaaaacacttgttctctgtgtttctgacataatttcattgagcgcaaatatatctgaaacttctagcaataaaactagtagtgcagatacccaaaaagtggccattattgaacttacagatgggtggtatgctgttaaggcccagttagatcctcccctcttagctgtcttaaagaatggcagactgacagttggtcagaagattattcttcatggagcagaactggtgggctctcctgatgcctgtacacctcttgaagccccagaatctcttatgttaaagatttctgctaacagtactcggcctgctcgctggtataccaaacttggattctttcctgaccctagaccttttcctctgcccttatcatcgcttttcagtgatggaggaaatgttggttgtgttgatgtaattattcaaagagcataccctatacagtggatggagaagacatcatctggattatacatatttcgcaatgaaagagaggaagaaaaggaagcagcaaaatatgtggaggcccaacaaaagagactagaagccttattcactaaaattcaggaggaatttgaagaacatgaagaaaacacaacaaaaccatatttaccatcacgtgcactaacaagacagcaagttcgtgctttgcaagatggtgcagagctttatgaagcagtgaagaatgcagcagacccagcttaccttgagggttatttcagtgaagagcagttaagagccttgaataatcacaggcaaatgttgaatgataagaaacaagctcagatccagttggaaattaggaaggccatggaatctgctgaacaaaaggaacaaggtttatcaagggatgtcacaaccgtgtggaagttgcgtattgtaagctattcaaaaaaagaaaaagattcagttatactgagtatttggcgtccatcatcagatttatattctctgttaacagaaggaaagagatacagaatttatcatcttgcaacttcaaaatctaaaagtaaatctgaaagagctaacatacagttagcagcgacaaaaaaaactcagtatcaacaactaccggtttcagatgaaattttatttcagatttaccagccacgggagccccttcacttcagcaaatttttagatccagactttcagccatcttgttctgaggtggacctaataggatttgtcgtttctgttgtgaaaaaaacaggacttgcccctttcgtctatttgtcagacgaatgttacaatttactggcaataaagttttggatagaccttaatgaggacattattaagcctcatatgttaattgctgcaagcaacctccagtggcgaccagaatccaaatcaggccttcttactttatttgctggagatttttctgtgttttctgctagtccaaaagagggccactttcaagagacattcaacaaaatgaaaaatactgttgagaatattgacatactttgcaatgaagcagaaaacaagcttatgcatatactgcatgcaaatgatcccaagtggtccaccccaactaaagactgtacttcagggccgtacactgctcaaatcattcctggtacaggaaacaagcttctgatgtcttctcctaattgtgagatatattatcaaagtcctttatcactttgtatggccaaaaggaagtctgtttccacacctgtctcagcccagatgacttcaaagtcttgtaaaggggagaaagagattgatgaccaaaagaactgcaaaaagagaagagccttggatttcttgagtagactgcctttacctccacctgttagtcccatttgtacatttgtttctccggctgcacagaaggcatttcagccaccaaggagttgtggcaccaaatacgaaacacccataaagaaaaaagaactgaattctcctcagatgactccatttaaaaaattcaatgaaatttctcttttggaaagtaattcaatagctgacgaagaacttgcattgataaatacccaagctcttttgtctggttcaacaggagaaaaacaatttatatctgtcagtgaatccactaggactgctcccaccagttcagaagattatctcagactgaaacgacgttgtactacatctctgatcaaagaacaggagagttcccaggccagtacggaagaatgtgagaaaaataagcaggacacaattacaactaaaaaatatatctaagcatttgcaaaggcgacaataaattattgacgcttaacctttccagtttataagactggaatataatttcaaaccacacattagtacttatgttgcacaatgagaaaagaaattagtttcaaatttacctcagcgtttgtgtatcgggcaaaaatcgttttgcccgattccgtattggtatacttttgcttcagttgcatatcttaaaactaaatgtaatttattaactaatcaagaaaaacatctttggctgagctcggtggctcatgcctgtaatcccaacactttgagaagctgaggtgggaggagtgcttgaggccaggagttcaagaccagcctgggcaacatagggagacccccatctttacaaagaaaaaaaaaaggggaaaagaaaatcttttaaatctttggatttgatcactacaagtattattttacaa

SEQ ID NO: 595 - DNA, 2009 bp, Homo sapiens
  source 1..2009: mol_type = genomic DNA
ggcagaggcggagccgctgtggcactgctgcgcctctgctgcgcctcgggtgtcttttgcggcggtgggtcgccgccgggagaagcgtgaggggacagatttgtgaccggcgcggtttttgtcagcttactccggccaaaaaagaactgcacctctggagcggacttatttaccaagcattggaggaatatcgtaggtaaaaatgcctattggatccaaagagaggccaacattttttgaaatttttaagacacgctgcaacaaagcaggaccaataagtcttaattggtttgaagaactttcttcagaagctccaccctataattctgaacctgcagaagaatctgaacataaaaacaacaattacgaaccaaacctatttaaaactccacaaaggaaaccatcttataatcagctggcttcaactccaataatattcaaagagcaagggctgactctgccgctgtaccaatctcctgtaaaagaattagataaattcaaattagacttaggaaggaatgttcccaatagtagacataaaagtcttcgcacagtgaaaactaaaatggatcaagcagatgatgtttcctgtccacttctaaattcttgtcttagtgaaagtcctgttgttctacaatgtacacatgtaacaccacaaagagataagtcagtggtatgtgggagtttgtttcatacaccaaagtttgtgaagggtcgtcagacaccaaaacatatttctgaaagtctaggagctgaggtggatcctgatatgtcttggtcaagttctttagctacaccacccacccttagttctactgtgctcatagtcagaaatgaagaagcatctgaaactgtatttcctcatgatactactgctaatgtgaaaagctatttttccaatcatgatgaaagtctgaagaaaaatgatagatttatcgcttctgtgacagacagtgaaaacacaaatcaaagagaagctgcaagtcatggatttggaaaaacatcagggaattcatttaaagtaaatagctgcaaagaccacattggaaagtcaatgccaaatgtcctagaagatgaagtatatgaaacagttgtagatacctctgaagaagatagtttttcattatgtttttctaaatgtagaacaaaaaatctacaaaaagtaagaactagcaagactaggaaaaaaattttccatgaagcaaacgctgatgaatgtgaaaaatctaaaaaccaagtgaaagaaaaatactcatttgtatctgaagtggaaccaaatgatactgatccattagattcaaatgtagcaaatcagaagccctttgagagtggaagtgacaaaatctccaaggaagttgtaccgtctttggcctgtgaatggtctcaactaaccctttcaggtctaaatggagcccagatggagaaaatacccctattgcatatttcttcatgtgaccaaaatatttcagaaaaagacctattagacacagagaacaaaagaaagaaagattttcttacttcagagaattctttgccacgtatttctagcctaccaaaatcagagaagccattaaatgaggaaacagtggtaaataagagagatgaagagcagcatcttgaatctcatacagactgcattcttgcagtaaagcaggcaatatctggaacttctccagtggcttcttcatttcagggtatcaaaaagtctatattcagaataagagaatcacctaaagagactttcaatgcaagtttttcaggtcatatgactgatccaaactttaaaaaagaaactgaagcctctgaaagtggactggaaatacatactgtttgctcacagaaggaggactccttatgtccaaatttaattgataatggaagctggccagccaccaccacacagaattctgtagctttgaagaatgcaggtttaatatccactttgaaaaagaaaacaaataagtttatttatgctatacatgatgaaacatcttataaaggaaaaaaaa

SEQ ID NO: 596 - DNA, 10984 bp, Homo sapiens
  source 1..10984: mol_type = genomic DNA
gtggcgcgagcttctgaaactaggcggcagaggcggagccgctgtggcactgctgcgcctctgctgcgcctcgggtgtcttttgcggcggtgggtcgccgccgggagaagcgtgaggggacagatttgtgaccggcgcggtttttgtcagcttactccggccaaaaaagaactgcacctctggagcggacttatttaccaagcattggaggaatatcgtaggtaaaaatgcctattggatccaaagagaggccaacattttttgaaatttttaagacacgctgcaacaaagcagatttaggaccaataagtcttaattggtttgaagaactttcttcagaagctccaccctataattctgaacctgcagaagaatctgaacataaaaacaacaattacgaaccaaacctatttaaaactccacaaaggaaaccatcttataatcagctggcttcaactccaataatattcaaagagcaagggctgactctgccgctgtaccaatctcctgtaaaagaattagataaattcaaattagacttaggaaggaatgttcccaatagtagacataaaagtcttcgcacagtgaaaactaaaatggatcaagcagatgatgtttcctgtccacttctaaattcttgtcttagtgaaagtcctgttgttctacaatgtacacatgtaacaccacaaagagataagtcagtggtatgtgggagtttgtttcatacaccaaagtttgtgaagggtcgtcagacaccaaaacatatttctgaaagtctaggagctgaggtggatcctgatatgtcttggtcaagttctttagctacaccacccacccttagttctactgtgctcatagtcagaaatgaagaagcatctgaaactgtatttcctcatgatactactgctaatgtgaaaagctatttttccaatcatgatgaaagtctgaagaaaaatgatagatttatcgcttctgtgacagacagtgaaaacacaaatcaaagagaagctgcaagtcatggatttggaaaaacatcagggaattcatttaaagtaaatagctgcaaagaccacattggaaagtcaatgccaaatgtcctagaagatgaagtatatgaaacagttgtagatacctctgaagaagatagtttttcattatgtttttctaaatgtagaacaaaaaatctacaaaaagtaagaactagcaagactaggaaaaaaattttccatgaagcaaacgctgatgaatgtgaaaaatctaaaaaccaagtgaaagaaaaatactcatttgtatctgaagtggaaccaaatgatactgatccattagattcaaatgtagcaaatcagaagccctttgagagtggaagtgacaaaatctccaaggaagttgtaccgtctttggcctgtgaatggtctcaactaaccctttcaggtctaaatggagcccagatggagaaaatacccctattgcatatttcttcatgtgaccaaaatatttcagaaaaagacctattagacacagagaacaaaagaaagaaagattttcttacttcagagaattctttgccacgtatttctagcctaccaaaatcagagaagccattaaatgaggaaacagtggtaaataagagagatgaagagcagcatcttgaatctcatacagactgcattcttgcagtaaagcaggcaatatctggaacttctccagtggcttcttcatttcagggtatcaaaaagtctatattcagaataagagaatcacctaaagagactttcaatgcaagtttttcaggtcatatgactgatccaaactttaaaaaagaaactgaagcctctgaaagtggactggaaatacatactgtttgctcacagaaggaggactccttatgtccaaatttaattgataatggaagctggccagccaccaccacacagaattctgtagctttgaagaatgcaggtttaatatccactttgaaaaagaaaacaaataagtttatttatgctatacatgatgaaacatcttataaaggaaaaaaaataccgaaagaccaaaaatcagaactaattaactgttcagcccagtttgaagcaaatgcttttgaagcaccacttacatttgcaaatgctgattcaggtttattgcattcttctgtgaaaagaagctgttcacagaatgattctgaagaaccaactttgtccttaactagctcttttgggacaattctgaggaaatgttctagaaatgaaacatgttctaataatacagtaatctctcaggatcttgattataaagaagcaaaatgtaataaggaaaaactacagttatttattaccccagaagctgattctctgtcatgcctgcaggaaggacagtgtgaaaatgatccaaaaagcaaaaaagtttcagatataaaagaagaggtcttggctgcagcatgtcacccagtacaacattcaaaagtggaatacagtgatactgactttcaatcccagaaaagtcttttatatgatcatgaaaatgccagcactcttattttaactcctacttccaaggatgttctgtcaaacctagtcatgatttctagaggcaaagaatcatacaaaatgtcagacaagctcaaaggtaacaattatgaatctgatgttgaattaaccaaaaatattcccatggaaaagaatcaagatgtatgtgctttaaatgaaaattataaaaacgttgagctgttgccacctgaaaaatacatgagagtagcatcaccttcaagaaaggtacaattcaaccaaaacacaaatctaagagtaatccaaaaaaatcaagaagaaactacttcaatttcaaaaataactgtcaatccagactctgaagaacttttctcagacaatgagaataattttgtcttccaagtagctaatgaaaggaataatcttgctttaggaaatactaaggaacttcatgaaacagacttgacttgtgtaaacgaacccattttcaagaactctaccatggttttatatggagacacaggtgataaacaagcaacccaagtgtcaattaaaaaagatttggtttatgttcttgcagaggagaacaaaaatagtgtaaagcagcatataaaaatgactctaggtcaagatttaaaatcggacatctccttgaatatagataaaataccagaaaaaaataatgattacatgaacaaatgggcaggactcttaggtccaatttcaaatcacagttttggaggtagcttcagaacagcttcaaataaggaaatcaagctctctgaacataacattaagaagagcaaaatgttcttcaaagatattgaagaacaatatcctactagtttagcttgtgttgaaattgtaaataccttggcattagataatcaaaagaaactgagcaagcctcagtcaattaatactgtatctgcacatttacagagtagtgtagttgtttctgattgtaaaaatagtcatataacccctcagatgttattttccaagcaggattttaattcaaaccataatttaacacctagccaaaaggcagaaattacagaactttctactatattagaagaatcaggaagtcagtttgaatttactcagtttagaaaaccaagctacatattgcagaagagtacatttgaagtgcctgaaaaccagatgactatcttaaagaccacttctgaggaatgcagagatgctgatcttcatgtcataatgaatgccccatcgattggtcaggtagacagcagcaagcaatttgaaggtacagttgaaattaaacggaagtttgctggcctgttgaaaaatgactgtaacaaaagtgcttctggttatttaacagatgaaaatgaagtggggtttaggggcttttattctgctcatggcacaaaactgaatgtttctactgaagctctgcaaaaagctgtgaaactgtttagtgatattgagaatattagtgaggaaacttctgcagaggtacatccaataagtttatcttcaagtaaatgtcatgattctgttgtttcaatgtttaagatagaaaatcataatgataaaactgtaagtgaaaaaaataataaatgccaactgatattacaaaataatattgaaatgactactggcacttttgttgaagaaattactgaaaattacaagagaaatactgaaaatgaagataacaaatatactgctgccagtagaaattctcataacttagaatttgatggcagtgattcaagtaaaaatgatactgtttgtattcataaagatgaaacggacttgctatttactgatcagcacaacatatgtcttaaattatctggccagtttatgaaggagggaaacactcagattaaagaagatttgtcagatttaacttttttggaagttgcgaaagctcaagaagcatgtcatggtaatacttcaaataaagaacagttaactgctactaaaacggagcaaaatataaaagattttgagacttctgatacattttttcagactgcaagtgggaaaaatattagtgtcgccaaagagtcatttaataaaattgtaaatttctttgatcagaaaccagaagaattgcataacttttccttaaattctgaattacattctgacataagaaagaacaaaatggacattctaagttatgaggaaacagacatagttaaacacaaaatactgaaagaaagtgtcccagttggtactggaaatcaactagtgaccttccagggacaacccgaacgtgatgaaaagatcaaagaacctactctattgggttttcatacagctagcgggaaaaaagttaaaattgcaaaggaatctttggacaaagtgaaaaacctttttgatgaaaaagagcaaggtactagtgaaatcaccagttttagccatcaatgggcaaagaccctaaagtacagagaggcctgtaaagaccttgaattagcatgtgagaccattgagatcacagctgccccaaagtgtaaagaaatgcagaattctctcaataatgataaaaaccttgtttctattgagactgtggtgccacctaagctcttaagtgataatttatgtagacaaactgaaaatctcaaaacatcaaaaagtatctttttgaaagttaaagtacatgaaaatgtagaaaaagaaacagcaaaaagtcctgcaacttgttacacaaatcagtccccttattcagtcattgaaaattcagccttagctttttacacaagttgtagtagaaaaacttctgtgagtcagacttcattacttgaagcaaaaaaatggcttagagaaggaatatttgatggtcaaccagaaagaataaatactgcagattatgtaggaaattatttgtatgaaaataattcaaacagtactatagctgaaaatgacaaaaatcatctctccgaaaaacaagatacttatttaagtaacagtagcatgtctaacagctattcctaccattctgatgaggtatataatgattcaggatatctctcaaaaaataaacttgattctggtattgagccagtattgaagaatgttgaagatcaaaaaaacactagtttttccaaagtaatatccaatgtaaaagatgcaaatgcatacccacaaactgtaaatgaagatatttgcgttgaggaacttgtgactagctcttcaccctgcaaaaataaaaatgcagccattaaattgtccatatctaatagtaataattttgaggtagggccacctgcatttaggatagccagtggtaaaatcgtttgtgtttcacatgaaacaattaaaaaagtgaaagacatatttacagacagtttcagtaaagtaattaaggaaaacaacgagaataaatcaaaaatttgccaaacgaaaattatggcaggttgttacgaggcattggatgattcagaggatattcttcataactctctagataatgatgaatgtagcacgcattcacataaggtttttgctgacattcagagtgaagaaattttacaacataaccaaaatatgtctggattggagaaagtttctaaaatatcaccttgtgatgttagtttggaaacttcagatatatgtaaatgtagtatagggaagcttcataagtcagtctcatctgcaaatacttgtgggatttttagcacagcaagtggaaaatctgtccaggtatcagatgcttcattacaaaacgcaagacaagtgttttctgaaatagaagatagtaccaagcaagtcttttccaaagtattgtttaaaagtaacgaacattcagaccagctcacaagagaagaaaatactgctatacgtactccagaacatttaatatcccaaaaaggcttttcatataatgtggtaaattcatctgctttctctggatttagtacagcaagtggaaagcaagtttccattttagaaagttccttacacaaagttaagggagtgttagaggaatttgatttaatcagaactgagcatagtcttcactattcacctacgtctagacaaaatgtatcaaaaatacttcctcgtgttgataagagaaacccagagcactgtgtaaactcagaaatggaaaaaacctgcagtaaagaatttaaattatcaaataacttaaatgttgaaggtggttcttcagaaaataatcactctattaaagtttctccatatctctctcaatttcaacaagacaaacaacagttggtattaggaaccaaagtgtcacttgttgagaacattcatgttttgggaaaagaacaggcttcacctaaaaacgtaaaaatggaaattggtaaaactgaaactttttctgatgttcctgtgaaaacaaatatagaagtttgttctacttactccaaagattcagaaaactactttgaaacagaagcagtagaaattgctaaagcttttatggaagatgatgaactgacagattctaaactgccaagtcatgccacacattctctttttacatgtcccgaaaatgaggaaatggttttgtcaaattcaagaattggaaaaagaagaggagagccccttatcttagtgggagaaccctcaatcaaaagaaacttattaaatgaatttgacaggataatagaaaatcaagaaaaatccttaaaggcttcaaaaagcactccagatggcacaataaaagatcgaagattgtttatgcatcatgtttctttagagccgattacctgtgtaccctttcgcacaactaaggaacgtcaagagatacagaatccaaattttaccgcacctggtcaagaatttctgtctaaatctcatttgtatgaacatctgactttggaaaaatcttcaagcaatttagcagtttcaggacatccattttatcaagtttctgctacaagaaatgaaaaaatgagacacttgattactacaggcagaccaaccaaagtctttgttccaccttttaaaactaaatcacattttcacagagttgaacagtgtgttaggaatattaacttggaggaaaacagacaaaagcaaaacattgatggacatggctctgatgatagtaaaaataagattaatgacaatgagattcatcagtttaacaaaaacaactccaatcaagcagtagctgtaactttcacaaagtgtgaagaagaacctttagatttaattacaagtcttcagaatgccagagatatacaggatatgcgaattaagaagaaacaaaggcaacgcgtctttccacagccaggcagtctgtatcttgcaaaaacatccactctgcctcgaatctctctgaaagcagcagtaggaggccaagttccctctgcgtgttctcataaacagctgtatacgtatggcgtttctaaacattgcataaaaattaacagcaaaaatgcagagtcttttcagtttcacactgaagattattttggtaaggaaagtttatggactggaaaaggaatacagttggctgatggtggatggctcataccctccaatgatggaaaggctggaaaagaagaattttatagggctctgtgtgacactccaggtgtggatccaaagcttatttctagaatttgggtttataatcactatagatggatcatatggaaactggcagctatggaatgtgcctttcctaaggaatttgctaatagatgcctaagcccagaaagggtgcttcttcaactaaaatacagatatgatacggaaattgatagaagcagaagatcggctataaaaaagataatggaaagggatgacacagctgcaaaaacacttgttctctgtgtttctgacataatttcattgagcgcaaatatatctgaaacttctagcaataaaactagtagtgcagatacccaaaaagtggccattattgaacttacagatgggtggtatgctgttaaggcccagttagatcctcccctcttagctgtcttaaagaatggcagactgacagttggtcagaagattattcttcatggagcagaactggtgggctctcctgatgcctgtacacctcttgaagccccagaatctcttatgttaaagatttctgctaacagtactcggcctgctcgctggtataccaaacttggattctttcctgaccctagaccttttcctctgcccttatcatcgcttttcagtgatggaggaaatgttggttgtgttgatgtaattattcaaagagcataccctatacagtggatggagaagacatcatctggattatacatatttcgcaatgaaagagaggaagaaaaggaagcagcaaaatatgtggaggcccaacaaaagagactagaagccttattcactaaaattcaggaggaatttgaagaacatgaagaaaacacaacaaaaccatatttaccatcacgtgcactaacaagacagcaagttcgtgctttgcaagatggtgcagagctttatgaagcagtgaagaatgcagcagacccagcttaccttgagggttatttcagtgaagagcagttaagagccttgaataatcacaggcaaatgttgaatgataagaaacaagctcagatccagttggaaattaggaaggccatggaatctgctgaacaaaaggaacaaggtttatcaagggatgtcacaaccgtgtggaagttgcgtattgtaagctattcaaaaaaagaaaaagattcagttatactgagtatttggcgtccatcatcagatttatattctctgttaacagaaggaaagagatacagaatttatcatcttgcaacttcaaaatctaaaagtaaatctgaaagagctaacatacagttagcagcgacaaaaaaaactcagtatcaacaactaccggtttcagatgaaattttatttcagatttaccagccacgggagccccttcacttcagcaaatttttagatccagactttcagccatcttgttctgaggtggacctaataggatttgtcgtttctgttgtgaaaaaaacaggacttgcccctttcgtctatttgtcagacgaatgttacaatttactggcaataaagttttggatagaccttaatgaggacattattaagcctcatatgttaattgctgcaagcaacctccagtggcgaccagaatccaaatcaggccttcttactttatttgctggagatttttctgtgttttctgctagtccaaaagagggccactttcaagagacattcaacaaaatgaaaaatactgttgagaatattgacatactttgcaatgaagcagaaaacaagcttatgcatatactgcatgcaaatgatcccaagtggtccaccccaactaaagactgtacttcagggccgtacactgctcaaatcattcctggtacaggaaacaagcttctgatgtcttctcctaattgtgagatatattatcaaagtcctttatcactttgtatggccaaaaggaagtctgtttccacacctgtctcagcccagatgacttcaaagtcttgtaaaggggagaaagagattgatgaccaaaagaactgcaaaaagagaagagccttggatttcttgagtagactgcctttacctccacctgttagtcccatttgtacatttgtttctccggctgcacagaaggcatttcagccaccaaggagttgtggcaccaaatacgaaacacccataaagaaaaaagaactgaattctcctcagatgactccatttaaaaaattcaatgaaatttctcttttggaaagtaattcaatagctgacgaagaacttgcattgataaatacccaagctcttttgtctggttcaacaggagaaaaacaatttatatctgtcagtgaatccactaggactgctcccaccagttcagaagattatctcagactgaaacgacgttgtactacatctctgatcaaagaacaggagagttcccaggccagtacggaagaatgtgagaaaaataagcaggacacaattacaactaaaaaatatatctaagcatttgcaaaggcgacaataaattattgacgcttaacctttccagtttataagactggaatataatttcaaaccacacattagtacttatgttgcacaatgagaaaagaaattagtttcaaatttacctcagcgtttgtgtatcgggcaaaaatcgttttgcccgattccgtattggtatacttttgcttcagttgcatatcttaaaactaaatgtaatttattaactaatcaagaaaaacatctttggctgagctcggtggctcatgcctgtaatcccaacactttgagaagctgaggtgggaggagtgcttgaggccaggagttcaagaccagcctgggcaacatagggagacccccatctttacaaagaaaaaaaaaaggggaaaagaaaatcttttaaatctttggatttgatcactacaagtattattttacaatcaacaaaatggtcatccaaactcaaacttgagaaaatatcttgctttcaaattggcact

SEQ ID NO: 597 - DNA, 3221 bp, Homo sapiens
  source 1..3221: mol_type = genomic DNA
tttgcctgccaggagtgggtgagggaggagcagccgccgccttcacagacacctggtagtgtcaggagagggcatgcactgccctggtgaggctcctctggctgcccccaggcccacacccaaggatccctgcctcagaaacgtgctggccaaagcgctctatgacaatgtggccgagtccccggatgagctctccttccgcaagggtgacatcatgacggtgctggagcaggacacgcagggcctggacggctggtggctctgctcgctgcatgggcgccagggcatcgtgcctgggaaccgcctcaagatcttggtgggcatgtatgataagaagccagcagggcctggccccggccctcccgccaccccggcccagcctcagcctggcctccatgccccagcgcctccggcctcccagtacacgcccatgctccccaacacctaccagccccagccagacagcgtctacctggtgcccactcccagcaaggctcagcaaggcctctaccaagtcccgggtcccagccctcagttccagtctcccccagccaagcagacatccaccttctcgaagcagacaccccatcacccgtttcccagcccggccacagacctgtaccaggtgcccccagggcctggaggccctgcccaggatatttaccaggtgccaccttctgccgggatggggcatgacatctaccaggtccccccgtccatggacacacgcagctgggagggcacgaagcccccggcaaaggtggtggtgcccacccgcgtggggcagggctatgtatacgaggccgcccagccggagcaggacgagtacgacatcccgcgacacctgctggccccggggccacaggacatctatgatgtgcccccggttcgggggctgcttcccagccagtatggccaggaggtgtatgacacaccccccatggctgtcaagggtcccaatggccgagacccgttgctggaggtgtatgacgtgccccccagtgtggagaagggcctgccaccgtccaaccaccacgcagtctacgacgttcctccatcggtgagcaaggatgtgcccgatggcccactgctgcgtgaggagacctacgatgtgccccccgccttcgccaaggccaagccctttgacccggcccgcaccccactggtactggctgcgccccctccagactccccgccggccgaggacgtgtatgacgtgccgcccccggctcctgacctctacgacgtgccccctggcttgcggcggcctggcccgggcaccctgtacgatgtgccccgtgaacgggtgcttcctcctgaggtggctgatggtggcgtggtcgacagtggtgtgtatgcggtgcctcccccagctgaacgtgaagccccggcagagggcaagcgcctgtcggcctccagcaccggcagcacacgcagcagccagtctgcgtcctccttggaggtggcagggccgggccgggaacccctggagctggaagttgctgtggaggccctggcacggctgcagcagggtgtgagcgccaccgttgcccaccttctggacctggcaggcagcgccggtgcgactgggagctggcgtagcccctctgagccacaggagccgctggtgcaggacctgcaggctgctgtggccgctgtccagagtgccgtccacgagctgttggagtttgcccgcagcgcggtgggcaatgctgcccacacatctgaccgtgccctgcatgccaagcttagccggcagctgcagaagatggaggacgtgcaccagacgctggtggcacatggtcaggccctcgacgctggccggggaggctctggagccacccttgaggacctggaccggctggtggcctgctcgcgggctgtgcccgaggacgccaagcagctggcctccttcctgcacggcaatgcctcactgctcttcagacggaccaaggccactgccccggggcctgaggggggtggcaccctgcaccccaaccccactgacaagaccagcagcatccagtcacgacccctgccctcaccccctaagttcacctcccaggactcgccagatgggcagtacgagaacagcgaggggggctggatggaggactatgactacgtccacctacaggggaaggaggagtttgagaagacccagaaggagctgctggaaaagggcagcatcacgcggcagggcaagagccagctggagttgcagcagctgaagcagtttgaacgactggaacaggaggtgtcacggcccatagaccacgacctggccaactggacgccagcccaacccctggccccggggcgaacaggcggcctggggccctcggaccggcagctgctgctcttctacctggagcagtgtgaggccaacctgaccacactgaccaacgccgtggacgccttctttaccgccgtggccaccaaccagccgcccaagatctttgtggcgcacagcaagttcgtcatcctcagcgcccacaagctggtgttcatcggggacacactgtcacggcaggccaaggctgctgacgtgcgcagccaggtgacccactacagcaacctgctgtgcgacctcctgcgcggcatcgtggccaccaccaaggccgctgccttgcagtacccatcgccttccgcggcccaggacatggtggagagggtcaaggagctgggccacagcacccagcagttccgccgcgtcctaggccagctggcagccgcctgagggtggtgaccccaggagggaggcaggggaggggtgcggcggtcccagctccctggctcccatgtcaagagtcgctgtgccacaggcttagggacaggaccccagctctgcgtcggtcctggtgccctggatgcccaggaatctgtatatatttatggccgggcagggtgtggggccatgcctcctcaggagccgaagcccaggggccggccagtggccttccccagcatgcaccacgggcccgggttgggtcaccagacggggctggagtgtgagggtcctgcagcctgcaggacctcgtgccaccccgagggctgagcctggtcccacgagggtgccgtgtcccctgacagggccagtgcagtttggtgtgtcctccgccttaccaggagaagaacctgaagaactatttttcgttattggttttccaatcatttgactaagagtctccatttaaataaagtttttaaaaggaagagca

SEQ ID NO: 598 - DNA, 3221 bp, Homo sapiens
  source 1..3221: mol_type = genomic DNA
ggccgaggcggcagctgcgcggcggcaccggggcggctgcggcgcgctcggagccccgagggcacgcggcccgggcagctcggtgtgcgcccccgcgagagccggggccccaggcccgccggacaccatgaaccacctgaacgtgctggccaaagcgctctatgacaatgtggccgagtccccggatgagctctccttccgcaagggtgacatcatgacggtgctggagcaggacacgcagggcctggacggctggtggctctgctcgctgcatgggcgccagggcatcgtgcctgggaaccgcctcaagatcttggtgggcatgtatgataagaagccagcagggcctggccccggccctcccgccaccccggcccagcctcagcctggcctccatgccccagcgcctccggcctcccagtacacgcccatgctccccaacacctaccagccccagccagacagcgtctacctggtgcccactcccagcaaggctcagcaaggcctctaccaagtcccgggtcccagccctcagttccagtctcccccagccaagcagacatccaccttctcgaagcagacaccccatcacccgtttcccagcccggccacagacctgtaccaggtgcccccagggcctggaggccctgcccaggatatttaccaggtgccaccttctgccgggatggggcatgacatctaccaggtccccccgtccatggacacacgcagctgggagggcacgaagcccccggcaaaggtggtggtgcccacccgcgtggggcagggctatgtatacgaggccgcccagccggagcaggacgagtacgacatcccgcgacacctgctggccccggggccacaggacatctatgatgtgcccccggttcgggggctgcttcccagccagtatggccaggaggtgtatgacacaccccccatggctgtcaagggtcccaatggccgagacccgttgctggaggtgtatgacgtgccccccagtgtggagaagggcctgccaccgtccaaccaccacgcagtctacgacgttcctccatcggtgagcaaggatgtgcccgatggcccactgctgcgtgaggagacctacgatgtgccccccgccttcgccaaggccaagccctttgacccggcccgcaccccactggtactggctgcgccccctccagactccccgccggccgaggacgtgtatgacgtgccgcccccggctcctgacctctacgacgtgccccctggcttgcggcggcctggcccgggcaccctgtacgatgtgccccgtgaacgggtgcttcctcctgaggtggctgatggtggcgtggtcgacagtggtgtgtatgcggtgcctcccccagctgaacgtgaagccccggcagagggcaagcgcctgtcggcctccagcaccggcagcacacgcagcagccagtctgcgtcctccttggaggtggcagggccgggccgggaacccctggagctggaagttgctgtggaggccctggcacggctgcagcagggtgtgagcgccaccgttgcccaccttctggacctggcaggcagcgccggtgcgactgggagctggcgtagcccctctgagccacaggagccgctggtgcaggacctgcaggctgctgtggccgctgtccagagtgccgtccacgagctgttggagtttgcccgcagcgcggtgggcaatgctgcccacacatctgaccgtgccctgcatgccaagcttagccggcagctgcagaagatggaggacgtgcaccagacgctggtggcacatggtcaggccctcgacgctggccggggaggctctggagccacccttgaggacctggaccggctggtggcctgctcgcgggctgtgcccgaggacgccaagcagctggcctccttcctgcacggcaatgcctcactgctcttcagacggaccaaggccactgccccggggcctgaggggggtggcaccctgcaccccaaccccactgacaagaccagcagcatccagtcacgacccctgccctcaccccctaagttcacctcccaggactcgccagatgggcagtacgagaacagcgaggggggctggatggaggactatgactacgtccacctacaggggaaggaggagtttgagaagacccagaaggagctgctggaaaagggcagcatcacgcggcagggcaagagccagctggagttgcagcagctgaagcagtttgaacgactggaacaggaggtgtcacggcccatagaccacgacctggccaactggacgccagcccaacccctggccccggggcgaacaggcggcctggggccctcggaccggcagctgctgctcttctacctggagcagtgtgaggccaacctgaccacactgaccaacgccgtggacgccttctttaccgccgtggccaccaaccagccgcccaagatctttgtggcgcacagcaagttcgtcatcctcagcgcccacaagctggtgttcatcggggacacactgtcacggcaggccaaggctgctgacgtgcgcagccaggtgacccactacagcaacctgctgtgcgacctcctgcgcggcatcgtggccaccaccaaggccgctgccttgcagtacccatcgccttccgcggcccaggacatggtggagagggtcaaggagctgggccacagcacccagcagttccgccgcgtcctaggccagctggcagccgcctgagggtggtgaccccaggagggaggcaggggaggggtgcggcggtcccagctccctggctcccatgtcaagagtcgctgtgccacaggcttagggacaggaccccagctctgcgtcggtcctggtgccctggatgcccaggaatctgtatatatttatggccgggcagggtgtggggccatgcctcctcaggagccgaagcccaggggccggccagtggccttccccagcatgcaccacgggcccgggttgggtcaccagacggggctggagtgtgagggtcctgcagcctgcaggacctcgtgccaccccgagggctgagcctggtcccacgagggtgccgtgtcccctgacagggccagtgcagtttggtgtgtcctccgccttaccaggagaagaacctgaagaactatttttcgttattggttttccaatcatttgactaagagtctccatttaaataaagtttttaaaaggaagagca

SEQ ID NO: 599 - DNA, 3293 bp, Homo sapiens
  source 1..3293: mol_type = genomic DNA
ggctggaccggctctgggtggccgaggcggcagctgcgcggcggcaccggggcggctgcggcgcgctcggagccccgagggcacgcggcccgggcagctcggtgtgcgcccccgcgagagccggggccccaggcccgccggacaccatgaaccacctgaacgtgctggccaaagcgctctatgacaatgtggccgagtccccggatgagctctccttccgcaagggtgacatcatgacggtgctggagcaggacacgcagggcctggacggctggtggctctgctcgctgcatgggcgccagggcatcgtgcctgggaaccgcctcaagatcttggtgggcatgtatgataagaagccagcagggcctggccccggccctcccgccaccccggcccagcctcagcctggcctccatgccccagcgcctccggcctcccagtacacgcccatgctccccaacacctaccagccccagccagacagcgtctacctggtgcccactcccagcaaggctcagcaaggcctctaccaagtcccgggtcccagccctcagttccagtctcccccagccaagcagacatccaccttctcgaagcagacaccccatcacccgtttcccagcccggccacagacctgtaccaggtgcccccagggcctggaggccctgcccaggatatttaccaggtgccaccttctgccgggatggggcatgacatctaccaggtccccccgtccatggacacacgcagctgggagggcacgaagcccccggcaaaggtggtggtgcccacccgcgtggggcagggctatgtatacgaggccgcccagccggagcaggacgagtacgacatcccgcgacacctgctggccccggggccacaggacatctatgatgtgcccccggttcgggggctgcttcccagccagtatggccaggaggtgtatgacacaccccccatggctgtcaagggtcccaatggccgagacccgttgctggaggtgtatgacgtgccccccagtgtggagaagggcctgccaccgtccaaccaccacgcagtgagcaaatgccagggcaatgccagggccaggctgaggctgtggggtgtctgggtctacgacgttcctccatcggtgagcaaggatgtgcccgatggcccactgctgcgtgaggagacctacgatgtgccccccgccttcgccaaggccaagccctttgacccggcccgcaccccactggtactggctgcgccccctccagactccccgccggccgaggacgtgtatgacgtgccgcccccggctcctgacctctacgacgtgccccctggcttgcggcggcctggcccgggcaccctgtacgatgtgccccgtgaacgggtgcttcctcctgaggtggctgatggtggcgtggtcgacagtggtgtgtatgcggtgcctcccccagctgaacgtgaagccccggcagagggcaagcgcctgtcggcctccagcaccggcagcacacgcagcagccagtctgcgtcctccttggaggtggcagggccgggccgggaacccctggagctggaagttgctgtggaggccctggcacggctgcagcagggtgtgagcgccaccgttgcccaccttctggacctggcaggcagcgccggtgcgactgggagctggcgtagcccctctgagccacaggagccgctggtgcaggacctgcaggctgctgtggccgctgtccagagtgccgtccacgagctgttggagtttgcccgcagcgcggtgggcaatgctgcccacacatctgaccgtgccctgcatgccaagcttagccggcagctgcagaagatggaggacgtgcaccagacgctggtggcacatggtcaggccctcgacgctggccggggaggctctggagccacccttgaggacctggaccggctggtggcctgctcgcgggctgtgcccgaggacgccaagcagctggcctccttcctgcacggcaatgcctcactgctcttcagacggaccaaggccactgccccggggcctgaggggggtggcaccctgcaccccaaccccactgacaagaccagcagcatccagtcacgacccctgccctcaccccctaagttcacctcccaggactcgccagatgggcagtacgagaacagcgaggggggctggatggaggactatgactacgtccacctacaggggaaggaggagtttgagaagacccagaaggagctgctggaaaagggcagcatcacgcggcagggcaagagccagctggagttgcagcagctgaagcagtttgaacgactggaacaggaggtgtcacggcccatagaccacgacctggccaactggacgccagcccaacccctggccccggggcgaacaggcggcctggggccctcggaccggcagctgctgctcttctacctggagcagtgtgaggccaacctgaccacactgaccaacgccgtggacgccttctttaccgccgtggccaccaaccagccgcccaagatctttgtggcgcacagcaagttcgtcatcctcagcgcccacaagctggtgttcatcggggacacactgtcacggcaggccaaggctgctgacgtgcgcagccaggtgacccactacagcaacctgctgtgcgacctcctgcgcggcatcgtggccaccaccaaggccgctgccttgcagtacccatcgccttccgcggcccaggacatggtggagagggtcaaggagctgggccacagcacccagcagttccgccgcgtcctaggccagctggcagccgcctgagggtggtgaccccaggagggaggcaggggaggggtgcggcggtcccagctccctggctcccatgtcaagagtcgctgtgccacaggcttagggacaggaccccagctctgcgtcggtcctggtgccctggatgcccaggaatctgtatatatttatggccgggcagggtgtggggccatgcctcctcaggagccgaagcccaggggccggccagtggccttccccagcatgcaccacgggcccgggttgggtcaccagacggggctggagtgtgagggtcctgcagcctgcaggacctcgtgccaccccgagggctgagcctggtcccacgagggtgccgtgtcccctgacagggccagtgcagtttggtgtgtcctccgccttaccaggagaagaacctgaagaactatttttcgttattggttttccaatcatttgactaagagtctccatttaaataaagtttttaaaaggaagagc

SEQ ID NO: 600 - DNA, 3515 bp, Homo sapiens
  source 1..3515: mol_type = genomic DNA
atgcgcggcgcggctggagcggccggacagtccggcgtccgggaacgctcaggagccggaggagccggaaagcgccgggacccctcgcggggcctctgagcggcgcgggcggacccgagcccccagcccgctggcgccgctgcccgccaggccccgggggcggcggccaagatgtccgtgcctatgaaaaaatgagggcttccagactgtgctgatgtgagccccgccatccgttctggttcagagcataatcgtctcgtcttcagaaagaaggaagacagaacatgcctgccaagcccttcctctcttctgttctgctctcctggaaagttctggacttctctggcccagggcctcaggggactggccagccctgctcctgtgggcactgggcagagggacaaggcggaccacctgagcctgctggagggccgaacgtgctggccaaagcgctctatgacaatgtggccgagtccccggatgagctctccttccgcaagggtgacatcatgacggtgctggagcaggacacgcagggcctggacggctggtggctctgctcgctgcatgggcgccagggcatcgtgcctgggaaccgcctcaagatcttggtgggcatgtatgataagaagccagcagggcctggccccggccctcccgccaccccggcccagcctcagcctggcctccatgccccagcgcctccggcctcccagtacacgcccatgctccccaacacctaccagccccagccagacagcgtctacctggtgcccactcccagcaaggctcagcaaggcctctaccaagtcccgggtcccagccctcagttccagtctcccccagccaagcagacatccaccttctcgaagcagacaccccatcacccgtttcccagcccggccacagacctgtaccaggtgcccccagggcctggaggccctgcccaggatatttaccaggtgccaccttctgccgggatggggcatgacatctaccaggtccccccgtccatggacacacgcagctgggagggcacgaagcccccggcaaaggtggtggtgcccacccgcgtggggcagggctatgtatacgaggccgcccagccggagcaggacgagtacgacatcccgcgacacctgctggccccggggccacaggacatctatgatgtgcccccggttcgggggctgcttcccagccagtatggccaggaggtgtatgacacaccccccatggctgtcaagggtcccaatggccgagacccgttgctggaggtgtatgacgtgccccccagtgtggagaagggcctgccaccgtccaaccaccacgcagtctacgacgttcctccatcggtgagcaaggatgtgcccgatggcccactgctgcgtgaggagacctacgatgtgccccccgccttcgccaaggccaagccctttgacccggcccgcaccccactggtactggctgcgccccctccagactccccgccggccgaggacgtgtatgacgtgccgcccccggctcctgacctctacgacgtgccccctggcttgcggcggcctggcccgggcaccctgtacgatgtgccccgtgaacgggtgcttcctcctgaggtggctgatggtggcgtggtcgacagtggtgtgtatgcggtgcctcccccagctgaacgtgaagccccggcagagggcaagcgcctgtcggcctccagcaccggcagcacacgcagcagccagtctgcgtcctccttggaggtggcagggccgggccgggaacccctggagctggaagttgctgtggaggccctggcacggctgcagcagggtgtgagcgccaccgttgcccaccttctggacctggcaggcagcgccggtgcgactgggagctggcgtagcccctctgagccacaggagccgctggtgcaggacctgcaggctgctgtggccgctgtccagagtgccgtccacgagctgttggagtttgcccgcagcgcggtgggcaatgctgcccacacatctgaccgtgccctgcatgccaagcttagccggcagctgcagaagatggaggacgtgcaccagacgctggtggcacatggtcaggccctcgacgctggccggggaggctctggagccacccttgaggacctggaccggctggtggcctgctcgcgggctgtgcccgaggacgccaagcagctggcctccttcctgcacggcaatgcctcactgctcttcagacggaccaaggccactgccccggggcctgaggggggtggcaccctgcaccccaaccccactgacaagaccagcagcatccagtcacgacccctgccctcaccccctaagttcacctcccaggactcgccagatgggcagtacgagaacagcgaggggggctggatggaggactatgactacgtccacctacaggggaaggaggagtttgagaagacccagaaggagctgctggaaaagggcagcatcacgcggcagggcaagagccagctggagttgcagcagctgaagcagtttgaacgactggaacaggaggtgtcacggcccatagaccacgacctggccaactggacgccagcccaacccctggccccggggcgaacaggcggcctggggccctcggaccggcagctgctgctcttctacctggagcagtgtgaggccaacctgaccacactgaccaacgccgtggacgccttctttaccgccgtggccaccaaccagccgcccaagatctttgtggcgcacagcaagttcgtcatcctcagcgcccacaagctggtgttcatcggggacacactgtcacggcaggccaaggctgctgacgtgcgcagccaggtgacccactacagcaacctgctgtgcgacctcctgcgcggcatcgtggccaccaccaaggccgctgccttgcagtacccatcgccttccgcggcccaggacatggtggagagggtcaaggagctgggccacagcacccagcagttccgccgcgtcctaggccagctggcagccgcctgagggtggtgaccccaggagggaggcaggggaggggtgcggcggtcccagctccctggctcccatgtcaagagtcgctgtgccacaggcttagggacaggaccccagctctgcgtcggtcctggtgccctggatgcccaggaatctgtatatatttatggccgggcagggtgtggggccatgcctcctcaggagccgaagcccaggggccggccagtggccttccccagcatgcaccacgggcccgggttgggtcaccagacggggctggagtgtgagggtcctgcagcctgcaggacctcgtgccaccccgagggctgagcctggtcccacgagggtgccgtgtcccctgacagggccagtgcagtttggtgtgtcctccgccttaccaggagaagaacctgaagaactatttttcgttattggttttccaatcatttgactaagagtctccatttaaataaagtttttaaaaggaagagc

SEQ ID NO: 601 - DNA, 3177 bp, Homo sapiens
  source 1..3177: mol_type = genomic DNA
tgctctggaccccagccccacttgctctagatgctcacccaccgtccccaggaagcagaacagaggggtcggacccctggtccttcctttgagtggaacgtgctggccaaagcgctctatgacaatgtggccgagtccccggatgagctctccttccgcaagggtgacatcatgacggtgctggagcaggacacgcagggcctggacggctggtggctctgctcgctgcatgggcgccagggcatcgtgcctgggaaccgcctcaagatcttggtgggcatgtatgataagaagccagcagggcctggccccggccctcccgccaccccggcccagcctcagcctggcctccatgccccagcgcctccggcctcccagtacacgcccatgctccccaacacctaccagccccagccagacagcgtctacctggtgcccactcccagcaaggctcagcaaggcctctaccaagtcccgggtcccagccctcagttccagtctcccccagccaagcagacatccaccttctcgaagcagacaccccatcacccgtttcccagcccggccacagacctgtaccaggtgcccccagggcctggaggccctgcccaggatatttaccaggtgccaccttctgccgggatggggcatgacatctaccaggtccccccgtccatggacacacgcagctgggagggcacgaagcccccggcaaaggtggtggtgcccacccgcgtggggcagggctatgtatacgaggccgcccagccggagcaggacgagtacgacatcccgcgacacctgctggccccggggccacaggacatctatgatgtgcccccggttcgggggctgcttcccagccagtatggccaggaggtgtatgacacaccccccatggctgtcaagggtcccaatggccgagacccgttgctggaggtgtatgacgtgccccccagtgtggagaagggcctgccaccgtccaaccaccacgcagtctacgacgttcctccatcggtgagcaaggatgtgcccgatggcccactgctgcgtgaggagacctacgatgtgccccccgccttcgccaaggccaagccctttgacccggcccgcaccccactggtactggctgcgccccctccagactccccgccggccgaggacgtgtatgacgtgccgcccccggctcctgacctctacgacgtgccccctggcttgcggcggcctggcccgggcaccctgtacgatgtgccccgtgaacgggtgcttcctcctgaggtggctgatggtggcgtggtcgacagtggtgtgtatgcggtgcctcccccagctgaacgtgaagccccggcagagggcaagcgcctgtcggcctccagcaccggcagcacacgcagcagccagtctgcgtcctccttggaggtggcagggccgggccgggaacccctggagctggaagttgctgtggaggccctggcacggctgcagcagggtgtgagcgccaccgttgcccaccttctggacctggcaggcagcgccggtgcgactgggagctggcgtagcccctctgagccacaggagccgctggtgcaggacctgcaggctgctgtggccgctgtccagagtgccgtccacgagctgttggagtttgcccgcagcgcggtgggcaatgctgcccacacatctgaccgtgccctgcatgccaagcttagccggcagctgcagaagatggaggacgtgcaccagacgctggtggcacatggtcaggccctcgacgctggccggggaggctctggagccacccttgaggacctggaccggctggtggcctgctcgcgggctgtgcccgaggacgccaagcagctggcctccttcctgcacggcaatgcctcactgctcttcagacggaccaaggccactgccccggggcctgaggggggtggcaccctgcaccccaaccccactgacaagaccagcagcatccagtcacgacccctgccctcaccccctaagttcacctcccaggactcgccagatgggcagtacgagaacagcgaggggggctggatggaggactatgactacgtccacctacaggggaaggaggagtttgagaagacccagaaggagctgctggaaaagggcagcatcacgcggcagggcaagagccagctggagttgcagcagctgaagcagtttgaacgactggaacaggaggtgtcacggcccatagaccacgacctggccaactggacgccagcccaacccctggccccggggcgaacaggcggcctggggccctcggaccggcagctgctgctcttctacctggagcagtgtgaggccaacctgaccacactgaccaacgccgtggacgccttctttaccgccgtggccaccaaccagccgcccaagatctttgtggcgcacagcaagttcgtcatcctcagcgcccacaagctggtgttcatcggggacacactgtcacggcaggccaaggctgctgacgtgcgcagccaggtgacccactacagcaacctgctgtgcgacctcctgcgcggcatcgtggccaccaccaaggccgctgccttgcagtacccatcgccttccgcggcccaggacatggtggagagggtcaaggagctgggccacagcacccagcagttccgccgcgtcctaggccagctggcagccgcctgagggtggtgaccccaggagggaggcaggggaggggtgcggcggtcccagctccctggctcccatgtcaagagtcgctgtgccacaggcttagggacaggaccccagctctgcgtcggtcctggtgccctggatgcccaggaatctgtatatatttatggccgggcagggtgtggggccatgcctcctcaggagccgaagcccaggggccggccagtggccttccccagcatgcaccacgggcccgggttgggtcaccagacggggctggagtgtgagggtcctgcagcctgcaggacctcgtgccaccccgagggctgagcctggtcccacgagggtgccgtgtcccctgacagggccagtgcagtttggtgtgtcctccgccttaccaggagaagaacctgaagaactatttttcgttattggttttccaatcatttgactaagagtctccatttaaataaagtttttaaaaggaagagc

SEQ ID NO: 602 - DNA, 2925 bp, Homo sapiens
  source 1..2925: mol_type = genomic DNA
aggagccggaaagcgccgggacccctcgcggggcctctgagcggcgcgggcggacccgagcccccagcccgctggcgccgctgcccgccaggccccgggggcggcggccaagatgtccgtgccttgccgctctcctaccccatgtcgctgaagcagatgagttggagcaggactcaggagggtactaggcccaggttttaggctgaacctaggaatgagtaatgagaggaggcagatcagctggaggaccagcccgagtccccagatgtcggcacaatgcaggggaagaacgtgctggccaaagcgctctatgacaatgtggccgagtccccggatgagctctccttccgcaagggtgacatcatgacggtgctggagcaggacacgcagggcctggacggctggtggctctgctcgctgcatgggcgccagggcatcgtgcctgggaaccgcctcaagatcttggtggtggtgcccacccgcgtggggcagggctatgtatacgaggccgcccagccggagcaggacgagtacgacatcccgcgacacctgctggccccggggccacaggacatctatgatgtgcccccggttcgggggctgcttcccagccagtatggccaggaggtgtatgacacaccccccatggctgtcaagggtcccaatggccgagacccgttgctggaggtgtatgacgtgccccccagtgtggagaagggcctgccaccgtccaaccaccacgcagtctacgacgttcctccatcggtgagcaaggatgtgcccgatggcccactgctgcgtgaggagacctacgatgtgccccccgccttcgccaaggccaagccctttgacccggcccgcaccccactggtactggctgcgccccctccagactccccgccggccgaggacgtgtatgacgtgccgcccccggctcctgacctctacgacgtgccccctggcttgcggcggcctggcccgggcaccctgtacgatgtgccccgtgaacgggtgcttcctcctgaggtggctgatggtggcgtggtcgacagtggtgtgtatgcggtgcctcccccagctgaacgtgaagccccggcagagggcaagcgcctgtcggcctccagcaccggcagcacacgcagcagccagtctgcgtcctccttggaggtggcagggccgggccgggaacccctggagctggaagttgctgtggaggccctggcacggctgcagcagggtgtgagcgccaccgttgcccaccttctggacctggcaggcagcgccggtgcgactgggagctggcgtagcccctctgagccacaggagccgctggtgcaggacctgcaggctgctgtggccgctgtccagagtgccgtccacgagctgttggagtttgcccgcagcgcggtgggcaatgctgcccacacatctgaccgtgccctgcatgccaagcttagccggcagctgcagaagatggaggacgtgcaccagacgctggtggcacatggtcaggccctcgacgctggccggggaggctctggagccacccttgaggacctggaccggctggtggcctgctcgcgggctgtgcccgaggacgccaagcagctggcctccttcctgcacggcaatgcctcactgctcttcagacggaccaaggccactgccccggggcctgaggggggtggcaccctgcaccccaaccccactgacaagaccagcagcatccagtcacgacccctgccctcaccccctaagttcacctcccaggactcgccagatgggcagtacgagaacagcgaggggggctggatggaggactatgactacgtccacctacaggggaaggaggagtttgagaagacccagaaggagctgctggaaaagggcagcatcacgcggcagggcaagagccagctggagttgcagcagctgaagcagtttgaacgactggaacaggaggtgtcacggcccatagaccacgacctggccaactggacgccagcccaacccctggccccggggcgaacaggcggcctggggccctcggaccggcagctgctgctcttctacctggagcagtgtgaggccaacctgaccacactgaccaacgccgtggacgccttctttaccgccgtggccaccaaccagccgcccaagatctttgtggcgcacagcaagttcgtcatcctcagcgcccacaagctggtgttcatcggggacacactgtcacggcaggccaaggctgctgacgtgcgcagccaggtgacccactacagcaacctgctgtgcgacctcctgcgcggcatcgtggccaccaccaaggccgctgccttgcagtacccatcgccttccgcggcccaggacatggtggagagggtcaaggagctgggccacagcacccagcagttccgccgcgtcctaggccagctggcagccgcctgagggtggtgaccccaggagggaggcaggggaggggtgcggcggtcccagctccctggctcccatgtcaagagtcgctgtgccacaggcttagggacaggaccccagctctgcgtcggtcctggtgccctggatgcccaggaatctgtatatatttatggccgggcagggtgtggggccatgcctcctcaggagccgaagcccaggggccggccagtggccttccccagcatgcaccacgggcccgggttgggtcaccagacggggctggagtgtgagggtcctgcagcctgcaggacctcgtgccaccccgagggctgagcctggtcccacgagggtgccgtgtcccctgacagggccagtgcagtttggtgtgtcctccgccttaccaggagaagaacctgaagaactatttttcgttattggttttccaatcatttgactaagagtctccatttaaataaagtttttaaaaggaagagc

SEQ ID NO: 603 - DNA, 3264 bp, Homo sapiens
  source 1..3264: mol_type = genomic DNA
atgcgcggcgcggctggagcggccggacagtccggcgtccgggaacgctcaggagccggaggagccggaaagcgccgggacccctcgcggggcctctgagcggcgcgggcggacccgagcccccagcccgctggcgccgctgcccgccaggccccgggggcggcggccaagatgtccgtgcctaacgtgctggccaaagcgctctatgacaatgtggccgagtccccggatgagctctccttccgcaagggtgacatcatgacggtgctggagcaggacacgcagggcctggacggctggtggctctgctcgctgcatgggcgccagggcatcgtgcctgggaaccgcctcaagatcttggtgggcatgtatgataagaagccagcagggcctggccccggccctcccgccaccccggcccagcctcagcctggcctccatgccccagcgcctccggcctcccagtacacgcccatgctccccaacacctaccagccccagccagacagcgtctacctggtgcccactcccagcaaggctcagcaaggcctctaccaagtcccgggtcccagccctcagttccagtctcccccagccaagcagacatccaccttctcgaagcagacaccccatcacccgtttcccagcccggccacagacctgtaccaggtgcccccagggcctggaggccctgcccaggatatttaccaggtgccaccttctgccgggatggggcatgacatctaccaggtccccccgtccatggacacacgcagctgggagggcacgaagcccccggcaaaggtggtggtgcccacccgcgtggggcagggctatgtatacgaggccgcccagccggagcaggacgagtacgacatcccgcgacacctgctggccccggggccacaggacatctatgatgtgcccccggttcgggggctgcttcccagccagtatggccaggaggtgtatgacacaccccccatggctgtcaagggtcccaatggccgagacccgttgctggaggtgtatgacgtgccccccagtgtggagaagggcctgccaccgtccaaccaccacgcagtctacgacgttcctccatcggtgagcaaggatgtgcccgatggcccactgctgcgtgaggagacctacgatgtgccccccgccttcgccaaggccaagccctttgacccggcccgcaccccactggtactggctgcgccccctccagactccccgccggccgaggacgtgtatgacgtgccgcccccggctcctgacctctacgacgtgccccctggcttgcggcggcctggcccgggcaccctgtacgatgtgccccgtgaacgggtgcttcctcctgaggtggctgatggtggcgtggtcgacagtggtgtgtatgcggtgcctcccccagctgaacgtgaagccccggcagagggcaagcgcctgtcggcctccagcaccggcagcacacgcagcagccagtctgcgtcctccttggaggtggcagggccgggccgggaacccctggagctggaagttgctgtggaggccctggcacggctgcagcagggtgtgagcgccaccgttgcccaccttctggacctggcaggcagcgccggtgcgactgggagctggcgtagcccctctgagccacaggagccgctggtgcaggacctgcaggctgctgtggccgctgtccagagtgccgtccacgagctgttggagtttgcccgcagcgcggtgggcaatgctgcccacacatctgaccgtgccctgcatgccaagcttagccggcagctgcagaagatggaggacgtgcaccagacgctggtggcacatggtcaggccctcgacgctggccggggaggctctggagccacccttgaggacctggaccggctggtggcctgctcgcgggctgtgcccgaggacgccaagcagctggcctccttcctgcacggcaatgcctcactgctcttcagacggaccaaggccactgccccggggcctgaggggggtggcaccctgcaccccaaccccactgacaagaccagcagcatccagtcacgacccctgccctcaccccctaagttcacctcccaggactcgccagatgggcagtacgagaacagcgaggggggctggatggaggactatgactacgtccacctacaggggaaggaggagtttgagaagacccagaaggagctgctggaaaagggcagcatcacgcggcagggcaagagccagctggagttgcagcagctgaagcagtttgaacgactggaacaggaggtgtcacggcccatagaccacgacctggccaactggacgccagcccaacccctggccccggggcgaacaggcggcctggggccctcggaccggcagctgctgctcttctacctggagcagtgtgaggccaacctgaccacactgaccaacgccgtggacgccttctttaccgccgtggccaccaaccagccgcccaagatctttgtggcgcacagcaagttcgtcatcctcagcgcccacaagctggtgttcatcggggacacactgtcacggcaggccaaggctgctgacgtgcgcagccaggtgacccactacagcaacctgctgtgcgacctcctgcgcggcatcgtggccaccaccaaggccgctgccttgcagtacccatcgccttccgcggcccaggacatggtggagagggtcaaggagctgggccacagcacccagcagttccgccgcgtcctaggccagctggcagccgcctgagggtggtgaccccaggagggaggcaggggaggggtgcggcggtcccagctccctggctcccatgtcaagagtcgctgtgccacaggcttagggacaggaccccagctctgcgtcggtcctggtgccctggatgcccaggaatctgtatatatttatggccgggcagggtgtggggccatgcctcctcaggagccgaagcccaggggccggccagtggccttccccagcatgcaccacgggcccgggttgggtcaccagacggggctggagtgtgagggtcctgcagcctgcaggacctcgtgccaccccgagggctgagcctggtcccacgagggtgccgtgtcccctgacagggccagtgcagtttggtgtgtcctccgccttaccaggagaagaacctgaagaactatttttcgttattggttttccaatcatttgactaagagtctccatttaaataaagtttttaaaaggaagagc

SEQ ID NO: 604 - DNA, 3354 bp, Homo sapiens
  source 1..3354: mol_type = genomic DNA
agtgtttcccaagtgcctgctatgtgcgaggctctgtgctggggcgggtgcatgtgtgcgttgggggcgtggacaggaggggtgggaaaggcctgtgacatttcctctggtggtttccacgaacccaggcgtcacccctcggtggagataaagtggagccacccagctccaccgtgtctcagcctggggtcggcctctgctgcttctggactcagtgaccctgggctgtcagggagcttctgagccttggttttcctgtctagtaagatggagaacgtgctggccaaagcgctctatgacaatgtggccgagtccccggatgagctctccttccgcaagggtgacatcatgacggtgctggagcaggacacgcagggcctggacggctggtggctctgctcgctgcatgggcgccagggcatcgtgcctgggaaccgcctcaagatcttggtgggcatgtatgataagaagccagcagggcctggccccggccctcccgccaccccggcccagcctcagcctggcctccatgccccagcgcctccggcctcccagtacacgcccatgctccccaacacctaccagccccagccagacagcgtctacctggtgcccactcccagcaaggctcagcaaggcctctaccaagtcccgggtcccagccctcagttccagtctcccccagccaagcagacatccaccttctcgaagcagacaccccatcacccgtttcccagcccggccacagacctgtaccaggtgcccccagggcctggaggccctgcccaggatatttaccaggtgccaccttctgccgggatggggcatgacatctaccaggtccccccgtccatggacacacgcagctgggagggcacgaagcccccggcaaaggtggtggtgcccacccgcgtggggcagggctatgtatacgaggccgcccagccggagcaggacgagtacgacatcccgcgacacctgctggccccggggccacaggacatctatgatgtgcccccggttcgggggctgcttcccagccagtatggccaggaggtgtatgacacaccccccatggctgtcaagggtcccaatggccgagacccgttgctggaggtgtatgacgtgccccccagtgtggagaagggcctgccaccgtccaaccaccacgcagtctacgacgttcctccatcggtgagcaaggatgtgcccgatggcccactgctgcgtgaggagacctacgatgtgccccccgccttcgccaaggccaagccctttgacccggcccgcaccccactggtactggctgcgccccctccagactccccgccggccgaggacgtgtatgacgtgccgcccccggctcctgacctctacgacgtgccccctggcttgcggcggcctggcccgggcaccctgtacgatgtgccccgtgaacgggtgcttcctcctgaggtggctgatggtggcgtggtcgacagtggtgtgtatgcggtgcctcccccagctgaacgtgaagccccggcagagggcaagcgcctgtcggcctccagcaccggcagcacacgcagcagccagtctgcgtcctccttggaggtggcagggccgggccgggaacccctggagctggaagttgctgtggaggccctggcacggctgcagcagggtgtgagcgccaccgttgcccaccttctggacctggcaggcagcgccggtgcgactgggagctggcgtagcccctctgagccacaggagccgctggtgcaggacctgcaggctgctgtggccgctgtccagagtgccgtccacgagctgttggagtttgcccgcagcgcggtgggcaatgctgcccacacatctgaccgtgccctgcatgccaagcttagccggcagctgcagaagatggaggacgtgcaccagacgctggtggcacatggtcaggccctcgacgctggccggggaggctctggagccacccttgaggacctggaccggctggtggcctgctcgcgggctgtgcccgaggacgccaagcagctggcctccttcctgcacggcaatgcctcactgctcttcagacggaccaaggccactgccccggggcctgaggggggtggcaccctgcaccccaaccccactgacaagaccagcagcatccagtcacgacccctgccctcaccccctaagttcacctcccaggactcgccagatgggcagtacgagaacagcgaggggggctggatggaggactatgactacgtccacctacaggggaaggaggagtttgagaagacccagaaggagctgctggaaaagggcagcatcacgcggcagggcaagagccagctggagttgcagcagctgaagcagtttgaacgactggaacaggaggtgtcacggcccatagaccacgacctggccaactggacgccagcccaacccctggccccggggcgaacaggcggcctggggccctcggaccggcagctgctgctcttctacctggagcagtgtgaggccaacctgaccacactgaccaacgccgtggacgccttctttaccgccgtggccaccaaccagccgcccaagatctttgtggcgcacagcaagttcgtcatcctcagcgcccacaagctggtgttcatcggggacacactgtcacggcaggccaaggctgctgacgtgcgcagccaggtgacccactacagcaacctgctgtgcgacctcctgcgcggcatcgtggccaccaccaaggccgctgccttgcagtacccatcgccttccgcggcccaggacatggtggagagggtcaaggagctgggccacagcacccagcagttccgccgcgtcctaggccagctggcagccgcctgagggtggtgaccccaggagggaggcaggggaggggtgcggcggtcccagctccctggctcccatgtcaagagtcgctgtgccacaggcttagggacaggaccccagctctgcgtcggtcctggtgccctggatgcccaggaatctgtatatatttatggccgggcagggtgtggggccatgcctcctcaggagccgaagcccaggggccggccagtggccttccccagcatgcaccacgggcccgggttgggtcaccagacggggctggagtgtgagggtcctgcagcctgcaggacctcgtgccaccccgagggctgagcctggtcccacgagggtgccgtgtcccctgacagggccagtgcagtttggtgtgtcctccgccttaccaggagaagaacctgaagaactatttttcgttattggttttccaatcatttgactaagagtctccatttaaataaagtttttaaaaggaagagc

SEQ ID NO: 605 - DNA, 4659 bp, Homo sapiens
  source 1..4659: mol_type = genomic DNA
actttcctgggaagttttcctctcgctgcggaacccccggggccctgactggccgcttcctccccgctggccgtagggagttttctgtccgacaccccctcttcctggccgggcagcctggcttcggcagacccccgggccatgtttccacacttgggcactggcatctctgagcatctcagtctcacctcctgagaacagcaagtgatcctggctaccccgggtaaccaggcctcaggtgcaggccccacatgacagatggacagactgaagtgggaggtgggaggcggacaccccggcgtcctgccaggaagggacaccatctgcacctggcgagctgtggcctccagccatcgtttccctgcctagttaggggcttttccctccagagccctgtccactctggccttgtttctggaactgctcctcacccggaggaccccatcctttccgtgaagcaggcagtgggggctttctggcaagtggcctcttcattaactatcccagagtgagtgcagatgaccagagggaagctggccaagtgcaaagcattgttattgtggaattaaagagcccgctcctgctcgcctccagaagtggtaatgtatttacagatgaaaaaatgagggcttccagactgtgctgatgtgagccccgccatccgttctggttcagagcataatcgtctcgtcttcagaaagaaggaagacagaacatgcctgccaagcccttcctctcttctgttctgctctcctggaaagttctggacttctctggcccagggcctcaggggactggccagccctgctcctgtgggcactgggcagagggacaaggcggaccacctgagcctgctggagggccggtatcccagggcagtagtgattagggaatgtcactctggccacatcccagcctgggcgggcctctatggggaggtccccgtttgatttggtttggttgtccacagtcagagccaagctctgggcatggagtctgggatggcaccctgaccccttgccttacaggactttgggcagccttctttggcactgtgcctcatctgtaacaagagaggaacagcgggctgggtaggacttggacagataggcactgtcgtggggacctgcagcctggccacaccatcacgggctctgagtcatctcctaccctctcccttgtagtcacagcccaggagaattctgctgggggtgggcagaggtctttgccatctgccccctacgtggctggctggcagatcaccgtggctctctctcctgggaccttgggcagtgtgtgaggtggtggggccaagaggagaattcatttttggaacagtcttgaagtgttcggaaaattgctttcatgtgctgaggaggccctgcggaggcttccagactgagctgcctgctcaagccctgcccttggaacccagagtggcgactgctcagggacacgtctgggttttaagcacacccatccatttgggcagtcttttcctagatgggctgacgcagcaggcactttggcccacagaaattataagatgcttcagaaggggatgggaggggaagcaggaacgtgctggccaaagcgctctatgacaatgtggccgagtccccggatgagctctccttccgcaagggtgacatcatgacggtgctggagcaggacacgcagggcctggacggctggtggctctgctcgctgcatgggcgccagggcatcgtgcctgggaaccgcctcaagatcttggtgggcatgtatgataagaagccagcagggcctggccccggccctcccgccaccccggcccagcctcagcctggcctccatgccccagcgcctccggcctcccagtacacgcccatgctccccaacacctaccagccccagccagacagcgtctacctggtgcccactcccagcaaggctcagcaaggcctctaccaagtcccgggtcccagccctcagttccagtctcccccagccaagcagacatccaccttctcgaagcagacaccccatcacccgtttcccagcccggccacagacctgtaccaggtgcccccagggcctggaggccctgcccaggatatttaccaggtgccaccttctgccgggatggggcatgacatctaccaggtccccccgtccatggacacacgcagctgggagggcacgaagcccccggcaaaggtggtggtgcccacccgcgtggggcagggctatgtatacgaggccgcccagccggagcaggacgagtacgacatcccgcgacacctgctggccccggggccacaggacatctatgatgtgcccccggttcgggggctgcttcccagccagtatggccaggaggtgtatgacacaccccccatggctgtcaagggtcccaatggccgagacccgttgctggaggtgtatgacgtgccccccagtgtggagaagggcctgccaccgtccaaccaccacgcagtctacgacgttcctccatcggtgagcaaggatgtgcccgatggcccactgctgcgtgaggagacctacgatgtgccccccgccttcgccaaggccaagccctttgacccggcccgcaccccactggtactggctgcgccccctccagactccccgccggccgaggacgtgtatgacgtgccgcccccggctcctgacctctacgacgtgccccctggcttgcggcggcctggcccgggcaccctgtacgatgtgccccgtgaacgggtgcttcctcctgaggtggctgatggtggcgtggtcgacagtggtgtgtatgcggtgcctcccccagctgaacgtgaagccccggcagagggcaagcgcctgtcggcctccagcaccggcagcacacgcagcagccagtctgcgtcctccttggaggtggcagggccgggccgggaacccctggagctggaagttgctgtggaggccctggcacggctgcagcagggtgtgagcgccaccgttgcccaccttctggacctggcaggcagcgccggtgcgactgggagctggcgtagcccctctgagccacaggagccgctggtgcaggacctgcaggctgctgtggccgctgtccagagtgccgtccacgagctgttggagtttgcccgcagcgcggtgggcaatgctgcccacacatctgaccgtgccctgcatgccaagcttagccggcagctgcagaagatggaggacgtgcaccagacgctggtggcacatggtcaggccctcgacgctggccggggaggctctggagccacccttgaggacctggaccggctggtggcctgctcgcgggctgtgcccgaggacgccaagcagctggcctccttcctgcacggcaatgcctcactgctcttcagacggaccaaggccactgccccggggcctgaggggggtggcaccctgcaccccaaccccactgacaagaccagcagcatccagtcacgacccctgccctcaccccctaagttcacctcccaggactcgccagatgggcagtacgagaacagcgaggggggctggatggaggactatgactacgtccacctacaggggaaggaggagtttgagaagacccagaaggagctgctggaaaagggcagcatcacgcggcagggcaagagccagctggagttgcagcagctgaagcagtttgaacgactggaacaggaggtgtcacggcccatagaccacgacctggccaactggacgccagcccaacccctggccccggggcgaacaggcggcctggggccctcggaccggcagctgctgctcttctacctggagcagtgtgaggccaacctgaccacactgaccaacgccgtggacgccttctttaccgccgtggccaccaaccagccgcccaagatctttgtggcgcacagcaagttcgtcatcctcagcgcccacaagctggtgttcatcggggacacactgtcacggcaggccaaggctgctgacgtgcgcagccaggtgacccactacagcaacctgctgtgcgacctcctgcgcggcatcgtggccaccaccaaggccgctgccttgcagtacccatcgccttccgcggcccaggacatggtggagagggtcaaggagctgggccacagcacccagcagttccgccgcgtcctaggccagctggcagccgcctgagggtggtgaccccaggagggaggcaggggaggggtgcggcggtcccagctccctggctcccatgtcaagagtcgctgtgccacaggcttagggacaggaccccagctctgcgtcggtcctggtgccctggatgcccaggaatctgtatatatttatggccgggcagggtgtggggccatgcctcctcaggagccgaagcccaggggccggccagtggccttccccagcatgcaccacgggcccgggttgggtcaccagacggggctggagtgtgagggtcctgcagcctgcaggacctcgtgccaccccgagggctgagcctggtcccacgagggtgccgtgtcccctgacagggccagtgcagtttggtgtgtcctccgccttaccaggagaagaacctgaagaactatttttcgttattggttttccaatcatttgactaagagtctccatttaaataaagtttttaaaaggaagagc

SEQ ID NO: 606 - DNA, 1445 bp, Homo sapiens
  source 1..1445: mol_type = genomic DNA
gatgacgcacacggaagcaccgataggctctgcctcccgaagaaaagggagccgcgcagcgcctacgggagtccggcggcagcagccggtaccggcaaccacgggcagctctcagggaatctccgtcgtgaggccagaggctccagtccccgcgagtccagatgcctgtccagcctccaagcaaagacacagaagagatggaagcagagggtgattctgctgctgagatgaatggggaggaggaagagagtgaggaggagcggagcggcagccagacagagtcagaagaggagagctccgagatggatgatgaggactatgagcgacgccgcagcgagtgtgtcagtgagatgctggacctagagaagcagttctcggagctaaaggagaagttgttcagggaacgactgagtcagctgcggttgcggctggaggaagtgggggctgagagagcccctgaatacacggagccccttggggggctgcagcggagcctcaagattcgcattcaggtggcagggatctacaagggcttctgtctggatgtgatcaggaataagtacgaatgtgagctgcagggagccaaacagcacctggagagtgagaagctgctgctctatgacacgctgcagggggagctgcaggagcggatccagaggctggaggaggaccgccagagcctggacctcagctctgaatggtgggatgacaaactgcacgccagaggcagctccaggtcttgggactccctgccgcccagcaagaggaagaaggcacctctggtttctggcccatacatcgtgtacatgcttcaagagatcgacatcctggaggactggacagccatcaaaaaggctagggcagctgtgtcccctcagaagagaaaatcggatggaccttgaccctgctgttcacagccagggggaccctcagagcagctggcactgcacccaggattctcgtcttcctcctgcagacaggcggacccacaggcccctcagggtctgcccagccaggctcctgtggtgctgctgggccctcccactccatctggcactggcctggactcctcctctgccctcctcgaggcctgcacagctgtggccgtggagctgacctgaccaggcaaggctgctgtctccatccctgagccgcctgccacctcccactcctgaagatccatctcttggggctcccctgacagagaagacagccgaagtcaaagccacatcctcttgctgatgttggatgcaggctgtccggcctcagggccagggagccagtttccactgtgcgggaactctgagtcagacgtgattatctgggggtctgtccaccctggctggatctggaggcaagatgccaggccccccaggtgttctcagggcagttcttggtgtctgcttctcagattccaaggactggaattaaaacctttcctggga

SEQ ID NO: 607 - DNA, 1363 bp, Homo sapiens
  source 1..1363: mol_type = genomic DNA
gcacacggaagcaccgataggctctgcctcccgaagaaaagggagccgcgcagcgcctacgggagtccggcggcagcagccggtaccggcaaccacgggcagctctcagggaatctccgtcgtgaggccagaggctccagtccccgcgagtccagatgcctgtccagcctccaagcaaagacacagaagagatggaagcagagggtgattctgctgctgagatgaatggggaggaggaagagagtgaggaggagcggagcggcagccagacagagtcagaagaggagagctccgagatggatgatgaggactatgagcgacgccgcagcgagtgtgtcagtgagatgctggacctagagaagcagttctcggagctaaaggagaagttgttcagggaacgactgagtcagctgcggttgcggctggaggaagtgggggctgagagagcccctgaatacacggagccccttggggggctgcagcggagcctcaagattcgcattcaggtggcagggatctacaagggcttctgtctggatgtgatcaggaataagtacgaatgtgagctgcagggagccaaacagcacctggagagtgagaagctgctgctctatgacacgctgcagggggagctgcaggagcggatccagaggctggaggaggaccgccagagcctggacctcagctctgaatggtgggatgacaaactgcacgccagaggcagctccaggtcttgggactccctgccgcccagcaagaggaagaaggcacctctggtttctggcccatacatcgtgtacatgcttcaagagatcgacatcctggaggactggacagccatcaaaaaggctagggcagctgtgtcccctcagaagagaaaatcggatgacaggcggacccacaggcccctcagggtctgcccagccaggctcctgtggtgctgctgggccctcccactccatctggcactggcctggactcctcctctgccctcctcgaggcctgcacagctgtggccgtggagctgacctgaccaggcaaggctgctgtctccatccctgagccgcctgccacctcccactcctgaagatccatctcttggggctcccctgacagagaagacagccgaagtcaaagccacatcctcttgctgatgttggatgcaggctgtccggcctcagggccagggagccagtttccactgtgcgggaactctgagtcagacgtgattatctgggggtctgtccaccctggctggatctggaggcaagatgccaggccccccaggtgttctcagggcagttcttggtgtctgcttctcagattccaaggactggaattaaaacctttcctgggactctgg

SEQ ID NO: 608 - DNA, 963 bp, Homo sapiens
  source 1..963: mol_type = genomic DNA
agaagggagcgggaggccccctgggcgctgcggagaagctggattgacctctgcgagagtggggagggtctgccttccctaggggcctgccccggaggagctgccattctgaaaagataaattgcctgtgtacagcgctttacagtgtgcttttccatcccttaccacctgtgagctcctcaacactcagagcaggaatggttatccgctttttgcacccgggagtccagatgcctgtccagcctccaagcaaagacacagaagagatggaagcagagggtgattctgctgctgagatgaatggggaggaggaagagagtgaggaggagcggagcggcagccagacagagtcagaagaggagagctccgagatggatgatgaggactatgagcgacgccgcagcgagtgtgtcagtgagatgctggacctagagaagcagttctcggagctaaaggagaagttgttcagggaacgactgagtcagctgcggttgcggctggaggaagtgggggctgagagagcccctgaatacacggagccccttggggggctgcagcggagcctcaagattcgcattcaggtggcagggatctacaagggcttctgtctggatgtgatcaggaataagtacgaatgtgagctgcagggagccaaacagcacctggagagtgagaagctgctgctctatgacacgctgcagggggagctgcaggagcggatccagaggctggaggaggaccgccagagcctggacctcagctctgaatggtgggatgacaaactgcacgccagaggcagctccaggtcttgggactccctgccgcccagcaagaggaagaaggcacctctggtttctggcccatacatcgtgtacatgcttcaagagatcgacatcctggaggactggacagccatcaaaaaggctagggcagctgtgtcccctcagaagagaaaatcggatg

SEQ ID NO: 609 - DNA, 2338 bp, Homo sapiens
  source 1..2338: mol_type = genomic DNA
cgcgcccctccctcctcgcggacctggcggtgccggcgcccggagtggccctttaaaaggcagcttattgtccggagggggcgggcggggggcgccgaccgcggcctgaggcccggcccctcccctctccctccctctgtccccgcgtcgctcgctggctagctcgctggctcgctcgcccgtccggcgcacgctccgcctccgtcagttggctccgctgtcgggtgcgcggcgtggagcggcagccggtctggacgcgcggccggggctgggggctgggagcgcggcgcgcaagatctccccgcgcgagagcggcccctgccaccgggcgaggcctgcgccgcgatggcagagatgggcagtaaaggggtgacggcgggaaagatcgccagcaacgtgcagaagaagctcacccgcgcgcaggagaaggttctccagaagctggggaaggcagatgagaccaaggatgagcagtttgagcagtgcgtccagaatttcaacaagcagctgacggagggcacccggctgcagaaggatctccggacctacctggcctccgtcaaagccatgcacgaggcttccaagaagctgaatgagtgtctgcaggaggtgtatgagcccgattggcccggcagggatgaggcaaacaagatcgcagagaacaacgacctgctgtggatggattaccaccagaagctggtggaccaggcgctgctgaccatggacacgtacctgggccagttccccgacatcaagtcacgcattgccaagcgggggcgcaagctggtggactacgacagtgcccggcaccactacgagtcccttcaaactgccaaaaagaaggatgaagccaaaattgccaaggccgaggaggagctcatcaaagcccagaaggtgtttgaggagatgaatgtggatctgcaggaggagctgccgtccctgtggaacagccgcgtaggtttctacgtcaacacgttccagagcatcgcgggcctggaggaaaacttccacaaggagatgagcaagctcaaccagaacctcaatgatgtgctggtcggcctggagaagcaacacgggagcaacaccttcacggtcaaggcccagcccagaaagaaaagtaaactgttttcgcggctgcgcagaaagaagaacagtgacaacgcgcctgcaaaagggaacaagagcccttcgcctccagatggctcccctgccgccacccccgagatcagagtcaaccacgagccagagccggccggcggggccacgcccggggccaccctccccaagtccccatctcagctccggaaaggcccaccagtccctccgcctcccaaacacaccccgtccaaggaagtcaagcaggagcagatcctcagcctgtttgaggacacgtttgtccctgagatcagcgtgaccaccccctcccagccagcagaggcctcggaggtggcgggtgggacccaacctgcggctggagcccaggagccaggggagacggcggcaagtgaagcagcctccagctctcttcctgctgtcgtggtggagaccttcccagcaactgtgaatggcaccgtggagggcggcagtggggccgggcgcttggacctgcccccaggtttcatgttcaaggtacaggcccagcacgactacacggccactgacacagacgagctgcagctcaaggctggtgatgtggtgctggtgatccccttccagaaccctgaagagcaggatgaaggctggctcatgggcgtgaaggagagcgactggaaccagcacaaggagctggagaagtgccgtggcgtcttccccgagaacttcactgagagggtcccatgacggcggggcccaggcagcctccgggcgtgtgaagaacacctcctcccgaaaaatgtgtggttcttttttttgttttgttttcgtttttcatcttttgaagagcaaagggaaatcaagaggagacccccaggcagaggggcgttctcccaaagattaggtcgttttccaaagagccgcgtcccggcaagtccggcggaattcaccagtgttcctgaagctgctgtgtcctctagttgagtttctggcgcccctgcctgtgcccgcatgtgtgcctggccgcagggcggggctgggggctgccgagccaccatgcttgcctgaagcttcggccgcgccacccgggcaagggtcctcttttcctggcagctgctgtgggtggggcccagacaccagcctagcctggctctgccccgcagacggtctgtgtgctgtttgaaaataaatcttagtgttcaaaacaaaatgaaacaaaaaaaaaatgataaaaactctcagaaaa

SEQ ID NO: 610 - DNA, 2693 bp, Homo sapiens
  source 1..2693: mol_type = genomic DNA
tccccgccccggggcggtgcagctggagcgtcaggggagtcccgctcgccgcagccccagcgccgcgcgcgcccctccctcctcgcggacctggcggtgccggcgcccggagtggccctttaaaaggcagcttattgtccggagggggcgggcggggggcgccgaccgcggcctgaggcccggcccctcccctctccctccctctgtccccgcgtcgctcgctggctagctcgctggctcgctcgcccgtccggcgcacgctccgcctccgtcagttggctccgctgtcgggtgcgcggcgtggagcggcagccggtctggacgcgcggccggggctgggggctgggagcgcggcgcgcaagatctccccgcgcgagagcggcccctgccaccgggcgaggcctgcgccgcgatggcagagatgggcagtaaaggggtgacggcgggaaagatcgccagcaacgtgcagaagaagctcacccgcgcgcaggagaaggttctccagaagctggggaaggcagatgagaccaaggatgagcagtttgagcagtgcgtccagaatttcaacaagcagctgacggagggcacccggctgcagaaggatctccggacctacctggcctccgtcaaagccatgcacgaggcttccaagaagctgaatgagtgtctgcaggaggtgtatgagcccgattggcccggcagggatgaggcaaacaagatcgcagagaacaacgacctgctgtggatggattaccaccagaagctggtggaccaggcgctgctgaccatggacacgtacctgggccagttccccgacatcaagtcacgcattgccaagcgggggcgcaagctggtggactacgacagtgcccggcaccactacgagtcccttcaaactgccaaaaagaaggatgaagccaaaattgccaagcctgtctcgctgcttgagaaagccgccccccagtggtgccaaggcaaactgcaggctcatctcgtagctcaaactaacctgctccgaaatcaggccgaggaggagctcatcaaagcccagaaggtgtttgaggagatgaatgtggatctgcaggaggagctgccgtccctgtggaacagccgcgtaggtttctacgtcaacacgttccagagcatcgcgggcctggaggaaaacttccacaaggagatgagcaagctcaaccagaacctcaatgatgtgctggtcggcctggagaagcaacacgggagcaacaccttcacggtcaaggcccagcccagtgacaacgcgcctgcaaaagggaacaagagcccttcgcctccagatggctcccctgccgccacccccgagatcagagtcaaccacgagccagagccggccggcggggccacgcccggggccaccctccccaagtccccatctcagctccggaaaggcccaccagtccctccgcctcccaaacacaccccgtccaaggaagtcaagcaggagcagatcctcagcctgtttgaggacacgtttgtccctgagatcagcgtgaccaccccctcccagtttgaggccccggggcctttctcggagcaggccagtctgctggacctggactttgaccccctcccgcccgtgacgagccctgtgaaggcacccacgccctctggtcagtcaattccatgggacctctgggagcccacagagagtccagccggcagcctgccttccggggagcccagcgctgccgagggcacctttgctgtgtcctggcccagccagacggccgagccggggcctgcccaaccagcagaggcctcggaggtggcgggtgggacccaacctgcggctggagcccaggagccaggggagacggcggcaagtgaagcagcctccagctctcttcctgctgtcgtggtggagaccttcccagcaactgtgaatggcaccgtggagggcggcagtggggccgggcgcttggacctgcccccaggtttcatgttcaaggtacaggcccagcacgactacacggccactgacacagacgagctgcagctcaaggctggtgatgtggtgctggtgatccccttccagaaccctgaagagcaggatgaaggctggctcatgggcgtgaaggagagcgactggaaccagcacaaggagctggagaagtgccgtggcgtcttccccgagaacttcactgagagggtcccatgacggcggggcccaggcagcctccgggcgtgtgaagaacacctcctcccgaaaaatgtgtggttcttttttttgttttgttttcgtttttcatcttttgaagagcaaagggaaatcaagaggagacccccaggcagaggggcgttctcccaaagattaggtcgttttccaaagagccgcgtcccggcaagtccggcggaattcaccagtgttcctgaagctgctgtgtcctctagttgagtttctggcgcccctgcctgtgcccgcatgtgtgcctggccgcagggcggggctgggggctgccgagccaccatgcttgcctgaagcttcggccgcgccacccgggcaagggtcctcttttcctggcagctgctgtgggtggggcccagacaccagcctagcctggctctgccccgcagacggtctgtgtgctgtttgaaaataaatcttagtgttcaaaacaaaatgaaacaaaaaaaaaatgataaaaactctcagaaaa

SEQ ID NO: 611 - DNA, 2401 bp, Homo sapiens
  source 1..2401: mol_type = genomic DNA
cgcgcccctccctcctcgcggacctggcggtgccggcgcccggagtggccctttaaaaggcagcttattgtccggagggggcgggcggggggcgccgaccgcggcctgaggcccggcccctcccctctccctccctctgtccccgcgtcgctcgctggctagctcgctggctcgctcgcccgtccggcgcacgctccgcctccgtcagttggctccgctgtcgggtgcgcggcgtggagcggcagccggtctggacgcgcggccggggctgggggctgggagcgcggcgcgcaagatctccccgcgcgagagcggcccctgccaccgggcgaggcctgcgccgcgatggcagagatgggcagtaaaggggtgacggcgggaaagatcgccagcaacgtgcagaagaagctcacccgcgcgcaggagaaggttctccagaagctggggaaggcagatgagaccaaggatgagcagtttgagcagtgcgtccagaatttcaacaagcagctgacggagggcacccggctgcagaaggatctccggacctacctggcctccgtcaaagccatgcacgaggcttccaagaagctgaatgagtgtctgcaggaggtgtatgagcccgattggcccggcagggatgaggcaaacaagatcgcagagaacaacgacctgctgtggatggattaccaccagaagctggtggaccaggcgctgctgaccatggacacgtacctgggccagttccccgacatcaagtcacgcattgccaagcgggggcgcaagctggtggactacgacagtgcccggcaccactacgagtcccttcaaactgccaaaaagaaggatgaagccaaaattgccaaggccgaggaggagctcatcaaagcccagaaggtgtttgaggagatgaatgtggatctgcaggaggagctgccgtccctgtggaacagccgcgtaggtttctacgtcaacacgttccagagcatcgcgggcctggaggaaaacttccacaaggagatgagcaagctcaaccagaacctcaatgatgtgctggtcggcctggagaagcaacacgggagcaacaccttcacggtcaaggcccagcccagtgacaacgcgcctgcaaaagggaacaagagcccttcgcctccagatggctcccctgccgccacccccgagatcagagtcaaccacgagccagagccggccggcggggccacgcccggggccaccctccccaagtccccatctcagctccggaaaggcccaccagtccctccgcctcccaaacacaccccgtccaaggaagtcaagcaggagcagatcctcagcctgtttgaggacacgtttgtccctgagatcagcgtgaccaccccctcccagcccacagagagtccagccggcagcctgccttccggggagcccagcgctgccgagggcacctttgctgtgtcctggcccagccagacggccgagccggggcctgcccaaccagcagaggcctcggaggtggcgggtgggacccaacctgcggctggagcccaggagccaggggagacggcggcaagtgaagcagcctccagctctcttcctgctgtcgtggtggagaccttcccagcaactgtgaatggcaccgtggagggcggcagtggggccgggcgcttggacctgcccccaggtttcatgttcaaggtacaggcccagcacgactacacggccactgacacagacgagctgcagctcaaggctggtgatgtggtgctggtgatccccttccagaaccctgaagagcaggatgaaggctggctcatgggcgtgaaggagagcgactggaaccagcacaaggagctggagaagtgccgtggcgtcttccccgagaacttcactgagagggtcccatgacggcggggcccaggcagcctccgggcgtgtgaagaacacctcctcccgaaaaatgtgtggttcttttttttgttttgttttcgtttttcatcttttgaagagcaaagggaaatcaagaggagacccccaggcagaggggcgttctcccaaagattaggtcgttttccaaagagccgcgtcccggcaagtccggcggaattcaccagtgttcctgaagctgctgtgtcctctagttgagtttctggcgcccctgcctgtgcccgcatgtgtgcctggccgcagggcggggctgggggctgccgagccaccatgcttgcctgaagcttcggccgcgccacccgggcaagggtcctcttttcctggcagctgctgtgggtggggcccagacaccagcctagcctggctctgccccgcagacggtctgtgtgctgtttgaaaataaatcttagtgttcaaaacaaaatgaaacaaaaaaaaaatgataaaaactctcagaaaa

SEQ ID NO: 612 - DNA, 2074 bp, Homo sapiens
  source 1..2074: mol_type = genomic DNA
cgcgcccctccctcctcgcggacctggcggtgccggcgcccggagtggccctttaaaaggcagcttattgtccggagggggcgggcggggggcgccgaccgcggcctgaggcccggcccctcccctctccctccctctgtccccgcgtcgctcgctggctagctcgctggctcgctcgcccgtccggcgcacgctccgcctccgtcagttggctccgctgtcgggtgcgcggcgtggagcggcagccggtctggacgcgcggccggggctgggggctgggagcgcggcgcgcaagatctccccgcgcgagagcggcccctgccaccgggcgaggcctgcgccgcgatggcagagatgggcagtaaaggggtgacggcgggaaagatcgccagcaacgtgcagaagaagctcacccgcgcgcaggagaaggttctccagaagctggggaaggcagatgagaccaaggatgagcagtttgagcagtgcgtccagaatttcaacaagcagctgacggagggcacccggctgcagaaggatctccggacctacctggcctccgtcaaagccatgcacgaggcttccaagaagctgaatgagtgtctgcaggaggtgtatgagcccgattggcccggcagggatgaggcaaacaagatcgcagagaacaacgacctgctgtggatggattaccaccagaagctggtggaccaggcgctgctgaccatggacacgtacctgggccagttccccgacatcaagtcacgcattgccaagcgggggcgcaagctggtggactacgacagtgcccggcaccactacgagtcccttcaaactgccaaaaagaaggatgaagccaaaattgccaaggccgaggaggagctcatcaaagcccagaaggtgtttgaggagatgaatgtggatctgcaggaggagctgccgtccctgtggaacagccgcgtaggtttctacgtcaacacgttccagagcatcgcgggcctggaggaaaacttccacaaggagatgagcaagctcaaccagaacctcaatgatgtgctggtcggcctggagaagcaacacgggagcaacaccttcacggtcaaggcccagcccagtgacaacgcgcctgcaaaagggaacaagagcccttcgcctccagatggctcccctgccgccacccccgagatcagagtcaaccacgagccagagccggccggcggggccacgcccggggccaccctccccaagtccccatctcagagctctcttcctgctgtcgtggtggagaccttcccagcaactgtgaatggcaccgtggagggcggcagtggggccgggcgcttggacctgcccccaggtttcatgttcaaggtacaggcccagcacgactacacggccactgacacagacgagctgcagctcaaggctggtgatgtggtgctggtgatccccttccagaaccctgaagagcaggatgaaggctggctcatgggcgtgaaggagagcgactggaaccagcacaaggagctggagaagtgccgtggcgtcttccccgagaacttcactgagagggtcccatgacggcggggcccaggcagcctccgggcgtgtgaagaacacctcctcccgaaaaatgtgtggttcttttttttgttttgttttcgtttttcatcttttgaagagcaaagggaaatcaagaggagacccccaggcagaggggcgttctcccaaagattaggtcgttttccaaagagccgcgtcccggcaagtccggcggaattcaccagtgttcctgaagctgctgtgtcctctagttgagtttctggcgcccctgcctgtgcccgcatgtgtgcctggccgcagggcggggctgggggctgccgagccaccatgcttgcctgaagcttcggccgcgccacccgggcaagggtcctcttttcctggcagctgctgtgggtggggcccagacaccagcctagcctggctctgccccgcagacggtctgtgtgctgtttgaaaataaatcttagtgttcaaaacaaaatgaaacaaaaaaaaaatgataaaaactctcagaaaa

SEQ ID NO: 613 - DNA, 2365 bp, Homo sapiens
  source 1..2365: mol_type = genomic DNA
cgcgcccctccctcctcgcggacctggcggtgccggcgcccggagtggccctttaaaaggcagcttattgtccggagggggcgggcggggggcgccgaccgcggcctgaggcccggcccctcccctctccctccctctgtccccgcgtcgctcgctggctagctcgctggctcgctcgcccgtccggcgcacgctccgcctccgtcagttggctccgctgtcgggtgcgcggcgtggagcggcagccggtctggacgcgcggccggggctgggggctgggagcgcggcgcgcaagatctccccgcgcgagagcggcccctgccaccgggcgaggcctgcgccgcgatggcagagatgggcagtaaaggggtgacggcgggaaagatcgccagcaacgtgcagaagaagctcacccgcgcgcaggagaaggttctccagaagctggggaaggcagatgagaccaaggatgagcagtttgagcagtgcgtccagaatttcaacaagcagctgacggagggcacccggctgcagaaggatctccggacctacctggcctccgtcaaagccatgcacgaggcttccaagaagctgaatgagtgtctgcaggaggtgtatgagcccgattggcccggcagggatgaggcaaacaagatcgcagagaacaacgacctgctgtggatggattaccaccagaagctggtggaccaggcgctgctgaccatggacacgtacctgggccagttccccgacatcaagtcacgcattgccaagcgggggcgcaagctggtggactacgacagtgcccggcaccactacgagtcccttcaaactgccaaaaagaaggatgaagccaaaattgccaagcctgtctcgctgcttgagaaagccgccccccagtggtgccaaggcaaactgcaggctcatctcgtagctcaaactaacctgctccgaaatcaggccgaggaggagctcatcaaagcccagaaggtgtttgaggagatgaatgtggatctgcaggaggagctgccgtccctgtggaacagccgcgtaggtttctacgtcaacacgttccagagcatcgcgggcctggaggaaaacttccacaaggagatgagcaagctcaaccagaacctcaatgatgtgctggtcggcctggagaagcaacacgggagcaacaccttcacggtcaaggcccagcccagtgacaacgcgcctgcaaaagggaacaagagcccttcgcctccagatggctcccctgccgccacccccgagatcagagtcaaccacgagccagagccggccggcggggccacgcccggggccaccctccccaagtccccatctcagcccacagagagtccagccggcagcctgccttccggggagcccagcgctgccgagggcacctttgctgtgtcctggcccagccagacggccgagccggggcctgcccaaccagcagaggcctcggaggtggcgggtgggacccaacctgcggctggagcccaggagccaggggagacggcggcaagtgaagcagcctccagctctcttcctgctgtcgtggtggagaccttcccagcaactgtgaatggcaccgtggagggcggcagtggggccgggcgcttggacctgcccccaggtttcatgttcaaggtacaggcccagcacgactacacggccactgacacagacgagctgcagctcaaggctggtgatgtggtgctggtgatccccttccagaaccctgaagagcaggatgaaggctggctcatgggcgtgaaggagagcgactggaaccagcacaaggagctggagaagtgccgtggcgtcttccccgagaacttcactgagagggtcccatgacggcggggcccaggcagcctccgggcgtgtgaagaacacctcctcccgaaaaatgtgtggttcttttttttgttttgttttcgtttttcatcttttgaagagcaaagggaaatcaagaggagacccccaggcagaggggcgttctcccaaagattaggtcgttttccaaagagccgcgtcccggcaagtccggcggaattcaccagtgttcctgaagctgctgtgtcctctagttgagtttctggcgcccctgcctgtgcccgcatgtgtgcctggccgcagggcggggctgggggctgccgagccaccatgcttgcctgaagcttcggccgcgccacccgggcaagggtcctcttttcctggcagctgctgtgggtggggcccagacaccagcctagcctggctctgccccgcagacggtctgtgtgctgtttgaaaataaatcttagtgttcaaaacaaaatgaaacaaaaaaaaaatgataaaaactctcagaaaa

SEQ ID NO: 614 - DNA, 2209 bp, Homo sapiens
  source 1..2209: mol_type = genomic DNA
cgcgcccctccctcctcgcggacctggcggtgccggcgcccggagtggccctttaaaaggcagcttattgtccggagggggcgggcggggggcgccgaccgcggcctgaggcccggcccctcccctctccctccctctgtccccgcgtcgctcgctggctagctcgctggctcgctcgcccgtccggcgcacgctccgcctccgtcagttggctccgctgtcgggtgcgcggcgtggagcggcagccggtctggacgcgcggccggggctgggggctgggagcgcggcgcgcaagatctccccgcgcgagagcggcccctgccaccgggcgaggcctgcgccgcgatggcagagatgggcagtaaaggggtgacggcgggaaagatcgccagcaacgtgcagaagaagctcacccgcgcgcaggagaaggttctccagaagctggggaaggcagatgagaccaaggatgagcagtttgagcagtgcgtccagaatttcaacaagcagctgacggagggcacccggctgcagaaggatctccggacctacctggcctccgtcaaagccatgcacgaggcttccaagaagctgaatgagtgtctgcaggaggtgtatgagcccgattggcccggcagggatgaggcaaacaagatcgcagagaacaacgacctgctgtggatggattaccaccagaagctggtggaccaggcgctgctgaccatggacacgtacctgggccagttccccgacatcaagtcacgcattgccaagcgggggcgcaagctggtggactacgacagtgcccggcaccactacgagtcccttcaaactgccaaaaagaaggatgaagccaaaattgccaaggccgaggaggagctcatcaaagcccagaaggtgtttgaggagatgaatgtggatctgcaggaggagctgccgtccctgtggaacagccgcgtaggtttctacgtcaacacgttccagagcatcgcgggcctggaggaaaacttccacaaggagatgagcaagctcaaccagaacctcaatgatgtgctggtcggcctggagaagcaacacgggagcaacaccttcacggtcaaggcccagcccagaaagaaaagtaaactgttttcgcggctgcgcagaaagaagaacagtgacaacgcgcctgcaaaagggaacaagagcccttcgcctccagatggctcccctgccgccacccccgagatcagagtcaaccacgagccagagccggccggcggggccacgcccggggccaccctccccaagtccccatctcagccagcagaggcctcggaggtggcgggtgggacccaacctgcggctggagcccaggagccaggggagacggcggcaagtgaagcagcctccagctctcttcctgctgtcgtggtggagaccttcccagcaactgtgaatggcaccgtggagggcggcagtggggccgggcgcttggacctgcccccaggtttcatgttcaaggtacaggcccagcacgactacacggccactgacacagacgagctgcagctcaaggctggtgatgtggtgctggtgatccccttccagaaccctgaagagcaggatgaaggctggctcatgggcgtgaaggagagcgactggaaccagcacaaggagctggagaagtgccgtggcgtcttccccgagaacttcactgagagggtcccatgacggcggggcccaggcagcctccgggcgtgtgaagaacacctcctcccgaaaaatgtgtggttcttttttttgttttgttttcgtttttcatcttttgaagagcaaagggaaatcaagaggagacccccaggcagaggggcgttctcccaaagattaggtcgttttccaaagagccgcgtcccggcaagtccggcggaattcaccagtgttcctgaagctgctgtgtcctctagttgagtttctggcgcccctgcctgtgcccgcatgtgtgcctggccgcagggcggggctgggggctgccgagccaccatgcttgcctgaagcttcggccgcgccacccgggcaagggtcctcttttcctggcagctgctgtgggtggggcccagacaccagcctagcctggctctgccccgcagacggtctgtgtgctgtttgaaaataaatcttagtgttcaaaacaaaatgaaacaaaaaaaaaatgataaaaactctcagaaaa

SEQ ID NO: 615 - DNA, 2497 bp, Homo sapiens
  source 1..2497: mol_type = genomic DNA
cgcgcccctccctcctcgcggacctggcggtgccggcgcccggagtggccctttaaaaggcagcttattgtccggagggggcgggcggggggcgccgaccgcggcctgaggcccggcccctcccctctccctccctctgtccccgcgtcgctcgctggctagctcgctggctcgctcgcccgtccggcgcacgctccgcctccgtcagttggctccgctgtcgggtgcgcggcgtggagcggcagccggtctggacgcgcggccggggctgggggctgggagcgcggcgcgcaagatctccccgcgcgagagcggcccctgccaccgggcgaggcctgcgccgcgatggcagagatgggcagtaaaggggtgacggcgggaaagatcgccagcaacgtgcagaagaagctcacccgcgcgcaggagaaggttctccagaagctggggaaggcagatgagaccaaggatgagcagtttgagcagtgcgtccagaatttcaacaagcagctgacggagggcacccggctgcagaaggatctccggacctacctggcctccgtcaaagccatgcacgaggcttccaagaagctgaatgagtgtctgcaggaggtgtatgagcccgattggcccggcagggatgaggcaaacaagatcgcagagaacaacgacctgctgtggatggattaccaccagaagctggtggaccaggcgctgctgaccatggacacgtacctgggccagttccccgacatcaagtcacgcattgccaagcgggggcgcaagctggtggactacgacagtgcccggcaccactacgagtcccttcaaactgccaaaaagaaggatgaagccaaaattgccaagcctgtctcgctgcttgagaaagccgccccccagtggtgccaaggcaaactgcaggctcatctcgtagctcaaactaacctgctccgaaatcaggccgaggaggagctcatcaaagcccagaaggtgtttgaggagatgaatgtggatctgcaggaggagctgccgtccctgtggaacagccgcgtaggtttctacgtcaacacgttccagagcatcgcgggcctggaggaaaacttccacaaggagatgagcaagctcaaccagaacctcaatgatgtgctggtcggcctggagaagcaacacgggagcaacaccttcacggtcaaggcccagcccagtgacaacgcgcctgcaaaagggaacaagagcccttcgcctccagatggctcccctgccgccacccccgagatcagagtcaaccacgagccagagccggccggcggggccacgcccggggccaccctccccaagtccccatctcagtttgaggccccggggcctttctcggagcaggccagtctgctggacctggactttgaccccctcccgcccgtgacgagccctgtgaaggcacccacgccctctggtcagtcaattccatgggacctctgggagcccacagagagtccagccggcagcctgccttccggggagcccagcgctgccgagggcacctttgctgtgtcctggcccagccagacggccgagccggggcctgcccaaccagcagaggcctcggaggtggcgggtgggacccaacctgcggctggagcccaggagccaggggagacggcggcaagtgaagcagcctccagctctcttcctgctgtcgtggtggagaccttcccagcaactgtgaatggcaccgtggagggcggcagtggggccgggcgcttggacctgcccccaggtttcatgttcaaggtacaggcccagcacgactacacggccactgacacagacgagctgcagctcaaggctggtgatgtggtgctggtgatccccttccagaaccctgaagagcaggatgaaggctggctcatgggcgtgaaggagagcgactggaaccagcacaaggagctggagaagtgccgtggcgtcttccccgagaacttcactgagagggtcccatgacggcggggcccaggcagcctccgggcgtgtgaagaacacctcctcccgaaaaatgtgtggttcttttttttgttttgttttcgtttttcatcttttgaagagcaaagggaaatcaagaggagacccccaggcagaggggcgttctcccaaagattaggtcgttttccaaagagccgcgtcccggcaagtccggcggaattcaccagtgttcctgaagctgctgtgtcctctagttgagtttctggcgcccctgcctgtgcccgcatgtgtgcctggccgcagggcggggctgggggctgccgagccaccatgcttgcctgaagcttcggccgcgccacccgggcaagggtcctcttttcctggcagctgctgtgggtggggcccagacaccagcctagcctggctctgccccgcagacggtctgtgtgctgtttgaaaataaatcttagtgttcaaaacaaaatgaaacaaaaaaaaaatgataaaaactctcagaaaa

SEQ ID NO: 616 - DNA, 2293 bp, Homo sapiens
  source 1..2293: mol_type = genomic DNA
cgcgcccctccctcctcgcggacctggcggtgccggcgcccggagtggccctttaaaaggcagcttattgtccggagggggcgggcggggggcgccgaccgcggcctgaggcccggcccctcccctctccctccctctgtccccgcgtcgctcgctggctagctcgctggctcgctcgcccgtccggcgcacgctccgcctccgtcagttggctccgctgtcgggtgcgcggcgtggagcggcagccggtctggacgcgcggccggggctgggggctgggagcgcggcgcgcaagatctccccgcgcgagagcggcccctgccaccgggcgaggcctgcgccgcgatggcagagatgggcagtaaaggggtgacggcgggaaagatcgccagcaacgtgcagaagaagctcacccgcgcgcaggagaaggttctccagaagctggggaaggcagatgagaccaaggatgagcagtttgagcagtgcgtccagaatttcaacaagcagctgacggagggcacccggctgcagaaggatctccggacctacctggcctccgtcaaagccatgcacgaggcttccaagaagctgaatgagtgtctgcaggaggtgtatgagcccgattggcccggcagggatgaggcaaacaagatcgcagagaacaacgacctgctgtggatggattaccaccagaagctggtggaccaggcgctgctgaccatggacacgtacctgggccagttccccgacatcaagtcacgcattgccaagcgggggcgcaagctggtggactacgacagtgcccggcaccactacgagtcccttcaaactgccaaaaagaaggatgaagccaaaattgccaaggccgaggaggagctcatcaaagcccagaaggtgtttgaggagatgaatgtggatctgcaggaggagctgccgtccctgtggaacagccgcgtaggtttctacgtcaacacgttccagagcatcgcgggcctggaggaaaacttccacaaggagatgagcaagctcaaccagaacctcaatgatgtgctggtcggcctggagaagcaacacgggagcaacaccttcacggtcaaggcccagcccagtgacaacgcgcctgcaaaagggaacaagagcccttcgcctccagatggctcccctgccgccacccccgagatcagagtcaaccacgagccagagccggccggcggggccacgcccggggccaccctccccaagtccccatctcagctccggaaaggcccaccagtccctccgcctcccaaacacaccccgtccaaggaagtcaagcaggagcagatcctcagcctgtttgaggacacgtttgtccctgagatcagcgtgaccaccccctcccagccagcagaggcctcggaggtggcgggtgggacccaacctgcggctggagcccaggagccaggggagacggcggcaagtgaagcagcctccagctctcttcctgctgtcgtggtggagaccttcccagcaactgtgaatggcaccgtggagggcggcagtggggccgggcgcttggacctgcccccaggtttcatgttcaaggtacaggcccagcacgactacacggccactgacacagacgagctgcagctcaaggctggtgatgtggtgctggtgatccccttccagaaccctgaagagcaggatgaaggctggctcatgggcgtgaaggagagcgactggaaccagcacaaggagctggagaagtgccgtggcgtcttccccgagaacttcactgagagggtcccatgacggcggggcccaggcagcctccgggcgtgtgaagaacacctcctcccgaaaaatgtgtggttcttttttttgttttgttttcgtttttcatcttttgaagagcaaagggaaatcaagaggagacccccaggcagaggggcgttctcccaaagattaggtcgttttccaaagagccgcgtcccggcaagtccggcggaattcaccagtgttcctgaagctgctgtgtcctctagttgagtttctggcgcccctgcctgtgcccgcatgtgtgcctggccgcagggcggggctgggggctgccgagccaccatgcttgcctgaagcttcggccgcgccacccgggcaagggtcctcttttcctggcagctgctgtgggtggggcccagacaccagcctagcctggctctgccccgcagacggtctgtgtgctgtttgaaaataaatcttagtgttcaaaacaaaatgaaacaaaaaaaaaatgataaaaactctcagaaaa

SEQ ID NO: 617 - DNA, 2272 bp, Homo sapiens
  source 1..2272: mol_type = genomic DNA
cgcgcccctccctcctcgcggacctggcggtgccggcgcccggagtggccctttaaaaggcagcttattgtccggagggggcgggcggggggcgccgaccgcggcctgaggcccggcccctcccctctccctccctctgtccccgcgtcgctcgctggctagctcgctggctcgctcgcccgtccggcgcacgctccgcctccgtcagttggctccgctgtcgggtgcgcggcgtggagcggcagccggtctggacgcgcggccggggctgggggctgggagcgcggcgcgcaagatctccccgcgcgagagcggcccctgccaccgggcgaggcctgcgccgcgatggcagagatgggcagtaaaggggtgacggcgggaaagatcgccagcaacgtgcagaagaagctcacccgcgcgcaggagaaggttctccagaagctggggaaggcagatgagaccaaggatgagcagtttgagcagtgcgtccagaatttcaacaagcagctgacggagggcacccggctgcagaaggatctccggacctacctggcctccgtcaaagccatgcacgaggcttccaagaagctgaatgagtgtctgcaggaggtgtatgagcccgattggcccggcagggatgaggcaaacaagatcgcagagaacaacgacctgctgtggatggattaccaccagaagctggtggaccaggcgctgctgaccatggacacgtacctgggccagttccccgacatcaagtcacgcattgccaagcgggggcgcaagctggtggactacgacagtgcccggcaccactacgagtcccttcaaactgccaaaaagaaggatgaagccaaaattgccaaggccgaggaggagctcatcaaagcccagaaggtgtttgaggagatgaatgtggatctgcaggaggagctgccgtccctgtggaacagccgcgtaggtttctacgtcaacacgttccagagcatcgcgggcctggaggaaaacttccacaaggagatgagcaagctcaaccagaacctcaatgatgtgctggtcggcctggagaagcaacacgggagcaacaccttcacggtcaaggcccagcccagtgacaacgcgcctgcaaaagggaacaagagcccttcgcctccagatggctcccctgccgccacccccgagatcagagtcaaccacgagccagagccggccggcggggccacgcccggggccaccctccccaagtccccatctcagcccacagagagtccagccggcagcctgccttccggggagcccagcgctgccgagggcacctttgctgtgtcctggcccagccagacggccgagccggggcctgcccaaccagcagaggcctcggaggtggcgggtgggacccaacctgcggctggagcccaggagccaggggagacggcggcaagtgaagcagcctccagctctcttcctgctgtcgtggtggagaccttcccagcaactgtgaatggcaccgtggagggcggcagtggggccgggcgcttggacctgcccccaggtttcatgttcaaggtacaggcccagcacgactacacggccactgacacagacgagctgcagctcaaggctggtgatgtggtgctggtgatccccttccagaaccctgaagagcaggatgaaggctggctcatgggcgtgaaggagagcgactggaaccagcacaaggagctggagaagtgccgtggcgtcttccccgagaacttcactgagagggtcccatgacggcggggcccaggcagcctccgggcgtgtgaagaacacctcctcccgaaaaatgtgtggttcttttttttgttttgttttcgtttttcatcttttgaagagcaaagggaaatcaagaggagacccccaggcagaggggcgttctcccaaagattaggtcgttttccaaagagccgcgtcccggcaagtccggcggaattcaccagtgttcctgaagctgctgtgtcctctagttgagtttctggcgcccctgcctgtgcccgcatgtgtgcctggccgcagggcggggctgggggctgccgagccaccatgcttgcctgaagcttcggccgcgccacccgggcaagggtcctcttttcctggcagctgctgtgggtggggcccagacaccagcctagcctggctctgccccgcagacggtctgtgtgctgtttgaaaataaatcttagtgttcaaaacaaaatgaaacaaaaaaaaaatgataaaaactctcagaaaa

SEQ ID NO: 618 - DNA, 2143 bp, Homo sapiens
  source 1..2143: mol_type = genomic DNA
cctcctcgcggacctggcggtgccggcgcccggagtggccctttaaaaggcagcttattgtccggagggggcgggcggggggcgccgaccgcggcctgaggcccggcccctcccctctccctccctctgtccccgcgtcgctcgctggctagctcgctggctcgctcgcccgtccggcgcacgctccgcctccgtcagttggctccgctgtcgggtgcgcggcgtggagcggcagccggtctggacgcgcggccggggctgggggctgggagcgcggcgcgcaagatctccccgcgcgagagcggcccctgccaccgggcgaggcctgcgccgcgatggcagagatgggcagtaaaggggtgacggcgggaaagatcgccagcaacgtgcagaagaagctcacccgcgcgcaggagaaggttctccagaagctggggaaggcagatgagaccaaggatgagcagtttgagcagtgcgtccagaatttcaacaagcagctgacggagggcacccggctgcagaaggatctccggacctacctggcctccgtcaaagccatgcacgaggcttccaagaagctgaatgagtgtctgcaggaggtgtatgagcccgattggcccggcagggatgaggcaaacaagatcgcagagaacaacgacctgctgtggatggattaccaccagaagctggtggaccaggcgctgctgaccatggacacgtacctgggccagttccccgacatcaagtcacgcattgccaagcgggggcgcaagctggtggactacgacagtgcccggcaccactacgagtcccttcaaactgccaaaaagaaggatgaagccaaaattgccaaggccgaggaggagctcatcaaagcccagaaggtgtttgaggagatgaatgtggatctgcaggaggagctgccgtccctgtggaacagccgcgtaggtttctacgtcaacacgttccagagcatcgcgggcctggaggaaaacttccacaaggagatgagcaagctcaaccagaacctcaatgatgtgctggtcggcctggagaagcaacacgggagcaacaccttcacggtcaaggcccagcccagtgacaacgcgcctgcaaaagggaacaagagcccttcgcctccagatggctcccctgccgccacccccgagatcagagtcaaccacgagccagagccggccggcggggccacgcccggggccaccctccccaagtccccatctcagccagcagaggcctcggaggtggcgggtgggacccaacctgcggctggagcccaggagccaggggagacggcggcaagtgaagcagcctccagctctcttcctgctgtcgtggtggagaccttcccagcaactgtgaatggcaccgtggagggcggcagtggggccgggcgcttggacctgcccccaggtttcatgttcaaggtacaggcccagcacgactacacggccactgacacagacgagctgcagctcaaggctggtgatgtggtgctggtgatccccttccagaaccctgaagagcaggatgaaggctggctcatgggcgtgaaggagagcgactggaaccagcacaaggagctggagaagtgccgtggcgtcttccccgagaacttcactgagagggtcccatgacggcggggcccaggcagcctccgggcgtgtgaagaacacctcctcccgaaaaatgtgtggttcttttttttgttttgttttcgtttttcatcttttgaagagcaaagggaaatcaagaggagacccccaggcagaggggcgttctcccaaagattaggtcgttttccaaagagccgcgtcccggcaagtccggcggaattcaccagtgttcctgaagctgctgtgtcctctagttgagtttctggcgcccctgcctgtgcccgcatgtgtgcctggccgcagggcggggctgggggctgccgagccaccatgcttgcctgaagcttcggccgcgccacccgggcaagggtcctcttttcctggcagctgctgtgggtggggcccagacaccagcctagcctggctctgccccgcagacggtctgtgtgctgtttgaaaataaatcttagtgttcaaaacaaaatgaaacaaaaaaaaaatgataaaaa

SEQ ID NO: 619 - DNA, 2297 bp, Homo sapiens
  source 1..2297: mol_type = genomic DNA
gagaggggcatcgcgccgcccggcgcgcgccgcccccctgcctcgcggcgcggggtctcgcgggccccgctcccgccctccgctcgcctggcccggaccggaagcggcgccgcacggcctgggcctggcgcggggggcgggcaccggggcccggtcggacatgggcaagaagcacaagaagcacaagtcggacaaacacctctacgaggagtatgtagagaagcccttgaagctggtcctcaaagtaggagggaacgaagtcaccgaactctccacgggcagctcggggcacgactccagcctcttcgaagacaaaaacgatcatgacaaacacaaggacagaaagcggaaaaagagaaagaaaggagagaagcagattccaggggaagaaaaggggagaaaacggagaagagttaaggaggataaaaagaagcgagatcgagaccgggtggagaatgaggcagaaaaagatctccagtgtcacgcccctgtgagattagacttgcctcctgagaagcctctcacaagctctttagccaaacaagaagaagtagaacagacaccccttcaagaagctttgaatcaactgatgagacaattgcagagaaaagatccaagtgctttcttttcatttcctgtgactgattttattgctcctggctactccatgatcattaaacacccaatggattttagtaccatgaaagaaaagatcaagaacaatgactatcagtccatagaagaactaaaggataacttcaaactaatgtgtactaatgccatgatttacaataaaccagagaccatttattataaagctgcaaagaagctgttgcactcaggaatgaaaattcttagccaggaaagaattcagagcctgaagcagagcatagacttcatggctgacttgcagaaaactcgaaagcagaaagatggaacagacacctcacagagtggggaggacggaggctgctggcagagagagagagaggactctggagatgccgaagcacacgccttcaagagtcccagcaaagaaaataaaaagaaagacaaagatatgcttgaagataagtttaaaagcaataatttagagagagagcaggagcagcttgaccgcatcgtgaaggaatctggaggaaagctgaccaggcggcttgtgaacagtcagtgcgaatttgaaagaagaaaaccagatggaacaacgacgttgggacttctccatcctgtggatcccattgtaggagagccaggctactgccctgtgagactgggaatgacaactggaagacttcagtctggagtgaatactttgcaggggttcaaagaggataaaaggaacaaagtcactccagtgttatatttgaattatgggccctacagttcttatgcaccgcattatgactccacatttgcaaatatcagcaaggatgattctgatttaatctattcaacctatggggaagactctgatcttccaagtgatttcagcatccatgagtttttggccacgtgccaagattatccgtatgtcatggcagatagtttactggatgttttaacaaaaggagggcattccaggaccctacaagagatggagatgtcattgcctgaagatgaaggccatactaggacacttgacacagcaaaagaaatggagattacagaagtagagccaccagggcgtttggactccagtactcaagacaggctcatagcgctgaaagcagtaacaaattttggcgttccagttgaagtttttgactctgaagaagctgaaatattccagaagaaacttgatgagaccaccagattgctcagggaactccaggaagcccagaatgaacgtttgagcaccagaccccctccgaacatgatctgtctcttgggtccctcatacagagaaatgcatcttgctgaacaagtgaccaataatcttaaagaacttgcacagcaagtaactccaggtgatatcgtaagcacgtatggagttcgaaaagcaatggggatttccattccttcccccgtcatggaaaacaactttgtggatttgacagaagacactgaagaacctaaaaagacggatgttgctgagtgtggacctggtggaagttgaggctgcctggtatttgattatatattatgtacatactttttcattcttaacttagaaatgcttttcagaagatattaaatatttgtaaattgtgtttttaattaaactttggaacagcgaatttggatgttccagaggttggacttgtattaggtaataaagctggacctgggactcgtga

SEQ ID NO: 620 - DNA, 2145 bp, Homo sapiens
  source 1..2145: mol_type = genomic DNA
cggacatgggcaagaagcacaagaagcacaagtcggacaaacacctctacgaggagtatgtagagaagcccttgaagctggtcctcaaagtaggagggaacgaagtcaccgaactctccacgggcagctcggggcacgactccagcctcttcgaagacaaaaacgatcatgacaaacacaaggacagaaagcggaaaaagagaaagaaaggagagaagcagattccaggggaagaaaaggggagaaaacggagaagagttaaggaggataaaaagaagcgagatcgagaccgggtggagaatgaggcagaaaaagatctccagtgtcacgcccctgtgagattagacttgcctcctgagaagcctctcacaagctctttagccaaacaagaagaagtagaacagacaccccttcaagaagctttgaatcaactgatgagacaattgcagagaaaagatccaagtgctttcttttcatttcctgtgactgattttattgctcctggctactccatgatcattaaacacccaatggattttagtaccatgaaagaaaagatcaagaacaatgactatcagtccatagaagaactaaaggataacttcaaactaatgtgtactaatgccatgatttacaataaaccagagaccatttattataaagctgcaaagaagctgttgcactcaggaatgaaaattcttagccaggaaagaattcagagcctgaagcagagcatagacttcatggctgacttgcagaaaactcgaaagcagaaagatggaacagacacctcacagagtggggaggacggaggctgctggcagagagagagagaggactctggagatgccgaagcacacgccttcaagagtcccagcaaagaaaataaaaagaaagacaaagatatgcttgaagataagtttaaaagcaataatttagagagagagcaggagcagcttgaccgcatcgtgaaggaatctggaggaaagctgaccaggcggcttgtgaacagtcagtgcgaatttgaaagaagaaaaccagatggaacaacgacgttgggacttctccatcctgtggatcccattgtaggagagccaggctactgccctgtgagactgggaatgacaactggaagacttcagtctggagtgaatactttgcaggggttcaaagaggataaaaggaacaaagtcactccagtgttatatttgaattatgggccctacagttcttatgcaccgcattatgactccacatttgcaaatatcagcaaggatgattctgatttaatctattcaacctatggggaagactctgatcttccaagtgatttcagcatccatgagtttttggccacgtgccaagattatccgtatgtcatggcagatagtttactggatgttttaacaaaaggagggcattccaggaccctacaagagatggagatgtcattgcctgaagatgaaggccatactaggacacttgacacagcaaaagaaatggagcagattacagaagtagagccaccagggcgtttggactccagtactcaagacaggctcatagcgctgaaagcagtaacaaattttggcgttccagttgaagtttttgactctgaagaagctgaaatattccagaagaaacttgatgagaccaccagattgctcagggaactccaggaagcccagaatgaacgtttgagcaccagaccccctccgaacatgatctgtctcttgggtccctcatacagagaaatgcatcttgctgaacaagtgaccaataatcttaaagaacttgcacagcaagtaactccaggtgatatcgtaagcacgtatggagttcgaaaagcaatggggatttccattccttcccccgtcatggaaaacaactttgtggatttgacagaagacactgaagaacctaaaaagacggatgttgctgagtgtggacctggtggaagttgaggctgcctggtatttgattatatattatgtacatactttttcattcttaacttagaaatgcttttcagaagatattaaatatttgtaaattgtgtttttaattaaactttggaacagcgaatttggatgttccagaggttggacttgtattaggtaataaagctggacctgggactcgtga

SEQ ID NO: 621 - DNA, 2145 bp, Homo sapiens; identical to SEQ ID NO: 620
  source 1..2145: mol_type = genomic DNA

SEQ ID NO: 622 - DNA, 2579 bp, Homo sapiens
  source 1..2579: mol_type = genomic DNA
gctcagactgtccttcctctctggactgtaagaatatgtctccagggccagtgtctgctgcgatcgagtcccaccttccaagtcctggcatctcaatgcatctgggaagctacctgcattaagtcaggactgagcacacaggtgaactccagaaagaagaagctatggccgcagtgattctggagagcatctttctgaagcgatcccaacagaaaaagaaaacatcacctctaaacttcaagaagcgcctgtttctcttgaccgtgcacaaactctcctactatgagtatgactttgaacgtgggagaagaggcagtaagaagggttcaatagatgttgagaagatcacttgtgttgaaacagtggttcctgaaaaaaatcctcctccagaaagacagattccgagaagaggtgaagagtccagtgaaatggagcaaatttcaatcattgaaaggttcccttatcccttccaggttgtatatgatgaagggcctctctacgtcttctccccaactgaagaactaaggaagcggtggattcaccagctcaaaaacgtaatccggtacaacagtgatctggttcagaaatatcacccttgcttctggatcgatgggcagtatctctgctgctctcagacagccaaaaatgctatgggctgccaaattttggagaacaggaatggaagcttaaaacctgggagttctcaccggaagacaaaaaagcctcttcccccaacgcctgaggaggaccagatcttgaaaaagccactaccgcctgagccagcagcagcaccagtctccacaagtgagctgaaaaaggttgtggccctttatgattacatgccaatgaatgcaaatgatctacagctgcggaagggtgatgaatattttatcttggaggaaagcaacttaccatggtggagagcacgagataaaaatgggcaggaaggctacattcctagtaactatgtcactgaagcagaagactccatagaaatgtatgagtggtattccaaacacatgactcggagtcaggctgagcaactgctaaagcaagaggggaaagaaggaggtttcattgtcagagactccagcaaagctggcaaatatacagtgtctgtgtttgctaaatccacaggggaccctcaaggggtgatacgtcattatgttgtgtgttccacacctcagagccagtattacctggctgagaagcaccttttcagcaccatccctgagctcattaactaccatcagcacaactctgcaggactcatatccaggctcaaatatccagtgtctcaacaaaacaagaatgcaccttccactgcaggcctgggatacggatcatgggaaattgatccaaaggacctgaccttcttgaaggagctggggactggacaatttggggtagtgaagtatgggaaatggagaggccagtacgacgtggccatcaagatgatcaaagaaggctccatgtctgaagatgaattcattgaagaagccaaagtcatgatgaatctttcccatgagaagctggtgcagttgtatggcgtctgcaccaagcagcgccccatcttcatcatcactgagtacatggccaatggctgcctcctgaactacctgagggagatgcgccaccgcttccagactcagcagctgctagagatgtgcaaggatgtctgtgaagccatggaatacctggagtcaaagcagttccttcaccgagacctggcagctcgaaactgtttggtaaacgatcaaggagttgttaaagtatctgatttcggcctgtccaggtatgtcctggatgatgaatacacaagctcagtaggctccaaatttccagtccggtggtccccaccggaagtcctgatgtatagcaagttcagcagcaaatctgacatttgggcttttggggttttgatgtgggaaatttactccctggggaagatgccatatgagagatttactaacagtgagactgctgaacacattgcccaaggcctacgtctctacaggcctcatctggcttcagagaaggtatataccatcatgtacagttgctggcatgagaaagcagatgagcgtcccactttcaaaattcttctgagcaatattctagatgtcatggatgaagaatcctgagctcgccaataagcttcttggttctacttctcttctccacaagccccaatttcactttctcagaggaaatcccaagcttaggagccctggagcctttgtgctcccactcaatacaaaaaggcccctctctacatctgggaatgcacctcttctttgattccctgggatagtggcttctgagcaaaggccaagaaattattgtgcctgaaatttcccgagagaattaagacagactgaatttgcgatgaaaatattttttaggagggaggatgtaaatagccgcacaaaggggtccaacagctctttgagtaggcatttggtagagcttgggggtgtgtgtgtgggggtggaccgaatttggcaagaatgaaatggtgtcataaagatgggaggggagggtgttttgataaaataaaattactagaaagcttgaaa

SEQ ID NO: 623 - DNA, 1065 bp, Homo sapiens
  source 1..1065: mol_type = genomic DNA
gtgatacgtcattatgttgtgtgttccacacctcagagccagtattacctggctgagaagcaccttttcagcaccatccctgagctcattaactaccatcagcacaactctgcaggactcatatccaggactcagcagctgctagagatgtgcaaggatgtctgtgaagccatggaatacctggagtcaaagcagttccttcaccgagacctggcagctcgaaactgtttggtaaacgatcaaggagttgttaaagtatctgatttcggcctgtccaggtatgtcctggatgatgaatacacaagctcagtaggctccaaatttccagtccggtggtccccaccggaagtcctgatgtatagcaagttcagcagcaaatctgacatttgggcttttggggttttgatgtgggaaatttactccctggggaagatgccatatgagagatttactaacagtgagactgctgaacacattgcccaaggcctacgtctctacaggcctcatctggcttcagagaaggtatataccatcatgtacagttgctggcatgagaaagcagatgagcgtcccactttcaaaattcttctgagcaatattctagatgtcatggatgaagaatcctgagctcgccaataagcttcttggttctacttctcttctccacaagccccaatttcactttctcagaggaaatcccaagcttaggagccctggagcctttgtgctcccactcaatacaaaaaggcccctctctacatctgggaatgcacctcttctttgattccctgggatagtggcttctgagcaaaggccaagaaattattgtgcctgaaatttcccgagagaattaagacagactgaatttgcgatgaaaatattttttaggagggaggatgtaaatagccgcacaaaggggtccaacagctctttgagtaggcatttggtagagcttgggggtgtgtgtgtgggggtggaccgaatttggcaagaatgaaatggtgtcataaagatgggaggggagggtgttttgataaaataaaattactagaaagcttgaaagtc

SEQ ID NO: 624 - DNA, 858 bp, Homo sapiens
  source 1..858: mol_type = genomic DNA
gtgatacgtcattatgttgtgtgttccacacctcagagccagtattacctggctgagaagcaccttttcagcaccatccctgagctcattaactaccatcagcacaactctgcaggactcatatccaggctcaaatatccagtgtctcaacaaaacaagaatgcaccttccactgcaggcctgggatacggggttttgatgtgggaaatttactccctggggaagatgccatatgagagatttactaacagtgagactgctgaacacattgcccaaggcctacgtctctacaggcctcatctggcttcagagaaggtatataccatcatgtacagttgctggcatgagaaagcagatgagcgtcccactttcaaaattcttctgagcaatattctagatgtcatggatgaagaatcctgagctcgccaataagcttcttggttctacttctcttctccacaagccccaatttcactttctcagaggaaatcccaagcttaggagccctggagcctttgtgctcccactcaatacaaaaaggcccctctctacatctgggaatgcacctcttctttgattccctgggatagtggcttctgagcaaaggccaagaaattattgtgcctgaaatttcccgagagaattaagacagactgaatttgcgatgaaaatattttttaggagggaggatgtaaatagccgcacaaaggggtccaacagctctttgagtaggcatttggtagagcttgggggtgtgtgtgtgggggtggaccgaatttggcaagaatgaaatggtgtcataaagatgggaggggagggtgttttgataaaataaaattactagaaagcttgaaagtc

SEQ ID NO: 625 - DNA, 1143 bp, Homo sapiens
  source 1..1143: mol_type = genomic DNA
cgtcattatgttgtgtgttccacacctcagagccagtattacctggctgagaagcaccttttcagcaccatccctgagctcattaactaccatcagcacaactctgcaggactcatatccaggctcaaatatccagtgtctcaacaaaacaagaatgcaccttccactgcaggcctgggatacggatcatgggaaattgatccaaaggacctgaccttcttgaaggagctggggactggacaatttggggtagtgaagtatgggaaatggagaggccagtacgacgtggccatcaagatgatcaaagaaggctccatgtctgaagatgaattcattgaagaagccaaagtcatgatgtatgtcctggatgatgaatacacaagctcagtaggctccaaatttccagtccggtggtccccaccggaagtcctgatgtatagcaagttcagcagcaaatctgacatttgggcttttggggttttgatgtgggaaatttactccctggggaagatgccatatgagagatttactaacagtgagactgctgaacacattgcccaaggcctacgtctctacaggcctcatctggcttcagagaaggtatataccatcatgtacagttgctggcatgagaaagcagatgagcgtcccactttcaaaattcttctgagcaatattctagatgtcatggatgaagaatcctgagctcgccaataagcttcttggttctacttctcttctccacaagccccaatttcactttctcagaggaaatcccaagcttaggagccctggagcctttgtgctcccactcaatacaaaaaggcccctctctacatctgggaatgcacctcttctttgattccctgggatagtggcttctgagcaaaggccaagaaattattgtgcctgaaatttcccgagagaattaagacagactgaatttgcgatgaaaatattttttaggagggaggatgtaaatagccgcacaaaggggtccaacagctctttgagtaggcatttggtagagcttgggggtgtgtgtgtgggggtggaccgaatttggcaagaatgaaatggtgtcataaagatgggaggggagggtgttttgataaaataaaattactagaaagcttgaaagtc

SEQ ID NO: 626 - DNA, 977 bp, Homo sapiens
  source 1..977: mol_type = genomic DNA
gtgatacgtcattatgttgtgtgttccacacctcagagccagtattacctggctgagaagcaccttttcagcaccatccctgagctcattaactaccatcagcacaactctgcaggactcatatccaggctcaaatatccagtgtctcaacaaaacaagaatgcaccttccactgcaggcctgggatacggtatgtcctggatgatgaatacacaagctcagtaggctccaaatttccagtccggtggtccccaccggaagtcctgatgtatagcaagttcagcagcaaatctgacatttgggcttttggggttttgatgtgggaaatttactccctggggaagatgccatatgagagatttactaacagtgagactgctgaacacattgcccaaggcctacgtctctacaggcctcatctggcttcagagaaggtatataccatcatgtacagttgctggcatgagaaagcagatgagcgtcccactttcaaaattcttctgagcaatattctagatgtcatggatgaagaatcctgagctcgccaataagcttcttggttctacttctcttctccacaagccccaatttcactttctcagaggaaatcccaagcttaggagccctggagcctttgtgctcccactcaatacaaaaaggcccctctctacatctgggaatgcacctcttctttgattccctgggatagtggcttctgagcaaaggccaagaaattattgtgcctgaaatttcccgagagaattaagacagactgaatttgcgatgaaaatattttttaggagggaggatgtaaatagccgcacaaaggggtccaacagctctttgagtaggcatttggtagagcttgggggtgtgtgtgtgggggtggaccgaatttggcaagaatgaaatggtgtcataaagatgggaggggagggtgttttgataaaataaaattactagaaagcttgaaagtc

SEQ ID NO: 627 - DNA, 2203 bp, Homo sapiens
  source 1..2203: mol_type = genomic DNA
ctctctggactgtaagaatatgtctccagggccagtgtctgctgcgatcgagtcccaccttccaagtcctggcatctcaatgcatctgggaagctacctgcattaagtcaggactgagagctgtgtgttacacaccaaccttctggaggactcaaaaatggatccctttcctttcacattattgagtgatggaccagtggcacctaaggaagagctaccacattttcaggctgtgtgagtctggactggatcataagaaacaggagaaaagcagtcaaagaagcacacaggtgaactccagaaagaagaagctatggccgcagtgattctggagagcatctttctgaagcgatcccaacagaaaaagaaaacatcacctctaaacttcaagaagcgcctgtttctcttgaccgtgcacaaactctcctactatgagtatgactttgaacgtgggagaagaggcagtaagaagggttcaatagatgttgagaagatcacttgtgttgaaacagtggttcctgaaaaaaatcctcctccagaaagacagattccgagaagaggtgaagagtccagtgaaatggagcaaatttcaatcattgaaaggttcccttatcccttccaggttgtatatgatgaagggcctctctacgtcttctccccaactgaagaactaaggaagcggtggattcaccagctcaaaaacgtaatccggtacaacagtgatctggttcagaaatatcacccttgcttctggatcgatgggcagtatctctgctgctctcagacagccaaaaatgctatgggctgccaaattttggagaacaggaatggaagcttaaaacctgggagttctcaccggaagacaaaaaagcctcttcccccaacgcctgaggaggaccagatcttgaaaaagccactaccgcctgagccagcagcagcaccagtctccacaagtgagctgaaaaaggttgtggccctttatgattacatgccaatgaatgcaaatgatctacagctgcggaagggtgatgaatattttatcttggaggaaagcaacttaccatggtggagagcacgagataaaaatgggcaggaaggctacattcctagtaactatgtcactgaagcagaagactccatagaaatgtatgagtggtattccaaacacatgactcggagtcaggctgagcaactgctaaagcaagaggggaaagaaggaggtttcattgtcagagactccagcaaagctggcaaatatacagtgtctgtgtttgctaaatccacaggggaccctcaaggggtgatacgtcattatgttgtgtgttccacacctcagagccagtattacctggcagctcgaaactgtttggtaaacgatcaaggagttgttaaagtatctgatttcggcctgtccaggtatgtcctggatgatgaatacacaagctcagtaggctccaaatttccagtccggtggtccccaccggaagtcctgatgtatagcaagttcagcagcaaatctgacatttgggcttttggggttttgatgtgggaaatttactccctggggaagatgccatatgagagatttactaacagtgagactgctgaacacattgcccaaggcctacgtctctacaggcctcatctggcttcagagaaggtatataccatcatgtacagttgctggcatgagaaagcagatgagcgtcccactttcaaaattcttctgagcaatattctagatgtcatggatgaagaatcctgagctcgccaataagcttcttggttctacttctcttctccacaagccccaatttcactttctcagaggaaatcccaagcttaggagccctggagcctttgtgctcccactcaatacaaaaaggcccctctctacatctgggaatgcacctcttctttgattccctgggatagtggcttctgagcaaaggccaagaaattattgtgcctgaaatttcccgagagaattaagacagactgaatttgcgatgaaaatattttttaggagggaggatgtaaatagccgcacaaaggggtccaacagctctttgagtaggcatttggtagagcttgggggtgtgtgtgtgggggtggaccgaatttggcaagaatgaaatggtgtcataaagatgggaggggagggtgttttgataaaataaaattactagaaagcttgaaagtc

SEQ ID NO: 628 - DNA, 992 bp, Homo sapiens
  source 1..992: mol_type = genomic DNA
gtgatacgtcattatgttgtgtgttccacacctcagagccagtattacctggctgagaagcaccttttcagcaccatccctgagctcattaactaccatcagcacaactctgcaggactcatatccaggctcaaatatccagtgtctcaacaaaacaagaatgcaccttccactgcaggcctgggatacggatcatgggaaattgatccaaaggacctgaccttcttgaaggagctggggactggacaatttggggtagtgaagtatgggaaatggagaggccagtacgacgtggccatcaagatgatcaaagaaggctccatgtctgaagatgaattcattgaagaagccaaagtcatgatgaatctttcccatgagaagctggtgcagttgtatggcgtctgcaccaagcagcgccccatcttcatcatcactgagtacatggccaatggctgcctcccatgtacagttgctggcatgagaaagcagatgagcgtcccactttcaaaattcttctgagcaatattctagatgtcatggatgaagaatcctgagctcgccaataagcttcttggttctacttctcttctccacaagccccaatttcactttctcagaggaaatcccaagcttaggagccctggagcctttgtgctcccactcaatacaaaaaggcccctctctacatctgggaatgcacctcttctttgattccctgggatagtggcttctgagcaaaggccaagaaattattgtgcctgaaatttcccgagagaattaagacagactgaatttgcgatgaaaatattttttaggagggaggatgtaaatagccgcacaaaggggtccaacagctctttgagtaggcatttggtagagcttgggggtgtgtgtgtgggggtggaccgaatttggcaagaatgaaatggtgtcataaagatgggaggggagggtgttttgataaaataaaattactagaaagcttgaaagtc

SEQ ID NO: 629 - DNA, 1366 bp, Homo sapiens
  source 1..1366: mol_type = genomic DNA
gtgatacgtcattatgttgtgtgttccacacctcagagccagtattacctggctgagaagcaccttttcagcaccatccctgagctcattaactaccatcagcacaactctgcaggactcatatccaggctcaaatatccagtgtctcaacaaaacaagaatgcaccttccactgcaggcctgggatacggatcatgggaaattgatccaaaggacctgaccttcttgaaggagctggggactggacaatttggggtagtgaagtatgggaaatggagaggccagtacgacgtggccatcaagatgatcaaagaaggctccatgtctgaagatgaattcattgaagaagccaaagtcatgatgaatctttcccatgagaagctggtgcagttgtatggcgtctgcaccaagcagcgccccatcttcatcatcactgagtacatggccaatggctgcctcctgaactacctgagggagatgcgccaccgcttccagactcagcagctgctagagatgtgcaaggatgtctgtgaagccatggaatacctggagtcaaagcagttccttcaccgagacctggtatgtcctggatgatgaatacacaagctcagtaggctccaaatttccagtccggtggtccccaccggaagtcctgatgtatagcaagttcagcagcaaatctgacatttgggcttttggggttttgatgtgggaaatttactccctggggaagatgccatatgagagatttactaacagtgagactgctgaacacattgcccaaggcctacgtctctacaggcctcatctggcttcagagaaggtatataccatcatgtacagttgctggcatgagaaagcagatgagcgtcccactttcaaaattcttctgagcaatattctagatgtcatggatgaagaatcctgagctcgccaataagcttcttggttctacttctcttctccacaagccccaatttcactttctcagaggaaatcccaagcttaggagccctggagcctttgtgctcccactcaatacaaaaaggcccctctctacatctgggaatgcacctcttctttgattccctgggatagtggcttctgagcaaaggccaagaaattattgtgcctgaaatttcccgagagaattaagacagactgaatttgcgatgaaaatattttttaggagggaggatgtaaatagccgcacaaaggggtccaacagctctttgagtaggcatttggtagagcttgggggtgtgtgtgtgggggtggaccgaatttggcaagaatgaaatggtgtcataaagatgggaggggagggtgttttgataaaataaaattactagaaagcttgaaagtc

SEQ ID NO: 630 - DNA, 698 bp, Homo sapiens
  source 1..698: mol_type = genomic DNA
atacgtcattatgttgtgtgttccacacctcagagccagtattacctggctgagaagcaccttttcagcaccatccctgagctcattaactaccatcagcacaactctgcaggtgaagactcagcagctgctagagatgtgcaaggatgtctgtgaagccatggaatacctggagtcaaagcagttccttcaccgagacctggcagctcgaaactgtttggtaaacgatcaaggagttgttaaagtatctgatttcggcctgtccaggtatgtcctggatgatgaatacacaagctcagtaggctccaaatttccagtccggtggtccccaccggaagtcctgatgtatagcaagttcagcagcaaatctgacatttgggcttttggggttttgatgtgggaaatttactccctggggaagatgccatatgagagatttactaacagtgagactgctgaacacattgcccaaggcctacgtctctacaggcctcatctggcttcagagaaggtatataccatcatgtacagttgctggcatgagaaagcagatgagcgtcccactttcaaaattcttctgagcaatattctagatgtcatggatgaagaatcctgagctcgccaataagcttcttggttctacttctcttctccacaagccccaatttcactttctcagaggaaatcccaagcttagg

SEQ ID NO: 631 - DNA, 1485 bp, Homo sapiens
  source 1..1485: mol_type = genomic DNA
cgacgcgggagccgcacgcgccggacgaggctcgctgcgctccctgttgcccagcgcgggcccgttgaggcggagccctcagttcccggccaggacacggtctgggccgccgaatctccggccgaagagcggcggcggcagcggcgggaaaaaaatgaagaatgaaattgctgccgttgtcttctttttcacaaggctagttcgaaaacatgataagttgaaaaaagaggcagttgagaggtttgctgagaaattgaccctaatacttcaagaaaaatataaaaatcactggtatccagaaaaaccatcgaaaggacaggcctacagatgtattcgtgtcaataaatttcagagagttgatcctgatgtcctgaaagcctgtgaaaacagctgcatcttgtatagtgacctgggcttgccaaaggagctcactctctgggtggacccatgtgaggtgtgctgtcgtagagatggggtttcaccatgttggccagactgctctcaaactcctgacctcgtgatccgcccgccttggcctcccaaagcgctggattacaggcgtgagccactgcgcccggcctcctcctttttgattatgtatggagagaaaaacaatgcattcattgttgccagctttgaaaataaagatgagaacaaggatgagatctccaggaaagttaccagggcccttgataaggttacctctgattatcattcaggatcctcttcttcagatgaagaaacaagtaaggaaatggaagtgaaacccagttcggtgactgcagccgcaagtcctgtgtaccagatttcagaacttatatttccacctcttccaatgtggcaccctttgcccagaaaaaagccaggaatgtatcgagggaatggccatcagaatcactatcctcctcctgttccatttggttatccaaatcagggaagaaaaaataaaccatatcgcccaattccagtgacatgggtacctcctcctggaatgcattgtgaccggaatcactggattaatcctcacatgttagcacctcactaacttcgtttttgattgtgttggtgtcatgttgagaaaaaggtagaataaaccttactacacattaaaagttaaaagttcttactaatagtagtgaagttagatgggccaaaccatcaaacttatttttatagaagttattgagaataatctttcttaaaaaatatatgcactttagatattgatatagtttgagaaattttattaaagttagtcaagtgcctaagtttttaatattggacttgagtatttatatattgtgcatcaactctgttggatacgagaacactgtagaagtggacgatttgttctagcacctttgagaatttactttatggagcgtatgtaagttatttatatacaaggaaatctattttatgtcgttgtttaagagaattgtgtgaaatcatgtagttgcaaataaaaaatagtttgaggcatga

SEQ ID NO: 632 - DNA, 1456 bp, Homo sapiens
  source 1..1456: mol_type = genomic DNA
tcttccgggccgcgagccccctgcgcgccgctttggggctgcgctcactcgtgtgcgcgctcgtccgcccgccagtcctctcaacgcgcgcttggccgcccgacgacgcgggagccgcacgcgccggacgaggctcgctgcgctccctgttgcccagcgcgggcccgttgaggcggagccctcagttcccggccaggacacggtctgggccgccgaatctccggccgaagagcggcggcggcagcggcgggaaaaaaatgaagaatgaaattgctgccgttgtcttctttttcacaaggctagttcgaaaacatgataagttgaaaaaagaggcagttgagaggtttgctgagaaattgaccctaatacttcaagaaaaatataaaaatcactggtatccagaaaaaccatcgaaaggacaggcctacagatgtattcgtgtcaataaatttcagagagttgatcctgatgtcctgaaagcctgtgaaaacagctgcatcttgtatagtgacctgggcttgccaaaggagctcactctctgggtggacccatgtgaggtgtgctgtcggtatggagagaaaaacaatgcattcattgttgccagctttgaaaataaagatgagaacaaggatgagatctccaggaaagttaccagggcccttgataaggttacctctgattatcattcaggatcctcttcttcagatgaagaaacaagtaaggaaatggaagtgaaacccagttcggtgactgcagccgcaagtcctgtgtaccagatttcagaacttatatttccacctcttccaatgtggcaccctttgcccagaaaaaagccaggaatgtatcgagggaatggccatcagaatcactatcctcctcctgttccatttggttatccaaatcagggaagaaaaaataaaccatatcgcccaattccagtgacatgggtacctcctcctggaatgcattgtgaccggaatcactggattaatcctcacatgttagcacctcactaacttcgtttttgattgtgttggtgtcatgttgagaaaaaggtagaataaaccttactacacattaaaagttaaaagttcttactaatagtagtgaagttagatgggccaaaccatcaaacttatttttatagaagttattgagaataatctttcttaaaaaatatatgcactttagatattgatatagtttgagaaattttattaaagttagtcaagtgcctaagtttttaatattggacttgagtatttatatattgtgcatcaactctgttggatacgagaacactgtagaagtggacgatttgttctagcacctttgagaatttactttatggagcgtatgtaagttatttatatacaaggaaatctattttatgtcgttgtttaagagaattgtgtgaaatcatgtagttgcaaataaaaaatagtttgaggcatga

SEQ ID NO: 633 - DNA, 511 bp, Homo sapiens
  source 1..511: mol_type = genomic DNA
ttccgggccgcgagccccctgcgcgccgctttggggctgcgctcactcgtgtgcgcgctcgtccgcccgccagtcctctcaacgcgcgcttggccgcccgacgacgcgggagccgcacgcgccggacgaggctcgctgcgctccctgttgcccagcgcgggcccgttgaggcggagccctcagttcccggccaggacacggtctgggccgccgaatctccggccgaagagcggcggcggcagcggcgccgtgagcagaggagccttgtggaacaaagtagaacttgaggagcagccgccgcggtgacgaggtcccaggatgacgtcaccgtgcgatatttaaaatgggagccttttgctctgagtggaaaaaaatgaagaatgaaattgctgccgttgtcttctttttcacaaggctagttcgaaaacatgataagttgaaaaaagaggcagttgagaggtttgctgagaaattgaccctaatacttcaagaaaaatataaaaatcactgg

SEQ ID NO: 634 - DNA, 2366 bp, Homo sapiens
  source 1..2366: mol_type = genomic DNA
gcagagcggcggcttctctcgcgaggacggacgccattatcgcatctccccgacaaacaccacgagaattccgcagcccacacggtgaccaaaagccagccccactgtgagttgaactctttcgtgttgaccggccactctccgtgctctggatgatgtcggaacacgacctggccgatgtggttcagattgcagtggaagacctgagccctgaccacccagttgttttggagaatcatgtagtgacagatgaagacgaacctgctttgaaacgccagcgactagaaatcaattgccaggatccatctataaagacaatctgcttgcggttggatagcattgaagccaaattgcaagccctggaggctacttgtaaatccttagaagaaaagctggatctggtcacgaacaagcagcacagccccatccaggtccccatggtggccggctcccctctcggggcaacccagacgtgcaacaaagtgcgatgcgtcgtcccccagactacagtaatactcaacaatgatcggcagaacgccattgtagccaagatggaagaccccttgagcaacagggcaccggattccctggaaaatgtcattagcaacgctgtgcctgggcgtcggcagaacaccattgtggtgaaggtgccgggccaagaagacagccaccacgaggacggggagagcggctcggaggccagcgactctgtgtccagctgtgggcaggcgggcagtcagagcatcgggagcaacgtcacgctcatcaccctgaactcggaagaggactaccccaatggcacctggctgggcgacgagaacaaccccgagatgcgggtacgctgcgccatcatcccctccgacatgctgcacatcagcaccaactgccgcacggccgagaagatggcgctcacgctgctggactacctcttccaccgcgaggtgcaggctgtgtccaacctctcggggcagggcaagcacgggaagaagcagctggacccgctcaccatctacggcatccggtgtcaccttttctataaatttggcatcacagaatccgactggtaccgaatcaagcagagcatcgactccaagtgccgcacggcgtggcggcgcaagcagcggggccagagcctggcggtcaagagcttctcgcggagaacgcccaactcgtcctcctactgcccttcagagccgatgatgagcaccccacctcctgccagcgagctcccgcagccacagccgcagccgcaggccctgcactacgcgctggccaacgcacagcaggtgcagatccaccagatcggagaagacggacaggtgcaagtaggacacctccacatcgcccaggtgccgcagggggagcaagtccagatcacgcaggacagcgagggcaacctccagatccatcacgtggggcaggacggtcagcttctagaggccacccgcatcccctgcctcctggccccatccgtcttcaaagccagcagtggccaggtgctgcagggtgcacagctgatcgccgtggcctcctcggaccccgcggcggcgggcgtggatgggtcgccactccagggcagcgacatccaggttcagtacgtgcagctggcgccagtgagtgaccacacggccggggcacagacggccgaagccctgcagcccacgctacagccggagatgcagctcgagcacggggccatccagattcagtgagcggtgcccatggcaccaggagcccctcgccggctccgcctacggcccggcccccacgcgccctgctctcacggcctcggcacaggcagcggctgcacgtgttctgctgaagtgcgtctgaaggccgctgcctccgcggggaacagcatcctatcaactgaaagagcagccgccgccgcccccagccggagacccctttcgtttgagtcctgctgttggtgtcggagcacgaggggaggcacggtgcggagagcgtcgcatatgcgcgggaaatcaagaactatgatatttttctgtttaaacagctttttttaatttgctatggtgtttataacaaaaaagaaaatttgaaaaaaaaaatcccaggggagtagcaggagccctttgctgtgtgctctgtccagtgtcatgagacgggagccctttgctgtgtgctctgtccagtgtcatgagacgggagccctttgctgtgtgctctgtccagtgtcatgagacgggagccctttgctgtgtgctctgtccagtgtcatgaggcaggtgtttgcaaagccagctctcggttccgatggggtattgctgacctacttttctaggggaaatgctcttaaacactgtaattatgcatttctaatgaaataaaatgtatttatgacc

SEQ ID NO: 635 - DNA, 2124 bp, Homo sapiens
  source 1..2124: mol_type = genomic DNA
gcagagcggcggcttctctcgcgaggacggacgccattatcgcatctccccgacaaacaccacgagaattccgcagcccacacggtgaccaaaagccagccccactgtgagttgaactctttcgtgttgaccggccactctccgtgctctggatgatgtcggaacacgacctggccgatgtggttcagattgcagtggaagacctgagccctgaccacccagttgttttggagaatcatgtagtgacagatgaagacgaacctgctttgaaacgccagcgactagaaatcaattgccaggatccatctataaagtcattcctgtattccatcaaccagacaatctgcttgcggttggatagcattgaagccaaattgcaagccctggaggctacttgtaaatccttagaagaaaagctggatctggtcacgaacaagcagcacagccccatccaggtccccatggtggccggctcccctctcggggcaacccagacgtgcaacgctgtgcctgggcgtcggcagaacaccattgtggtgaaggtgccgggccaagaagacagccaccacgaggacggggagagcggctcggaggccagcgactctgtgtccagctgtgggcaggcgggcagtcagagcatcgggagcaacgtcacgctcatcaccctgaactcggaagaggactaccccaatggcacctggctgggcgacgagaacaaccccgagatgcgggtacgctgcgccatcatcccctccgacatgctgcacatcagcaccaactgccgcacggccgagaagatggcgctcacgctgctggactacctcttccaccgcgaggtgcaggctgtgtccaacctctcggggcagggcaagcacgggaagaagcagctggacccgctcaccatctacggcatccggtgtcaccttttctataaatttggcatcacagaatccgactggtaccgaatcaagcagagcatcgactccaagtgccgcacggcgtggcggcgcaagcagcggggccagagcctggcggtcaagagcttctcgcggagaacgcccaactcgtcctcctactgcccttcagagccgatgatgagcaccccacctcctgccagcgagctcccgcagccacagccgcagccgcaggccctgcactacgcgctggccaacgcacagcaggtgcagatccaccagatcggagaagacggacaggtgcaagtaatcccacagggacacctccacatcgcccaggtgccgcagggggagcaagtccagatcacgcaggacagcgagggcaacctccagatccatcacgtggggcaggacggtcaggtgctgcagggtgcacagctgatcgccgtggcctcctcggaccccgcggcggcgggcgtggatgggtcgccactccagggcagcgacatccaggttcagtacgtgcagctggcgccagtgagtgaccacacggccggggcacagacggccgaagccctgcagcccacgctacagccggagatgcagctcgagcacggggccatccagattcagtgagcggtgcccatggcaccaggagcccctcgccggctccgcctacggcccggcccccacgcgccctgctctcacggcctcggcacaggcagcggctgcacgtgttctgctgaagtgcgtctgaaggccgctgcctccgcggggaacagcatcctatcaactgaaagagcagccgccgccgcccccagccggagacccctttcgtttgagtcctgctgttggtgtcggagcacgaggggaggcacggtgcggagagcgtcgcatatgcgcgggaaatcaagaactatgatatttttctgtttaaacagctttttttaatttgctatggtgtttataacaaaaaagaaaatttgaaaaaaaaaatcccaggggagtagcaggagccctttgctgtgtgctctgtccagtgtcatgagacgggagccctttgctgtgtgctctgtccagtgtcatgaggcaggtgtttgcaaagccagctctcggttccgatggggtattgctgacctacttttctaggggaaatgctcttaaacactgtaattatgcatttctaatgaaataaaatgtatttatgacc

SEQ ID NO: 636 - DNA, 2164 bp, Homo sapiens
  source 1..2164: mol_type = genomic DNA
aacaccacgagaattccgcagcccacacggtgaccaaaagccagccccactgtgagttgaactctttcgtgttgaccggccactctccgtgctctggatgatgtcggaacacgacctggccgatgtggttcagattgcagtggaagacctgagccctgaccacccagttgttttggagaatcatgtagtgacagatgaagacgaacctgctttgaaacgccagcgactagaaatcaattgccaggatccatctataaagtcattcctgtattccatcaaccagacaatctgcttgcggttggatagcattgaagccaaattgcaagccctggaggctacttgtaaatccttagaagaaaagctggatctggtcacgaacaagcagcacagccccatccaggtccccatggtggccggctcccctctcggggcaacccagacgtgcaacaaagtgcgatgcgctgtgcctgggcgtcggcagaacaccattgtggtgaaggtgccgggccaagaagacagccaccacgaggacggggagagcggctcggaggccagcgactctgtgtccagctgtgggcaggcgggcagtcagagcatcgggagcaacgtcacgctcatcaccctgaactcggaagaggactaccccaatggcacctggctgggcgacgagaacaaccccgagatgcgggtacgctgcgccatcatcccctccgacatgctgcacatcagcaccaactgccgcacggccgagaagatggcgctcacgctgctggactacctcttccaccgcgaggtgcaggctgtgtccaacctctcggggcagggcaagcacgggaagaagcagctggacccgctcaccatctacggcatccggtgtcaccttttctataaatttggcatcacagaatccgactggtaccgaatcaagcagagcatcgactccaagtgccgcacggcgtggcggcgcaagcagcggggccagagcctggcggtcaagagcttctcgcggagaacgcccaactcgtcctcctactgcccttcagagccgatgatgagcaccccacctcctgccagcgagctcccgcagccacagccgcagccgcaggccctgcactacgcgctggccaacgcacagcaggtgcagatccaccagatcggagaagacggacaggtgcaagtaatcccacagggacacctccacatcgcccaggtgccgcagggggagcaagtccagatcacgcaggacagcgagggcaacctccagatccatcacgtggggcaggacggtcaggtgctgcagggtgcacagctgatcgccgtggcctcctcggaccccgcggcggcgggcgtggatgggtcgccactccagggcagcgacatccaggttcagtacgtgcagctggcgccagtgagtgaccacacggccggggcacagacggccgaagccctgcagcccacgctacagccggagatgcagctcgagcacggggccatccagattcagtgagcggtgcccatggcaccaggagcccctcgccggctccgcctacggcccggcccccacgcgccctgctctcacggcctcggcacaggcagcggctgcacgtgttctgctgaagtgcgtctgaaggccgctgcctccgcggggaacagcatcctatcaactgaaagagcagccgccgccgcccccagccggagacccctttcgtttgagtcctgctgttggtgtcggagcacgaggggaggcacggtgcggagagcgtcgcatatgcgcgggaaatcaagaactatgatatttttctgtttaaacagctttttttaatttgctatggtgtttataacaaaaaagaaaatttgaaaaaaaaaatcccaggggagtagcaggagccctttgctgtgtgctctgtccagtgtcatgagacgggagccctttgctgtgtgctctgtccagtgtcatgagacgggagccctttgctgtgtgctctgtccagtgtcatgagacgggagccctttgctgtgtgctctgtccagtgtcatgaggcaggtgtttgcaaagccagctctcggttccgatggggtattgctgacctacttttctaggggaaatgctcttaaacactgtaattatgcatttctaatgaaataaaatgtatttatgaccaca

SEQ ID NO: 637 - DNA, 2300 bp, Homo sapiens
  source 1..2300: mol_type = genomic DNA
gcagagcggcggcttctctcgcgaggacggacgccattatcgcatctccccgacaaacaccacgagaattccgcagcccacacggtgaccaaaagccagccccactgtgagttgaactctttcgtgttgaccggccactctccgtgctctggatgatgtcggaacacgacctggccgatgtggttcagattgcagtggaagacctgagccctgaccacccaggtacagagctgtgggacattgttttggagaatcatgtagtgacagatgaagacgaacctgctttgaaacgccagcgactagaaatcaattgccaggatccatctataaagtcattcctgtattccatcaaccagacaatctgcttgcggttggatagcattgaagccaaattgcaagccctggaggctacttgtaaatccttagaagaaaagctggatctggtcacgaacaagcagcacagccccatccaggtccccatggtggccggctcccctctcggggcaacccagacgtgcaacaaagtgcgatgcgctgtgcctgggcgtcggcagaacaccattgtggtgaaggtgccgggccaagaagacagccaccacgaggacggggagagcggctcggaggccagcgactctgtgtccagctgtgggcaggcgggcagtcagagcatcgggagcaacgtcacgctcatcaccctgaactcggaagaggactaccccaatggcacctggctgggcgacgagaacaaccccgagatgcgggtacgctgcgccatcatcccctccgacatgctgcacatcagcaccaactgccgcacggccgagaagatggcgctcacgctgctggactacctcttccaccgcgaggtgcaggctgtgtccaacctctcggggcagggcaagcacgggaagaagcagctggacccgctcaccatctacggcatccggtgtcaccttttctataaatttggcatcacagaatccgactggtaccgaatcaagcagagcatcgactccaagtgccgcacggcgtggcggcgcaagcagcggggccagagcctggcggtcaagagcttctcgcggagaacgcccaactcgtcctcctactgcccttcagagccgatgatgagcaccccacctcctgccagcgagctcccgcagccacagccgcagccgcaggccctgcactacgcgctggccaacgcacagcaggtgcagatccaccagatcggagaagacggacaggtgcaagtaatcccacagggacacctccacatcgcccaggtgccgcagggggagcaagtccagatcacgcaggacagcgagggcaacctccagatccatcacgtggggcaggacggtcagcttctagaggccacccgcatcccctgcctcctggccccatccgtcttcaaagccagcagtggccaggtgctgcagggtgcacagctgatcgccgtggcctcctcggaccccgcggcggcgggcgtggatgggtcgccactccagggcagcgacatccaggttcagtacgtgcagctggcgccagtgagtgaccacacggccggggcacagacggccgaagccctgcagcccacgctacagccggagatgcagctcgagcacggggccatccagattcagtgagcggtgcccatggcaccaggagcccctcgccggctccgcctacggcccggcccccacgcgccctgctctcacggcctcggcacaggcagcggctgcacgtgttctgctgaagtgcgtctgaaggccgctgcctccgcggggaacagcatcctatcaactgaaagagcagccgccgccgcccccagccggagacccctttcgtttgagtcctgctgttggtgtcggagcacgaggggaggcacggtgcggagagcgtcgcatatgcgcgggaaatcaagaactatgatatttttctgtttaaacagctttttttaatttgctatggtgtttataacaaaaaagaaaatttgaaaaaaaaaatcccaggggagtagcaggagccctttgctgtgtgctctgtccagtgtcatgagacgggagccctttgctgtgtgctctgtccagtgtcatgagacgggagccctttgctgtgtgctctgtccagtgtcatgagacgggagccctttgctgtgtgctctgtccagtgtcatgaggcaggtgtttgcaaagccagctctcggttccgatggggtattgctgacctacttttctaggggaaatgctcttaaacactgtaattatgcatttctaatgaaataaaatgtatttatgacc

SEQ ID NO: 638 - DNA, 2438 bp, Homo sapiens
  source 1..2438: mol_type = genomic DNA
ctttctcagcctccttagtagctgggattacaggcatgtgccaccataccctgctaattttcgtatttttagtagagatggggttttgccacattggccaggctgacaggtgatccacccgccttggccttccaaagtgctgggatgacagatgtgaccaaaagccagccccactgtgagttgaactctttcgtgttgaccggccactctccgtgctctggatgatgtcggaacacgacctggccgatgtggttcagattgcagtggaagacctgagccctgaccacccagttgttttggagaatcatgtagtgacagatgaagacgaacctgctttgaaacgccagcgactagaaatcaattgccaggatccatctataaagacaatctgcttgcggttggatagcattgaagccaaattgcaagccctggaggctacttgtaaatccttagaagaaaagctggatctggtcacgaacaagcagcacagccccatccaggtccccatggtggccggctcccctctcggggcaacccagacgtgcaacaaagtgcgatgcgtcgtcccccagactacagtaatactcaacaatgatcggcagaacgccattgtagccaagatggaagaccccttgagcaacagggcaccggattccctggaaaatgtcattagcaacgctgtgcctgggcgtcggcagaacaccattgtggtgaaggtgccgggccaagaagacagccaccacgaggacggggagagcggctcggaggccagcgactctgtgtccagctgtgggcaggcgggcagtcagagcatcgggagcaacgtcacgctcatcaccctgaactcggaagaggactaccccaatggcacctggctgggcgacgagaacaaccccgagatgcgggtacgctgcgccatcatcccctccgacatgctgcacatcagcaccaactgccgcacggccgagaagatggcgctcacgctgctggactacctcttccaccgcgaggtgcaggctgtgtccaacctctcggggcagggcaagcacgggaagaagcagctggacccgctcaccatctacggcatccggtgtcaccttttctataaatttggcatcacagaatccgactggtaccgaatcaagcagagcatcgactccaagtgccgcacggcgtggcggcgcaagcagcggggccagagcctggcggtcaagagcttctcgcggagaacgcccaactcgtcctcctactgcccttcagagccgatgatgagcaccccacctcctgccagcgagctcccgcagccacagccgcagccgcaggccctgcactacgcgctggccaacgcacagcaggtgcagatccaccagatcggagaagacggacaggtgcaagtaggacacctccacatcgcccaggtgccgcagggggagcaagtccagatcacgcaggacagcgagggcaacctccagatccatcacgtggggcaggacggtcagcttctagaggccacccgcatcccctgcctcctggccccatccgtcttcaaagccagcagtggccaggtgctgcagggtgcacagctgatcgccgtggcctcctcggaccccgcggcggcgggcgtggatgggtcgccactccagggcagcgacatccaggttcagtacgtgcagctggcgccagtgagtgaccacacggccggggcacagacggccgaagccctgcagcccacgctacagccggagatgcagctcgagcacggggccatccagattcagtgagcggtgcccatggcaccaggagcccctcgccggctccgcctacggcccggcccccacgcgccctgctctcacggcctcggcacaggcagcggctgcacgtgttctgctgaagtgcgtctgaaggccgctgcctccgcggggaacagcatcctatcaactgaaagagcagccgccgccgcccccagccggagacccctttcgtttgagtcctgctgttggtgtcggagcacgaggggaggcacggtgcggagagcgtcgcatatgcgcgggaaatcaagaactatgatatttttctgtttaaacagctttttttaatttgctatggtgtttataacaaaaaagaaaatttgaaaaaaaaaatcccaggggagtagcaggagccctttgctgtgtgctctgtccagtgtcatgagacgggagccctttgctgtgtgctctgtccagtgtcatgagacgggagccctttgctgtgtgctctgtccagtgtcatgagacgggagccctttgctgtgtgctctgtccagtgtcatgaggcaggtgtttgcaaagccagctctcggttccgatggggtattgctgacctacttttctaggggaaatgctcttaaacactgtaattatgcatttctaatgaaataaaatgtatttatgaccaca

SEQ ID NO: 639 - DNA, 2283 bp, Homo sapiens
  source 1..2283: mol_type = genomic DNA
agagcggcggcttctctcgcgaggacggacgccattatcgcatctccccgacaaacaccacgagaattccgcagcccacacggtgaccaaaagccagccccactgtgagttgaactctttcgtgttgaccggccactctccgtgctctggatgatgtcggaacacgacctggccgatgtggttcagattgcagtggaagacctgagccctgaccacccagttgttttggagaatcatgtagtgacagatgaagacgaacctgctttgaaacgccagcgactagaaatcaattgccaggatccatctataaagtcattcctgtattccatcaaccagacaatctgcttgcggttggatagcattgaagccaaattgcaagccctggaggctacttgtaaatccttagaagaaaagctggatctggtcacgaacaagcagcacagccccatccaggtccccatggtggccggctcccctctcggggcaacccagacgtgcaacaaagtgcgatgcgctgtgcctgggcgtcggcagaacaccattgtggtgaaggtgccgggccaagaagacagccaccacgaggacggggagagcggctcggaggccagcgactctgtgtccagctgtgggcaggcgggcagtcagagcatcgggagcaacgtcacgctcatcaccctgaactcggaagaggactaccccaatggcacctggctgggcgacgagaacaaccccgagatgcgggtacgctgcgccatcatcccctccgacatgctgcacatcagcaccaactgccgcacggccgagaagatggcgctcacgctgctggactacctcttccaccgcgaggtgcaggctgtgtccaacctctcggggcagggcaagcacgggaagaagcagctggacccgctcaccatctacggcatccggtgtcaccttttctataaatttggcatcacagaatccgactggtaccgaatcaagcagagcatcgactccaagtgccgcacggcgtggcggcgcaagcagcggggccagagcctggcggtcaagagcttctcgcggagaacgcccaactcgtcctcctactgcccttcagagccgatgatgagcaccccacctcctgccagcgagctcccgcagccacagccgcagccgcaggccctgcactacgcgctggccaacgcacagcaggtgcagatccaccagatcggagaagacggacaggtgcaagtaatcccacagggacacctccacatcgcccaggtgccgcagggggagcaagtccagatcacgcaggacagcgagggcaacctccagatccatcacgtggggcaggacggtcagcttctagaggccacccgcatcccctgcctcctggccccatccgtcttcaaagccagcagtggccaggtgctgcagggtgcacagctgatcgccgtggcctcctcggaccccgcggcggcgggcgtggatgggtcgccactccagggcagcgacatccaggttcagtacgtgcagctggcgccagtgagtgaccacacggccggggcacagacggccgaagccctgcagcccacgctacagccggagatgcagctcgagcacggggccatccagattcagtgagcggtgcccatggcaccaggagcccctcgccggctccgcctacggcccggcccccacgcgccctgctctcacggcctcggcacaggcagcggctgcacgtgttctgctgaagtgcgtctgaaggccgctgcctccgcggggaacagcatcctatcaactgaaagagcagccgccgccgcccccagccggagacccctttcgtttgagtcctgctgttggtgtcggagcacgaggggaggcacggtgcggagagcgtcgcatatgcgcgggaaatcaagaactatgatatttttctgtttaaacagctttttttaatttgctatggtgtttataacaaaaaagaaaatttgaaaaaaaaaatcccaggggagtagcaggagccctttgctgtgtgctctgtccagtgtcatgagacgggagccctttgctgtgtgctctgtccagtgtcatgagacgggagccctttgctgtgtgctctgtccagtgtcatgagacgggagccctttgctgtgtgctctgtccagtgtcatgaggcaggtgtttgcaaagccagctctcggttccgatggggtattgctgacctacttttctaggggaaatgctcttaaacactgtaattatgcatttctaatgaaataaaatgtatttatgaccaca

SEQ ID NO: 640 - DNA, 586 bp, Homo sapiens
  source 1..586: mol_type = genomic DNA
ttctctcgcgaggacggacgccattatcgcatctccccgacaaacaccacgagaattccgcagcccacacggatgcagaaagtagatgacattccatccacactgtgtgagcaaattggagagattgccttgatagaggactgatgtttttcactgatgagatggtgaccaaaagccagccccactgtgagttgaactctttcgtgttgaccggccactctccgtgctctggatgatgtcggaacacgacctggccgatgtggttcagattgcagtggaagacctgagccctgaccacccagttgttttggagaatcatgtagtgacagatgaagacgaacctgctttgaaacgccagcgactagaaatcaattgccaggatccatctataaagtcattcctgtattccatcaaccagacaatctgcttgcggttggatagcattgaagccaaattgcaagccctggaggctacttgtaaatccttagaagaaaagctggatctggtcacgaacaagcagcacagccccatccaggtccccatggtggccggctcccctctcggggcaacccagacgtgcaacaaa

SEQ ID NO: 641 - DNA, 644 bp, Homo sapiens
  source 1..644: mol_type = genomic DNA
atcactttttttttttttgagacagagtctcgctctgtcgccaggctggagtgcagtggcgcgatctcggctcactgcaacctctgactcgcgggctcaagcgattctcctgcctcagcctcccgagtagttgggattacaaggcgcccgccaccacgcccggcataattttgtatttttagtagagacagggtttcgccatgttggccaggctggtcgcgaaccctttacctcaggtgttccgcccgccttggcctcccacagggctgagattacaggcgtgatccaccgtgcccggccgccatcacttatttatattatgtgttacctataggacttatctaagaccataatcactgccgcgtgtgctaagtcccgcgcgcgtgcactcaggcccctctggatagacactggggacccctgaccacttatgtcagggaaaacgccaccaagcgctccggaacctcagggcaggacccgccgcagcagcaggtgaccaaaagccagccccactgtgagttgaactctttcgtgttgaccggccactctccgtgctctggatgatgtcggaacacgacctggccgatgtggttcagattgcagtggaagacctgagccctgaccacccagttgttttggagaat

SEQ ID NO: 642 - DNA, 455 bp, Homo sapiens
  source 1..455: mol_type = genomic DNA
catctgtaaagtgaggtaggccccttcaagacatgtaaggagtatctatggctgtggaatgcatctttttagactggccgctctgcatggatctgatcacgggtgaccaaaagccagccccactgtgagttgaactctttcgtgttgaccggccactctccgtgctctggatgatgtcggaacacgacctggccgatgtggttcagattgcagtggaagacctgagccctgaccacccagttgttttggagaatcatgtagtgacagatgaagacgaacctgctttgaaacgccagcgactagaaatcaattgccaggatccatctataaagtcattcctgtattccatcaaccagacaatctgcttgcggttggatagcattgaagccaaattgcaagccctggaggctacttgtaaatccttagaagaaaagctggatctggtcacgaacaag

SEQ ID NO: 643 - DNA, 560 bp, Homo sapiens
  source 1..560: mol_type = genomic DNA
agtattcttggggagaaagataacagggaagtgaggagggttcagctgtggaagtgctgggatggctgatccgagtgaccatggcctagacggggtttaaaccctggactgaagaaagtgccggtgaccaaaagccagccccactgtgagttgaactctttcgtgttgaccggccactctccgtgctctggatgatgtcggaacacgacctggccgatgtggttcagattgcagtggaagacctgagccctgaccacccagttgttttggagaatcatgtagtgacagatgaagacgaacctgctttgaaacgccagcgactagaaatcaattgccaggatccatctataaagtcattcctgtattccatcaaccagacaatctgcttgcggttggatagcattgaagccaaattgcaagccctggaggctacttgtaaatccttagaagaaaagctggatctggtcacgaacaagcagcacagccccatccaggtccccatggtggccggctcccctctcggggcaacccagacgtgcaacaaagtgcgatgcgtcgtc

SEQ ID NO: 644 - DNA, 736 bp, Homo sapiens
  source 1..736: mol_type = genomic DNA
gcagagcggcggcttctctcgcgaggacggacgccattatcgcatctccccgacaaacaccacgagaattccgcagcccacacggtgaccaaaagccagccccactgtgagttgaactctttcgtgttgaccggccactctccgtgctctggatgatgtcggaacacgacctggccgatgtggttcagattgcagtggaagacctgagccctgaccacccaggtacagagctgtgggacattgttttggagaatcatgtagtgacagatgaagacgaacctgctttgaaacgccagcgactagaaatcaattgccaggatccatctataaagtcattcctgtattccatcaaccagacaatctgcttgcggttggatagcattgaagccaaattgcaagccctggaggctacttgtaaatccttagaagaaaagctggatctggtcacgaacaagcagcacagccccatccaggtccccatggtggccggctcccctctcggggcaacccagacgtgcaacaaagtgcgatgcgctgtgcctgggcgtcggcagaacaccattgtggtgaaggtgccgggccaagaagacagccaccacgaggacggggagagcggctcggaggccagcgactctgtgtccagctgtgggcaggcgggcagtcagagcatcgggagcaacgtcacgctcatcaccctgaactcggaagaggactaccccaatggcacctggctggg

SEQ ID NO: 645 - DNA, 566 bp, Homo sapiens
  source 1..566: mol_type = genomic DNA
atttccactggccccttaagagaggcaggagtttaacctggactctctggacccggggctgtttgtggaagggcctcggcatgtccttgggtttagtctggctgcacgtggtgggctccagaataccctgttttgaaccaggtgaccaaaagccagccccactgtgagttgaactctttcgtgttgaccggccactctccgtgctctggatgatgtcggaacacgacctggccgatgtggttcagattgcagtggaagacctgagccctgaccacccagttgttttggagaatcatgtagtgacagatgaagacgaacctgctttgaaacgccagcgactagaaatcaattgccaggatccatctataaagtcattcctgtattccatcaaccagacaatctgcttgcggttggatagcattgaagccaaattgcaagccctggaggctacttgtaaatccttagaagaaaagctggatctggtcacgaacaagcagcacagccccatccaggtccccatggtggccggctcccctctcggggcaacccagacgtgcaacaaagtg

SEQ ID NO: 646 - DNA, 1551 bp, Homo sapiens
  source 1..1551: mol_type = genomic DNA
agagcggcggcttctctcgcgaggacggacgccattatcgcatctccccgacaaacaccacgagaattccgcagcccacacggtgaccaaaagccagccccactgtgagttgaactctttcgtgttgaccggccactctccgtgctctggatgatgtcggaacacgacctggccgatgtggttcagattgcagtggaagacctgagccctgaccacccagttgttttggagaatcatgtagtgacagatgaagacgaacctgctttgaaacgccagcgactagaaatcaattgccaggatccatctataaagtcattcctgtattccatcaaccagacaatctgcttgcggttggatagcattgaagccaaattgcaagccctggaggctacttgtaaatccttagaagaaaagctggatctggtcacgaacaagcagcacagccccatccaggtccccatggtggccggctcccctctcggggcaacccagacgtgcaacaaagtgcgatgcgctgtgcctgggcgtcggcagaacaccattgtggtgaaggtgccgggccaagaagacagccaccacgaggacggggagagcggctcggaggccagcgactctgtgtccagctgtgggcaggcgggcagtcagagcatcgggagcaacgtcacgctcatcaccctgaactcggaagaggactaccccaatggcacctggctgggcgacgagaacaaccccgagatgcgggtacgctgcgccatcatcccctccgacatgctgcacatcagcaccaactgccgcacggccgagaagatggcgctcacgctgctggactacctcttccaccgcgaggtgcaggctgtgtccaacctctcggggcagggcaagcacgggaagaagcagctggacccgctcaccatctacggcatccggtgtcaccttttctataaatttggcatcacagaatccgactggtaccgaatcaagcagagcatcgactccaagtgccgcacggcgtggcggcgcaagcagcggggccagagcctggcggtcaagagcttctcgcggagaacgcccaactcgtcctcctactgcccttcagagccgatgatgagcaccccacctcctgccagcgagctcccgcagccacagccgcagccgcaggccctgcactacgcgctggccaacgcacagcaggtgcagatccaccagatcggagaagacggacaggtgcaagtaggacacctccacatcgcccaggtgccgcagggggagcaagtccagatcacgcaggacagcgagggcaacctccagatccatcacgtggggcaggacggtcaggtgctgcagggtgcacagctgatcgccgtggcctcctcggaccccgcggcggcgggcgtggatgggtcgccactccagggcagcgacatccaggttcagtacgtgcagctggcgccagtgagtgaccacacggccggggcacagacggccgaagccctgcagcccacgctacagccggagatgcagctcgagcacggggccatccagattcagtga

SEQ ID NO: 647 - DNA, 1648 bp, Homo sapiens
  source 1..1648: mol_type = genomic DNA
gggcaggtcccacggaggggatgctgcggccaggctccgtggggtggggcaccctgcgacgggctgctcctcttcccagggccaccggtgagactctcagtgcacagagtgcggttctgtgtggaggtgtgggatgcatctcctggccctcccgtagtggggtgcaaccccaagtgaagaccccgtggctcatgtcaagtgccctcagggctggggctgcccacccgcctgcctgggccgtcttgacaccggagctgcctgcctggatgttggagcgcccagtggattgagtgggaagtgggcctgggtgcttacaggcgatggggtcaccagagcccacccaggggcctcgcctgtcccccattctcattccatactctgggaggcggtacaaggtcgggagggccagcggggctctctgccaccaggactcacttccgcccatcttggaactgggcctcactttcctgcgagcttctgctgggttctcagtgcccaccagcagctcctttgctctccctgagcccttgaggtcactctgccttgggaatggggagggtttgggtctcagcctcacgctcacggtcctggcttggattttaggcctcagtggcactctgggagcgcttgtgctcttcatggttgccactgggattttccaggaggctctgtggcatttgctgttgctctctttttctgtggaagctctgccttgcttttttttttttcccttttttctgctctgtaggtgcttgagggcggagttgcagatccagcagagactcgatggcactctctcactggatctgatgcgacttgagagcgatggggagacaggatgtgccgcagagtcctcggtgctgcagggtgcacagctgatcgccgtggcctcctcggaccccgcggcggcgggcgtggatgggtcgccactccagggcagcgacatccaggttcagtacgtgcagctggcgccagtgagtgaccacacggccggggcacagacggccgaagccctgcagcccacgctacagccggagatgcagctcgagcacggggccatccagattcagtgagcggtgcccatggcaccaggagcccctcgccggctccgcctacggcccggcccccacgcgccctgctctcacggcctcggcacaggcagcggctgcacgtgttctgctgaagtgcgtctgaaggccgctgcctccgcggggaacagcatcctatcaactgaaagagcagccgccgccgcccccagccggagacccctttcgtttgagtcctgctgttggtgtcggagcacgaggggaggcacggtgcggagagcgtcgcatatgcgcgggaaatcaagaactatgatatttttctgtttaaacagctttttttaatttgctatggtgtttataacaaaaaagaaaatttgaaaaaaaaaatcccaggggagtagcaggagccctttgctgtgtgctctgtccagtgtcatgagacgggagccctttgctgtgtgctctgtccagtgtcatgagacgggagccctttgctgtgtgctctgtccagtgtcatgagacgggagccctttgctgtgtgctctgtccagtgtcatgagacgggagccctttggatggggccggtgtcagcaaaggaggca

SEQ ID NO: 648 - DNA, 2372 bp, Homo sapiens
  source 1..2372: mol_type = genomic DNA
agtattcttggggagaaagataacagggaagtgaggagggttcagctgtggaagtgctgggatggctgatccgagtgaccatggcctagacggggtttaaaccctggactgaagaaagtgccggtgaccaaaagccagccccactgtgagttgaactctttcgtgttgaccggccactctccgtgctctggatgatgtcggaacacgacctggccgatgtggttcagattgcagtggaagacctgagccctgaccacccagttgttttggagaatcatgtagtgacagatgaagacgaacctgctttgaaacgccagcgactagaaatcaattgccaggatccatctataaagtcattcctgtattccatcaaccagacaatctgcttgcggttggatagcattgaagccaaattgcaagccctggaggctacttgtaaatccttagaagaaaagctggatctggtcacgaacaagcagcacagccccatccaggtccccatggtggccggctcccctctcggggcaacccagacgtgcaacaaagtgcgatgcgtcgtcccccagactacagtaatactcaacaatgatcggcagaacgccattgtagccaagatggaagaccccttgagcaacagggcaccggattccctggaaaatgtcattagcaacgctgtgcctgggcgtcggcagaacaccattgtggtgaaggtgccgggccaagaagacagccaccacgaggacggggagagcggctcggaggccagcgactctgtgtccagctgtgggcaggcgggcagtcagagcatcgggagcaacgtcacgctcatcaccctgaactcggaagaggactaccccaatggcacctggctgggcgacgagaacaaccccgagatgcgggtacgctgcgccatcatcccctccgacatgctgcacatcagcaccaactgccgcacggccgagaagatggcgctcacgctgctggactacctcttccaccgcgaggtgcaggctgtgtccaacctctcggggcagggcaagcacgggaagaagcagctggacccgctcaccatctacggcatccggtgtcaccttttctataaatttggcatcacagaatccgactggtaccgaatcaagcagagcatcgactccaagtgccgcacggcgtggcggcgcaagcagcggggccagagcctggcggtcaagagcttctcgcggagaacgcccaactcgtcctcctactgcccttcagagccgatgatgagcaccccacctcctgccagcgagctcccgcagccacagccgcagccgcaggccctgcactacgcgctggccaacgcacagcaggtgcagatccaccagatcggagaagacggacaggtgcaagtaatcccacagggacacctccacatcgcccaggtgccgcagggggagcaagtccagatcacgcaggacagcgagggcaacctccagatccatcacgtggggcaggacggtcaggtgctgcagggtgcacagctgatcgccgtggcctcctcggaccccgcggcggcgggcgtggatgggtcgccactccagggcagcgacatccaggttcagtacgtgcagctggcgccagtgagtgaccacacggccggggcacagacggccgaagccctgcagcccacgctacagccggagatgcagctcgagcacggggccatccagattcagtgagcggtgcccatggcaccaggagcccctcgccggctccgcctacggcccggcccccacgcgccctgctctcacggcctcggcacaggcagcggctgcacgtgttctgctgaagtgcgtctgaaggccgctgcctccgcggggaacagcatcctatcaactgaaagagcagccgccgccgcccccagccggagacccctttcgtttgagtcctgctgttggtgtcggagcacgaggggaggcacggtgcggagagcgtcgcatatgcgcgggaaatcaagaactatgatatttttctgtttaaacagctttttttaatttgctatggtgtttataacaaaaaagaaaatttgaaaaaaaaaatcccaggggagtagcaggagccctttgctgtgtgctctgtccagtgtcatgagacgggagccctttgctgtgtgctctgtccagtgtcatgagacgggagccctttgctgtgtgctctgtccagtgtcatgagacgggagccctttgctgtgtgctctgtccagtgtcatgaggcaggtgtttgcaaagccagctctcggttccgatggggtattgctgacctacttttctaggggaaatgctcttaaacactgtaattatgcatttctaatgaaataaaatgtatttatgacc

SEQ ID NO: 649 - DNA, 2201 bp, Homo sapiens
  source 1..2201: mol_type = genomic DNA
agagcggcggcttctctcgcgaggacggacgccattatcgcatctccccgacaaacaccacgagaattccgcagcccacacggtgaccaaaagccagccccactgtgagttgaactctttcgtgttgaccggccactctccgtgctctggatgatgtcggaacacgacctggccgatgtggttcagattgcagtggaagacctgagccctgaccacccagttgttttggagaatcatgtagtgacagatgaagacgaacctgctttgaaacgccagcgactagaaatcaattgccaggatccatctataaagtcattcctgtattccatcaaccagacaatctgcttgcggttggatagcattgaagccaaattgcaagccctggaggctacttgtaaatccttagaagaaaagctggatctggtcacgaacaagcagcacagccccatccaggtccccatggtggccggctcccctctcggggcaacccagacgtgcaacaaagtgcgatgcgctgtgcctgggcgtcggcagaacaccattgtggtgaaggtgccgggccaagaagacagccaccacgaggacggggagagcggctcggaggccagcgactctgtgtccagctgtgggcaggcgggcagtcagagcatcgggagcaacgtcacgctcatcaccctgaactcggaagaggactaccccaatggcacctggctgggcgacgagaacaaccccgagatgcgggtacgctgcgccatcatcccctccgacatgctgcacatcagcaccaactgccgcacggccgagaagatggcgctcacgctgctggactacctcttccaccgcgaggtgcaggctgtgtccaacctctcggggcagggcaagcacgggaagaagcagctggacccgctcaccatctacggcatccggtgtcaccttttctataaatttggcatcacagaatccgactggtaccgaatcaagcagagcatcgactccaagtgccgcacggcgtggcggcgcaagcagcggggccagagcctggcggtcaagagcttctcgcggagaacgcccaactcgtcctcctactgcccttcagagccgatgatgagcaccccacctcctgccagcgagctcccgcagccacagccgcagccgcaggccctgcactacgcgctggccaacgcacagcaggtgcagatccaccagatcggagaagacggacaggtgcaagtaatcccacagggacacctccacatcgcccaggtgccgcagggggagcaagtccagatcacgcaggacagcgagggcaacctccagatccatcacgtggggcaggacggtcagcttctagaggccacccgcatcccctgcctcctggccccatccgtcttcaaagccagcagtggccaggtgctgcagggtgcacagctgatcgccgtggcctcctcggaccccgcggcggcgggcgtggatgggtcgccactccagggcagcgacatccaggttcagtacgtgcagctggcgccagtgagtgaccacacggccggggcacagacggccgaagccctgcagcccacgctacagccggagatgcagctcgagcacggggccatccagattcagtgagcggtgcccatggcaccaggagcccctcgccggctccgcctacggcccggcccccacgcgccctgctctcacggcctcggcacaggcagcggctgcacgtgttctgctgaagtgcgtctgaaggccgctgcctccgcggggaacagcatcctatcaactgaaagagcagccgccgccgcccccagccggagacccctttcgtttgagtcctgctgttggtgtcggagcacgaggggaggcacggtgcggagagcgtcgcatatgcgcgggaaatcaagaactatgatatttttctgtttaaacagctttttttaatttgctatggtgtttataacaaaaaagaaaatttgaaaaaaaaaatcccaggggagtagcaggagccctttgctgtgtgctctgtccagtgtcatgagacgggagccctttgctgtgtgctctgtccagtgtcatgagacgggagccctttgctgtgtgctctgtccagtgtcatgagacgggagccctttgctgtgtgctctgtccagtgtcatgagacgggagccctttggatggggccggtgtcagcaaaggaggca

SEQ ID NO: 650 - DNA, 3725 bp, Homo sapiens
  source 1..3725: mol_type = genomic DNA
gaccgcgcgggaccgttaaatttgaaacttggcggctaggggtgtgggcttgaggtggccggtttgttagggagtcgtgtacgtgccttggtcgcttctgtagctccgagggcaggttgcggaagaaagcccaggcggtctgtggcccagaggaaaggcctgcagcaggacgaggacctgagccaggaatgcaggatggcggcggtgaagaaggaagggggtgctctgagtgaagccatgtccctggagggagatgaatgggaactgagtaaagaaaatgtacaacctttaaggcaagggcggatcatgtccacgcttcagggagcactggcacaagaatctgcctgtaacaatactcttcagcagcagaaacgggcatttgaatatgaaattcgattttacactggaaatgaccctctggatgtttgggataggtatatcagctggacagagcagaactatcctcaaggtgggaaggagagtaatatgtcaacgttattagaaagagctgtagaagcactacaaggagaaaaacgatattatagtgatcctcgatttctcaatctctggcttaaattagggcgtttatgcaatgagcctttggatatgtacagttacttgcacaaccaagggattggtgtttcacttgctcagttctatatctcatgggcagaagaatatgaagctagagaaaactttaggaaagcagatgcgatatttcaggaagggattcaacagaaggctgaaccactagaaagactacagtcccagcaccgacaattccaagctcgagtgtctcggcaaactctgttggcacttgagaaagaagaagaggaggaagtttttgagtcttctgtaccacaacgaagcacactagctgaactaaagagcaaagggaaaaagacagcaagagctccaatcatccgtgtaggaggtgctctcaaggctccaagccagaacagaggactccaaaatccatttcctcaacagatgcaaaataatagtagaattactgtttttgatgaaaatgctgatgaggcttctacagcagagttgtctaagcctacagtccagccatggatagcaccccccatgcccagggccaaagagaatgagctgcaagcaggcccttggaacacaggcaggtccttggaacacaggcctcgtggcaatacagcttcactgatagctgtacccgctgtgcttcccagtttcactccatatgtggaagagactgcacgacagccagttatgacaccatgtaaaattgaacctagtataaaccacatcctaagcaccagaaagcctggaaaggaagaaggagatcctctacaaagggttcagagccatcagcaagcgtctgaggagaagaaagagaagatgatgtattgtaaggagaagatttatgcaggagtaggggaattctcctttgaagaaattcgggctgaagttttccggaagaaattaaaagagcaaagggaagccgagctattgaccagtgcagagaagagagcagaaatgcagaaacagattgaagagatggagaagaagctaaaagaaatccaaactactcagcaagaaagaacaggtgatcagcaagaagagacgatgcctacaaaggagacaactaaactgcaaattgcttccgagtctcagaaaataccaggaatgactctatccagttctgtttgtcaagtaaactgttgtgccagagaaacttcacttgcggagaacatttggcaggaacaacctcattctaaaggtcccagtgtacctttctccatttttgatgagtttcttctttcagaaaagaagaataaaagtcctcctgcagatcccccacgagttttagctcaacgaagaccccttgcagttctcaaaacctcagaaagcatcacctcaaatgaagatgtgtctccagatgtttgtgatgaatttacaggaattgaacccttgagcgaggatgccattatcacaggcttcagaaatgtaacaatttgtcctaacccagaagacacttgtgactttgccagagcagctcgttttgtatccactccttttcatgagataatgtccttgaaggatctcccttctgatcctgagagactgttaccggaagaagatctagatgtaaagacctctgaggaccagcagacagcttgtggcactatctacagtcagactctcagcatcaagaagctgagcccaattattgaagacagtcgtgaagccacacactcctctggcttctctggttcttctgcctcggttgcaagcacctcctccatcaaatgtcttcaaattcctgagaaactagaacttactaatgagacttcagaaaaccctactcagtcaccatggtgttcacagtatcgcagacagctactgaagtccctaccagagttaagtgcctctgcagagttgtgtatagaagacagaccaatgcctaagttggaaattgagaaggaaattgaattaggtaatgaggattactgcattaaacgagaatacctaatatgtgaagattacaagttattctgggtggcgccaagaaactctgcagaattaacagtaataaaggtatcttctcaacctgtcccatgggacttttatatcaacctcaagttaaaggaacgtttaaatgaagattttgatcatttttgcagctgttatcaatatcaagatggctgtattgtttggcaccaatatataaactgcttcacccttcaggatcttctccaacacagtgaatatattacccatgaaataacagtgttgattatttataaccttttgacaatagtggagatgctacacaaagcagaaatagtccatggtgacttgagtccaaggtgtctgattctcagaaacagaatccacgatccctatgattgtaacaagaacaatcaagctttgaagatagtggacttttcctacagtgttgaccttagggtgcagctggatgtttttaccctcagcggctttcggactgtacagatcctggaaggacaaaagatcctggctaactgttcttctccctaccaggtagacctgtttggtatagcagatttagcacatttactattgttcaaggaacacctacaggtcttctgggatgggtccttctggaaacttagccaaaatatttctgagctaaaagatggtgaattgtggaataaattctttgtgcggattctgaatgccaatgatgaggccacagtgtctgttcttggggagcttgcagcagaaatgaatggggtttttgacactacattccaaagtcacctgaacaaagccttatggaaggtagggaagttaactagtcctggggctttgctctttcagtgagctaggcaatcaagtctcacagattgctgcctcagagcaatggttgtattgtggaacactgaaactgtatgtgctgtaatttaatttaggacacatttagatgcactaccattgctgttctactttttggtacaggtatattttgacgtcactgatattttttatacagtgatatacttactcatggccttgtctaacttttgtgaagaactattttattctaaacagactcattacaaatggttaccttgttatttaacccatttgtctctacttttccctgtacttttcccatttgtaatttgtaaaatgttctcttatgatcaccatgtattttgtaaataataaaatagtatctgttaaatttgtgcttctaa

SEQ ID NO: 651 - DNA, 3628 bp, Homo sapiens
  source 1..3628: mol_type = genomic DNA
gtgtgggcttgaggtggccggtttgttagggagtcgtgtacgtgccttggtcgcttctgtagctccgagggcaggttgcggaagaaagcccaggcggtctgtggcccagaggaaaggcctgcagcaggacgaggacctgagccaggaatgcaggatggcggcggtgaagaaggaagggggtgctctgagtgaagccatgtccctggagggagatgaatgggaactgagtaaagaaaatgtacaacctttaaggcaagggcggatcatgtccacgcttcagggagcactggcacaagaatctgcctgtaacaatactcttcagcagcagaaacgggcatttgaatatgaaattcgattttacactggaaatgaccctctggatgtttgggataggtgggtctttttatttcacaaggacaatagaaacattaacaggtatatcagctggacagagcagaactatcctcaaggtgggaaggagagtaatatgtcaacgttattagaaagagctgtagaagcactacaaggagaaaaacgatattatagtgatcctcgatttctcaatctctggcttaaattagggcgtttatgcaatgagcctttggatatgtacagttacttgcacaaccaagggattggtgtttcacttgctcagttctatatctcatgggcagaagaatatgaagctagagaaaactttaggaaagcagatgcgatatttcaggaagggattcaacagaaggctgaaccactagaaagactacagtcccagcaccgacaattccaagctcgagtgtctcggcaaactctgttggcacttgagaaagaagaagaggaggaagtttttgagtcttctgtaccacaacgaagcacactagctgaactaaagagcaaagggaaaaagacagcaagagctccaatcatccgtgtaggaggtgctctcaaggctccaagccagaacagaggactccaaaatccatttcctcaacagatgcaaaataatagtagaattactgtttttgatgaaaatgctgatgaggcttctacagcagagttgtctaagcctacagtccagccatggatagcaccccccatgcccagggccaaagagaatgagctgcaagcaggcccttggaacacaggcaggtccttggaacacaggcctcgtggcaatacagcttcactgatagctgtacccgctgtgcttcccagtttcactccatatgtggaagagactgcacgacagccagttatgacaccatgtaaaattgaacctagtataaaccacatcctaagcaccagaaagcctggaaaggaagaaggagatcctctacaaagggttcagagccatcagcaagcgtctgaggagaagaaagagaagatgatgtattgtaaggagaagatttatgcaggagtaggggaattctcctttgaagaaattcgggctgaagttttccggaagaaattaaaagagcaaagggaagccgagctattgaccagtgcagagaagagagcagaaatgcagaaacagattgaagagatggagaagaagctaaaagaaatccaaactactcagcaagaaagaacaggtgatcagcaagaagagacgatgcctacaaaggagacaactaaactgcaaattgcttccgagtctcagaaaataccaggaatgactctatccagttctgtttgtcaagtaaactgttgtgccagagaaacttcacttgcggagaacatttggcaggaacaacctcattctaaaggtcccagtgtacctttctccatttttgatgagtttcttctttcagaaaagaagaataaaagtcctcctgcagatcccccacgagttttagctcaacgaagaccccttgcagttctcaaaacctcagaaagcatcacctcaaatgaagatgtgtctccagatgtttgtgatgaatttacaggaattgaacccttgagcgaggatgccattatcacaggcttcagaaatgtaacaatttgtcctaacccagaagacacttgtgactttgccagagcagctcgttttgtatccactccttttcatgagataatgtccttgaaggatctcccttctgatcctgagagactgttaccggaagaagatctagatgtaaagacctctgaggaccagcagacagcttgtggcactatctacagtcagactctcagcatcaagaagctgagcccaattattgaagacagtcgtgaagccacacactcctctggcttctctggttcttctgcctcggttgcaagcacctcctccatcaaatgtcttcaaattcctgagaaactagaacttactaatgagacttcagaaaaccctactcagtcaccatggtgttcacagtatcgcagacagctactgaagtccctaccagagttaagtgcctctgcagagttgtgtatagaagacagaccaatgcctaagttggaaattgagaaggaaattgaattaggtaatgaggattactgcattaaacgagaatacctaatatgtgaagattacaagttattctgggtggcgccaagaaactctgcagaattaacagtaataaaggtatcttctcaacctgtcccatgggacttttatatcaacctcaagttaaaggaacgtttaaatgaagattttgatcatttttgcagctgttatcaatatcaagatggctgtattgtttggcaccaatatataaactgcttcacccttcaggatcttctccaacacagtgaatatattacccatgaaataacagtgttgattatttataaccttttgacaatagtggagatgctacacaaagcagaaatagtccatggtgacttgagtccaaggtgtctgattctcagaaacagaatccacgatccctatgattgtaacaagaacaatcaagctttgaagatagtggacttttcctacagtgttgaccttagggtgcagctggatgtttttaccctcagcggctttcggactgtacagatcctggaaggacaaaagatcctggctaactgttcttctccctaccaggtagacctgtttggtatagcagatttagcacatttactattgttcaaggaacacctacaggtcttctgggatgggtccttctggaaacttagccaaaatatttctgagctaaaagatggtgaattgtggaataaattctttgtgcggattctgaatgccaatgatgaggccacagtgtctgttcttggggagcttgcagcagaaatgaatggggtttttgacactacattccaaagtcacctgaacaaagccttatggaaggtagggaagttaactagtcctggggctttgctctttcagtgagctaggcaatcaagtctcacagattgctgcctcagagcaatggttgtattgtggaacactgaaactgtatgtgctgtaatttaatttaggacacatttagatgcactaccattgctgttctactttttggtacaggtatattttgacgtcactgatattttttatacagtgatatacttactcatggccttgtctaacttttgtgaagaactattttattctaaacagactcattacaaatggttaccttgttatttaacccatttgtctctacttttc

SEQ ID NO: 652 - DNA, 3347 bp, Homo sapiens
  source 1..3347: mol_type = genomic DNA
accgttaaatttgaaacttggcggctaggggtgtgggcttgaggtggccggtttgttagggagtcgtgtacgtgccttggtcgcttctgtagctccgagggcaggttgcggaagaaagcccaggcggtctgtggcccagaggaaaggcctgcagcaggacgaggacctgagccaggaatgcaggatggcggcggtgaagaaggaagggggtgctctgagtgaagccatgtccctggagggagatgaatgggaactgagtaaagaaaatgtacaacctttaaggcaagggcggatcatgtccacgcttcagggagcactggcacaagaatctgcctgtaacaatactcttcagcagcagaaacgggcatttgaatatgaaattcgattttacactggaaatgaccctctggatgtttgggataggtatatcagctggacagagcagaactatcctcaaggtgggaaggagagtaatatgtcaacgttattagaaagagctgtagaagcactacaaggagaaaacttctggaaagcagatgcgatatttcaggaagggattcaacagaaggctgaaccactagaaagactacagtcccagcaccgacaattccaagctcgagtgtctcggcaaactctgttggcacttgagaaagaagaagaggaggaagtttttgagtcttctgtaccacaacgaagcacactagctgaactaaagagcaaagggaaaaagacagcaagagctccaatcatccgtgtaggaggtgctctcaaggctccaagccagaacagaggactccaaaatccatttcctcaacagatgcaaaataatagtagaattactgtttttgatgaaaatgctgatgaggcttctacagcagagttgtctaagcctacagtccagccatggatagcaccccccatgcccagggccaaagagaatgagctgcaagcaggcccttggaacacaggcaggtccttggaacacaggcctcgtggcaatacagcttcactgatagctgtacccgctgtgcttcccagtttcactccatatgtggaagagactgcacgacagccagttatgacaccatgtaaaattgaacctagtataaaccacatcctaagcaccagaaagcctggaaaggaagaaggagatcctctacaaagggttcagagccatcagcaagcgtctgaggagaagaaagagaagatgatgtattgtaaggagaagatttatgcaggagtaggggaattctcctttgaagaaattcgggctgaagttttccggaagaaattaaaagagcaaagggaagccgagctattgaccagtgcagagaagagagcagaaatgcagaaacagattgaagagatggagaagaagctaaaagaaatccaaactactcagcaagaaagaacaggtgatcagcaagaagagacgatgcctacaaaggagacaactaaactgcaaattgcttccgagtctcagaaaataccaggaatgactctatccagttctgtttgtcaagtaaactgttgtgccagagaaacttcacttgcggagaacatttggcaggaacaacctcattctaaagtctctctttctctaggtcccagtgtacctttctccatttttgatgagtttcttctttcagaaaagaagaataaaagtcctcctgcagatcccccacgagttttagctcaacgaagaccccttgcagttctcaaaacctcagaaagcatcacctcaaatgaagatgtgtctccagatgtttgtgatgaatttacaggaattgaacccttgagcgaggatgccattatcacaggcttcagaaatgtaacaatttgtcctaacccagaagacactcgtgaagccacacactcctctggcttctctggttcttctgcctcggttgcaagcacctcctccatcaaatgtcttcaaattcctgagaaactagaacttactaatgagacttcagaaaaccctactcagtcaccatggtgttcacagtatcgcagacagctactgaagtccctaccagagttaagtgcctctgcagagttgtgtatagaagacagaccaatgcctaagttggaaattgagaaggaaattgaattaggtaatgaggattactgcattaaacgagaatacctaatatgtgaagattacaagttattctgggtggcgccaagaaactctgcagaattaacagtaataaaggtatcttctcaacctgtcccatgggacttttatatcaacctcaagttaaaggaacgtttaaatgaagattttgatcatttttgcagctgttatcaatatcaagatggctgtattgtttggcaccaatatataaactgcttcacccttcaggatcttctccaacacagtgaatatattacccatgaaataacagtgttgattatttataaccttttgacaatagtggagatgctacacaaagcagaaatagtccatggtgacttgagtccaaggtgtctgattctcagaaacagaatccacgatccctatgattgtaacaagaacaatcaagctttgaagatagtggacttttcctacagtgttgaccttagggtgcagctggatgtttttaccctcagcggctttcggactgtacagatcctggaaggacaaaagatcctggctaactgttcttctccctaccaggtagacctgtttggtatagcagatttagcacatttactattgttcaaggaacacctacaggtcttctgggatgggtccttctggaaacttagccaaaatatttctgagctaaaagatggtgaattgtggaataaattctttgtgcggattctgaatgccaatgatgaggccacagtgtctgttcttggggagcttgcagcagaaatgaatggggtttttgacactacattccaaagtcacctgaacaaagccttatggaaggtagggaagttaactagtcctggggctttgctctttcagtgagctaggcaatcaagtctcacagattgctgcctcagagcaatggttgtattgtggaacactgaaactgtatgtgctgtaatttaatttaggacacatttagatgcactaccattgctgttctactttttggtacaggtatattttgacgtcactgatattttttatacagtgatatacttactcatggccttgtctaacttttgtgaagaactattttattctaaacagactcattacaaatggttaccttgttatttaacccatttgtctctacttttccctgtacttttcccatttgtaatttgtaaaatgttctcttatgatcaccatgtattttgtaaataataaaatagtatctgtt

SEQ ID NO: 653 - DNA, 5766 bp, Homo sapiens
  source 1..5766: mol_type = genomic DNA
ggccttccccctgcgaggatcgccattggcccgggttggctttggaaagcggcggtggctttgggccgggctcggcctcgggaacgccaggggcccctgggtgcggacgggcgcggccaggagggggttaaggcgcaggcggcggcggggcgggggcgggcctggcgggcgccctctccgggccctttgttaacaggcgcgtcccggccaggcggagacgcggccgcggccatgggcgggcgcgggcgcgcggggcggcggtgagggcggctggcggggccgggggcgccgggggggcgcgcgggccgagccgggcctgagccgggcccgcggaccgagctgggagaggggttccggcccccgacgtgctggcgcgggaaaatgttggagatctgcctgaagctggtgggctgcaaatccaagaaggggctgtcctcgtcctccagctgttatctggaagaagcccttcagcggccagtagcatctgactttgagcctcagggtctgagtgaagccgctcgttggaactccaaggaaaaccttctcgctggacccagtgaaaatgaccccaaccttttcgttgcactgtatgattttgtggccagtggagataacactctaagcataactaaaggtgaaaagctccgggtcttaggctataatcacaatggggaatggtgtgaagcccaaaccaaaaatggccaaggctgggtcccaagcaactacatcacgccagtcaacagtctggagaaacactcctggtaccatgggcctgtgtcccgcaatgccgctgagtatctgctgagcagcgggatcaatggcagcttcttggtgcgtgagagtgagagcagtcctggccagaggtccatctcgctgagatacgaagggagggtgtaccattacaggatcaacactgcttctgatggcaagctctacgtctcctccgagagccgcttcaacaccctggccgagttggttcatcatcattcaacggtggccgacgggctcatcaccacgctccattatccagccccaaagcgcaacaagcccactgtctatggtgtgtcccccaactacgacaagtgggagatggaacgcacggacatcaccatgaagcacaagctgggcgggggccagtacggggaggtgtacgagggcgtgtggaagaaatacagcctgacggtggccgtgaagaccttgaaggaggacaccatggaggtggaagagttcttgaaagaagctgcagtcatgaaagagatcaaacaccctaacctggtgcagctccttggggtctgcacccgggagcccccgttctatatcatcactgagttcatgacctacgggaacctcctggactacctgagggagtgcaaccggcaggaggtgaacgccgtggtgctgctgtacatggccactcagatctcgtcagccatggagtacctggagaagaaaaacttcatccacagagatcttgctgcccgaaactgcctggtaggggagaaccacttggtgaaggtagctgattttggcctgagcaggttgatgacaggggacacctacacagcccatgctggagccaagttccccatcaaatggactgcacccgagagcctggcctacaacaagttctccatcaagtccgacgtctgggcatttggagtattgctttgggaaattgctacctatggcatgtccccttacccgggaattgacctgtcccaggtgtatgagctgctagagaaggactaccgcatggagcgcccagaaggctgcccagagaaggtctatgaactcatgcgagcatgttggcagtggaatccctctgaccggccctcctttgctgaaatccaccaagcctttgaaacaatgttccaggaatccagtatctcagacgaagtggaaaaggagctggggaaacaaggcgtccgtggggctgtgagtaccttgctgcaggccccagagctgcccaccaagacgaggacctccaggagagctgcagagcacagagacaccactgacgtgcctgagatgcctcactccaagggccagggagagagcgatcctctggaccatgagcctgccgtgtctccattgctccctcgaaaagagcgaggtcccccggagggcggcctgaatgaagatgagcgccttctccccaaagacaaaaagaccaacttgttcagcgccttgatcaagaagaagaagaagacagccccaacccctcccaaacgcagcagctccttccgggagatggacggccagccggagcgcagaggggccggcgaggaagagggccgagacatcagcaacggggcactggctttcacccccttggacacagctgacccagccaagtccccaaagcccagcaatggggctggggtccccaatggagccctccgggagtccgggggctcaggcttccggtctccccacctgtggaagaagtccagcacgctgaccagcagccgcctagccaccggcgaggaggagggcggtggcagctccagcaagcgcttcctgcgctcttgctccgcctcctgcgttccccatggggccaaggacacggagtggaggtcagtcacgctgcctcgggacttgcagtccacgggaagacagtttgactcgtccacatttggagggcacaaaagtgagaagccggctctgcctcggaagagggcaggggagaacaggtctgaccaggtgacccgaggcacagtaacgcctccccccaggctggtgaaaaagaatgaggaagctgctgatgaggtcttcaaagacatcatggagtccagcccgggctccagcccgcccaacctgactccaaaacccctccggcggcaggtcaccgtggcccctgcctcgggcctcccccacaaggaagaagctggaaagggcagtgccttagggacccctgctgcagctgagccagtgacccccaccagcaaagcaggctcaggtgcaccagggggcaccagcaagggccccgccgaggagtccagagtgaggaggcacaagcactcctctgagtcgccagggagggacaaggggaaattgtccaggctcaaacctgccccgccgcccccaccagcagcctctgcagggaaggctggaggaaagccctcgcagagcccgagccaggaggcggccggggaggcagtcctgggcgcaaagacaaaagccacgagtctggttgatgctgtgaacagtgacgctgccaagcccagccagccgggagagggcctcaaaaagcccgtgctcccggccactccaaagccacagtccgccaagccgtcggggacccccatcagcccagcccccgttccctccacgttgccatcagcatcctcggccctggcaggggaccagccgtcttccaccgccttcatccctctcatatcaacccgagtgtctcttcggaaaacccgccagcctccagagcggatcgccagcggcgccatcaccaagggcgtggtcctggacagcaccgaggcgctgtgcctcgccatctctaggaactccgagcagatggccagccacagcgcagtgctggaggccggcaaaaacctctacacgttctgcgtgagctatgtggattccatccagcaaatgaggaacaagtttgccttccgagaggccatcaacaaactggagaataatctccgggagcttcagatctgcccggcgacagcaggcagtggtccagcggccactcaggacttcagcaagctcctcagttcggtgaaggaaatcagtgacatagtgcagaggtagcagcagtcaggggtcaggtgtcaggcccgtcggagctgcctgcagcacatgcgggctcgcccatacccgtgacagtggctgacaagggactagtgagtcagcaccttggcccaggagctctgcgccaggcagagctgagggccctgtggagtccagctctactacctacgtttgcaccgcctgccctcccgcaccttcctcctccccgctccgtctctgtcctcgaattttatctgtggagttcctgctccgtggactgcagtcggcatgccaggacccgccagccccgctcccacctagtgccccagactgagctctccaggccaggtgggaacggctgatgtggactgtctttttcatttttttctctctggagcccctcctcccccggctgggcctccttcttccacttctccaagaatggaagcctgaactgaggccttgtgtgtcaggccctctgcctgcactccctggccttgcccgtcgtgtgctgaagacatgtttcaagaaccgcatttcgggaagggcatgcacgggcatgcacacggctggtcactctgccctctgctgctgcccggggtggggtgcactcgccatttcctcacgtgcaggacagctcttgatttgggtggaaaacagggtgctaaagccaaccagcctttgggtcctgggcaggtgggagctgaaaaggatcgaggcatggggcatgtcctttccatctgtccacatccccagagcccagctcttgctctcttgtgacgtgcactgtgaatcctggcaagaaagcttgagtctcaagggtggcaggtcactgtcactgccgacatccctcccccagcagaatggaggcaggggacaagggaggcagtggctagtggggtgaacagctggtgccaaatagccccagactgggcccaggcaggtctgcaagggcccagagtgaaccgtcctttcacacatctgggtgccctgaaagggcccttcccctcccccactcctctaagacaaagtagattcttacaaggccctttcctttggaacaagacagccttcacttttctgagttcttgaagcatttcaaagccctgcctctgtgtagccgccctgagagagaatagagctgccactgggcacctgcgcacaggtgggaggaaagggcctggccagtcctggtcctggctgcactcttgaactgggcgaatgtcttatttaattaccgtgagtgacatagcctcatgttctgtgggggtcatcagggagggttaggaaaaccacaaacggagcccctgaaagcctcacgtatttcacagagcacgcctgccatcttctccccgaggctgccccaggccggagcccagatacgggggctgtgactctgggcagggacccggggtctcctggaccttgacagagcagctaactccgagagcagtgggcaggtggccgcccctgaggcttcacgccgggagaagccaccttcccaccccttcataccgcctcgtgccagcagcctcgcacaggccctagctttacgctcatcacctaaacttgtactttatttttctgatagaaatggtttcctctggatcgttttatgcggttcttacagcacatcacctctttgcccccgacggctgtgacgcagccggagggaggcactagtcaccgacagcggccttgaagacagagcaaagcgcccacccaggtcccccgactgcctgtctccatgaggtactggtcccttccttttgttaacgtgatgtgccactatattttacacgtatctcttggtatgcatcttttatagacgctcttttctaagtggcgtgtgcatagcgtcctgccctgccccctcgggggcctgtggtggctccccctctgcttctcggggtccagtgcattttgtttctgtatatgattctctgtggttttttttgaatccaaatctgtcctctgtagtattttttaaataaatcagtgtttacattagaa

SEQ ID NO: 654 - DNA, 3824 bp, Homo sapiens
  source 1..3824: mol_type = genomic DNA
tgtgagaattgaaatgactagcattattgacccttttcagcatcccctgtgaatatttctgtttaggtttttcttcttgaaaagaaattgttattcagcccgtttaaaacaaatcaagaaacttttgggtaacattgcaattacatgaaattgataaccgcgaaaataattggaactcctgcttgcaagtgtcaacctaaaaaaagtgcttccttttgttatggaagatgtctttctgtgattgacttcaattgctgacttgtggagatgcagcgaatgtgaaatcccacgtatatgccatttccctctacgctcgctgaccgttctggaagatcttgaaccctcttctggaaaggggtacctattattactttatggggcagcagcctggaaaagtacttggggaccaaagaaggccaagcttgcctgccctgcattttatcaaaggagcagggaagaaggaatcatcgaggcatgggggtccacactgcaatgtttttgtggaacatgaagcccttcagcggccagtagcatctgactttgagcctcagggtctgagtgaagccgctcgttggaactccaaggaaaaccttctcgctggacccagtgaaaatgaccccaaccttttcgttgcactgtatgattttgtggccagtggagataacactctaagcataactaaaggtgaaaagctccgggtcttaggctataatcacaatggggaatggtgtgaagcccaaaccaaaaatggccaaggctgggtcccaagcaactacatcacgccagtcaacagtctggagaaacactcctggtaccatgggcctgtgtcccgcaatgccgctgagtatctgctgagcagcgggatcaatggcagcttcttggtgcgtgagagtgagagcagtcctggccagaggtccatctcgctgagatacgaagggagggtgtaccattacaggatcaacactgcttctgatggcaagctctacgtctcctccgagagccgcttcaacaccctggccgagttggttcatcatcattcaacggtggccgacgggctcatcaccacgctccattatccagccccaaagcgcaacaagcccactgtctatggtgtgtcccccaactacgacaagtgggagatggaacgcacggacatcaccatgaagcacaagctgggcgggggccagtacggggaggtgtacgagggcgtgtggaagaaatacagcctgacggtggccgtgaagaccttgaaggaggacaccatggaggtggaagagttcttgaaagaagctgcagtcatgaaagagatcaaacaccctaacctggtgcagctccttggggtctgcacccgggagcccccgttctatatcatcactgagttcatgacctacgggaacctcctggactacctgagggagtgcaaccggcaggaggtgaacgccgtggtgctgctgtacatggccactcagatctcgtcagccatggagtacctggagaagaaaaacttcatccacagagatcttgctgcccgaaactgcctggtaggggagaaccacttggtgaaggtagctgattttggcctgagcaggttgatgacaggggacacctacacagcccatgctggagccaagttccccatcaaatggactgcacccgagagcctggcctacaacaagttctccatcaagtccgacgtctgggcatttggagtattgctttgggaaattgctacctatggcatgtccccttacccgggaattgacctgtcccaggtgtatgagctgctagagaaggactaccgcatggagcgcccagaaggctgcccagagaaggtctatgaactcatgcgagcatgttggcagtggaatccctctgaccggccctcctttgctgaaatccaccaagcctttgaaacaatgttccaggaatccagtatctcagacgaagtggaaaaggagctggggaaacaaggcgtccgtggggctgtgagtaccttgctgcaggccccagagctgcccaccaagacgaggacctccaggagagctgcagagcacagagacaccactgacgtgcctgagatgcctcactccaagggccagggagagagcgatcctctggaccatgagcctgccgtgtctccattgctccctcgaaaagagcgaggtcccccggagggcggcctgaatgaagatgagcgccttctccccaaagacaaaaagaccaacttgttcagcgccttgatcaagaagaagaagaagacagccccaacccctcccaaacgcagcagctccttccgggagatggacggccagccggagcgcagaggggccggcgaggaagagggccgagacatcagcaacggggcactggctttcacccccttggacacagctgacccagccaagtccccaaagcccagcaatggggctggggtccccaatggagccctccgggagtccgggggctcaggcttccggtctccccacctgtggaagaagtccagcacgctgaccagcagccgcctagccaccggcgaggaggagggcggtggcagctccagcaagcgcttcctgcgctcttgctccgcctcctgcgttccccatggggccaaggacacggagtggaggtcagtcacgctgcctcgggacttgcagtccacgggaagacagtttgactcgtccacatttggagggcacaaaagtgagaagccggctctgcctcggaagagggcaggggagaacaggtctgaccaggtgacccgaggcacagtaacgcctccccccaggctggtgaaaaagaatgaggaagctgctgatgaggtcttcaaagacatcatggagtccagcccgggctccagcccgcccaacctgactccaaaacccctccggcggcaggtcaccgtggcccctgcctcgggcctcccccacaaggaagaagctggaaagggcagtgccttagggacccctgctgcagctgagccagtgacccccaccagcaaagcaggctcaggtgcaccagggggcaccagcaagggccccgccgaggagtccagagtgaggaggcacaagcactcctctgagtcgccagggagggacaaggggaaattgtccaggctcaaacctgccccgccgcccccaccagcagcctctgcagggaaggctggaggaaagccctcgcagagcccgagccaggaggcggccggggaggcagtcctgggcgcaaagacaaaagccacgagtctggttgatgctgtgaacagtgacgctgccaagcccagccagccgggagagggcctcaaaaagcccgtgctcccggccactccaaagccacagtccgccaagccgtcggggacccccatcagcccagcccccgttccctccacgttgccatcagcatcctcggccctggcaggggaccagccgtcttccaccgccttcatccctctcatatcaacccgagtgtctcttcggaaaacccgccagcctccagagcggatcgccagcggcgccatcaccaagggcgtggtcctggacagcaccgaggcgctgtgcctcgccatctctaggaactccgagcagatggccagccacagcgcagtgctggaggccggcaaaaacctctacacgttctgcgtgagctatgtggattccatccagcaaatgaggaacaagtttgccttccgagaggccatcaacaaactggagaataatctccgggagcttcagatctgcccggcgacagcaggcagtggtccagcggccactcaggacttcagcaagctcctcagttcggtgaaggaaatcagtgacatagtgcagaggtag

SEQ ID NO: 655 - DNA, 532 bp, Homo sapiens
  source 1..532: mol_type = genomic DNA
tttcagcatcccctgtgaatatttctgtttaggtttttcttcttgaaaagaaattgttattcagcccgtttaaaacaaatcaagaaacttttgggtaacattgcaattacatgaaattgataaccgcgaaaataattggaactcctgcttgcaagtgtcaacctaaaaaaagtgcttccttttgttatggaagatgtctttctgtgattgacttcaattgctgacttgtggagatgcagcgaatgtgaaatcccacgtatatgccatttccctctacgctcgctgaccgttctggaagatcttgaaccctcttctggaaaggggtacctattattactttatggggcagcagcctggaaaagtacttggggaccaaagaaggccaagcttgcctgccctgcattttatcaaaggagcagggaagaaggaatcatcgaggcatgggggtccacactgcaatgtttttgtggaacaagcccttcagcggccagtagcatctgactttgagcctcagggtctgagtgaagccgct

SEQ ID NO: 656 - DNA, 3559 bp, Homo sapiens
  source 1..3559: mol_type = genomic DNA
ggcagacctgggcgttctcgggcgcggggcggcggtgagggcggctggcggggcggggggcgcgcgggccgagccgggcctgagccgggcccgcgagctgggagaggggttccggcccccgactgctggcgcgggaaaatgttggagatctgcctgaagctggtgggctgcaaatccaagaaggggctgtcctcgtcctccagctgttatctggaagaagcccttcagcggccagtagcatctgactttgagcctcagggtctgagtgaagccgctcgttggaactccaaggaaaaccttctcgctggacccagtgaaaatgaccccaaccttttcgttgcactgtatgattttgtggccagtggagataacactctaagcataactaaaggtgaaaagctccgggtcttaggctataatcacaatggggaatggtgtgaagcccaaaccaaaaatggccaaggctgggtcccaagcaactacatcacgccagtcaacagtctggagaaacactcctggtaccatgggcctgtgtcccgcaatgccgctgagtatctgctgagcagcgggatcaatggcagcttcttggtgcgtgagagtgagagcagtcctggccagaggtccatctcgctgagatacgaagggagggtgtaccattacaggatcaacactgcttctgatggcaagctctacgtctcctccgagagccgcttcaacaccctggccgagttggttcatcatcattcaacggtggccgacgggctcatcaccacgctccattatccagccccaaagcgcaacaagcccactgtctatggtgtgtcccccaactacgacaagtgggagatggaacgcacggacatcaccatgaagcacaagctgggcgggggccagtacggggaggtgtacgagggcgtgtggaagaaatacagcctgacggtggccgtgaagaccttgaaggaggacaccatggaggtggaagagttcttgaaagaagctgcagtcatgaaagagatcaaacaccctaacctggtgcagctccttggggtctgcacccgggagcccccgttctatatcatcactgagttcatgacctacgggaacctcctggactacctgagggagtgcaaccggcaggaggtgaacgccgtggtgctgctgtacatggccactcagatctcgtcagccatggagtacctggagaagaaaaacttcatccacagagatcttgctgcccgaaactgcctggtaggggagaaccacttggtgaaggtagctgattttggcctgagcaggttgatgacaggggacacctacacagcccatgctggagccaagttccccatcaaatggactgcacccgagagcctggcctacaacaagttctccatcaagtccgacgtctgggcatttggagtattgctttgggaaattgctacctatggcatgtccccttacccgggaattgacctgtcccaggtgtatgagctgctagagaaggactaccgcatggagcgcccagaaggctgcccagagaaggtctatgaactcatgcgagcatgttggcagtggaatccctctgaccggccctcctttgctgaaatccaccaagcctttgaaacaatgttccaggaatccagtatctcagacgaagtggaaaaggagctggggaaacaaggcgtccgtggggctgtgagtaccttgctgcaggccccagagctgcccaccaagacgaggacctccaggagagctgcagagcacagagacaccactgacgtgcctgagatgcctcactccaagggccagggagagagcgatcctctggaccatgagcctgccgtgtctccattgctccctcgaaaagagcgaggtcccccggagggcggcctgaatgaagatgagcgccttctccccaaagacaaaaagaccaacttgttcagcgccttgatcaagaagaagaagaagacagccccaacccctcccaaacgcagcagctccttccgggagatggacggccagccggagcgcagaggggccggcgaggaagagggccgagacatcagcaacggggcactggctttcacccccttggacacagctgacccagccaagtccccaaagcccagcaatggggctggggtccccaatggagccctccgggagtccgggggctcaggcttccggtctccccacctgtggaagaagtccagcacgctgaccagcagccgcctagccaccggcgaggaggagggcggtggcagctccagcaagcgcttcctgcgctcttgctccgcctcctgcgttccccatggggccaaggacacggagtggaggtcagtcacgctgcctcgggacttgcagtccacgggaagacagtttgactcgtccacatttggagggcacaaaagtgagaagccggctctgcctcggaagagggcaggggagaacaggtctgaccaggtgacccgaggcacagtaacgcctccccccaggctggtgaaaaagaatgaggaagctgctgatgaggtcttcaaagacatcatggagtccagcccgggctccagcccgcccaacctgactccaaaacccctccggcggcaggtcaccgtggcccctgcctcgggcctcccccacaaggaagaagctggaaagggcagtgccttagggacccctgctgcagctgagccagtgacccccaccagcaaagcaggctcaggtgcaccagggggcaccagcaagggccccgccgaggagtccagagtgaggaggcacaagcactcctctgagtcgccagggagggacaaggggaaattgtccaggctcaaacctgccccgccgcccccaccagcagcctctgcagggaaggctggaggaaagccctcgcagagcccgagccaggaggcggccggggaggcagtcctgggcgcaaagacaaaagccacgagtctggttgatgctgtgaacagtgacgctgccaagcccagccagccgggagagggcctcaaaaagcccgtgctcccggccactccaaagccacagtccgccaagccgtcggggacccccatcagcccagcccccgttccctccacgttgccatcagcatcctcggccctggcaggggaccagccgtcttccaccgccttcatccctctcatatcaacccgagtgtctcttcggaaaacccgccagcctccagagcggatcgccagcggcgccatcaccaagggcgtggtcctggacagcaccgaggcgctgtgcctcgccatctctaggaactccgagcagatggccagccacagcgcagtgctggaggccggcaaaaacctctacacgttctgcgtgagctatgtggattccatccagcaaatgaggaacaagtttgccttccgagaggccatcaacaaactggagaataatctccgggagcttcagatctgcccggcgacagcaggcagtggtccagcggccactcaggacttcagcaagctcctcagttcggtgaaggaaatcagtgacatagtgcagaggtagcagcagtcaggggtcaggtgtcaggccc

SEQ ID NO: 657 - DNA, 5877 bp, Homo sapiens
  source 1..5877: mol_type = genomic DNA
ggttggtgacttccacaggaaaagttctggaggagtagccaaagaccatcagcgtttcctttatgtgtgagaattgaaatgactagcattattgacccttttcagcatcccctgtgaatatttctgtttaggtttttcttcttgaaaagaaattgttattcagcccgtttaaaacaaatcaagaaacttttgggtaacattgcaattacatgaaattgataaccgcgaaaataattggaactcctgcttgcaagtgtcaacctaaaaaaagtgcttccttttgttatggaagatgtctttctgtgattgacttcaattgctgacttgtggagatgcagcgaatgtgaaatcccacgtatatgccatttccctctacgctcgctgaccgttctggaagatcttgaaccctcttctggaaaggggtacctattattactttatggggcagcagcctggaaaagtacttggggaccaaagaaggccaagcttgcctgccctgcattttatcaaaggagcagggaagaaggaatcatcgaggcatgggggtccacactgcaatgtttttgtggaacatgaagcccttcagcggccagtagcatctgactttgagcctcagggtctgagtgaagccgctcgttggaactccaaggaaaaccttctcgctggacccagtgaaaatgaccccaaccttttcgttgcactgtatgattttgtggccagtggagataacactctaagcataactaaaggtgaaaagctccgggtcttaggctataatcacaatggggaatggtgtgaagcccaaaccaaaaatggccaaggctgggtcccaagcaactacatcacgccagtcaacagtctggagaaacactcctggtaccatgggcctgtgtcccgcaatgccgctgagtatctgctgagcagcgggatcaatggcagcttcttggtgcgtgagagtgagagcagtcctggccagaggtccatctcgctgagatacgaagggagggtgtaccattacaggatcaacactgcttctgatggcaagctctacgtctcctccgagagccgcttcaacaccctggccgagttggttcatcatcattcaacggtggccgacgggctcatcaccacgctccattatccagccccaaagcgcaacaagcccactgtctatggtgtgtcccccaactacgacaagtgggagatggaacgcacggacatcaccatgaagcacaaggcgggggccagtacggggaggtgtacgagggcgtgtggaagaaatacagcctgacggtggccgtgaagaccttgaaggaggacaccatggaggtggaagagttcttgaaagaagctgcagtcatgaaagagatcaaacaccctaacctggtgcagctccttggggtctgcacccgggagcccccgttctatatcatcactgagttcatgacctacgggaacctcctggactacctgagggagtgcaaccggcaggaggtgaacgccgtggtgctgctgtacatggccactcagatctcgtcagccatggagtacctggagaagaaaaacttcatccacagagatcttgctgcccgaaactgcctggtaggggagaaccacttggtgaaggtagctgattttggcctgagcaggttgatgacaggggacacctacacagcccatgctggagccaagttccccatcaaatggactgcacccgagagcctggcctacaacaagttctccatcaagtccgacgtctgggcatttggagtattgctttgggaaattgctacctatggcatgtccccttacccgggaattgacctgtcccaggtgtatgagctgctagagaaggactaccgcatggagcgcccagaaggctgcccagagaaggtctatgaactcatgcgagcatgttggcagtggaatccctctgaccggccctcctttgctgaaatccaccaagcctttgaaacaatgttccaggaatccagtatctcagacgaagtggaaaaggagctggggaaacaaggcgtccgtggggctgtgagtaccttgctgcaggccccagagctgcccaccaagacgaggacctccaggagagctgcagagcacagagacaccactgacgtgcctgagatgcctcactccaagggccagggagagagcgatcctctggaccatgagcctgccgtgtctccattgctccctcgaaaagagcgaggtcccccggagggcggcctgaatgaagatgagcgccttctccccaaagacaaaaagaccaacttgttcagcgccttgatcaagaagaagaagaagacagccccaacccctcccaaacgcagcagctccttccgggagatggacggccagccggagcgcagaggggccggcgaggaagagggccgagacatcagcaacggggcactggctttcacccccttggacacagctgacccagccaagtccccaaagcccagcaatggggctggggtccccaatggagccctccgggagtccgggggctcaggcttccggtctccccacctgtggaagaagtccagcacgctgaccagcagccgcctagccaccggcgaggaggagggcggtggcagctccagcaagcgcttcctgcgctcttgctccgcctcctgcgttccccatggggccaaggacacggagtggaggtcagtcacgctgcctcgggacttgcagtccacgggaagacagtttgactcgtccacatttggagggcacaaaagtgagaagccggctctgcctcggaagagggcaggggagaacaggtctgaccaggtgacccgaggcacagtaacgcctccccccaggctggtgaaaaagaatgaggaagctgctgatgaggtcttcaaagacatcatggagtccagcccgggctccagcccgcccaacctgactccaaaacccctccggcggcaggtcaccgtggcccctgcctcgggcctcccccacaaggaagaagctggaaagggcagtgccttagggacccctgctgcagctgagccagtgacccccaccagcaaagcaggctcaggtgcaccagggggcaccagcaagggccccgccgaggagtccagagtgaggaggcacaagcactcctctgagtcgccagggagggacaaggggaaattgtccaggctcaaacctgccccgccgcccccaccagcagcctctgcagggaaggctggaggaaagccctcgcagagcccgagccaggaggcggccggggaggcagtcctgggcgcaaagacaaaagccacgagtctggttgatgctgtgaacagtgacgctgccaagcccagccagccgggagagggcctcaaaaagcccgtgctcccggccactccaaagccacagtccgccaagccgtcggggacccccatcagcccagcccccgttccctccacgttgccatcagcatcctcggccctggcaggggaccagccgtcttccaccgccttcatccctctcatatcaacccgagtgtctcttcggaaaacccgccagcctccagagcggatcgccagcggcgccatcaccaagggcgtggtcctggacagcaccgaggcgctgtgcctcgccatctctaggaactccgagcagatggccagccacagcgcagtgctggaggccggcaaaaacctctacacgttctgcgtgagctatgtggattccatccagcaaatgaggaacaagtttgccttccgagaggccatcaacaaactggagaataatctccgggagcttcagatctgcccggcgacagcaggcagtggtccagcggccactcaggacttcagcaagctcctcagttcggtgaaggaaatcagtgacatagtgcagaggtagcagcagtcaggggtcaggtgtcaggcccgtcggagctgcctgcagcacatgcgggctcgcccatacccgtgacagtggctgacaagggactagtgagtcagcaccttggcccaggagctctgcgccaggcagagctgagggccctgtggagtccagctctactacctacgtttgcaccgcctgccctcccgcaccttcctcctccccgctccgtctctgtcctcgaattttatctgtggagttcctgctccgtggactgcagtcggcatgccaggacccgccagccccgctcccacctagtgccccagactgagctctccaggccaggtgggaacggctgatgtggactgtctttttcatttttttctctctggagcccctcctcccccggctgggcctccttcttccacttctccaagaatggaagcctgaactgaggccttgtgtgtcaggccctctgcctgcactccctggccttgcccgtcgtgtgctgaagacatgtttcaagaaccgcatttcgggaagggcatgcacgggcatgcacacggctggtcactctgccctctgctgctgcccggggtggggtgcactcgccatttcctcacgtgcaggacagctcttgatttgggtggaaaacagggtgctaaagccaaccagcctttgggtcctgggcaggtgggagctgaaaaggatcgaggcatggggcatgtcctttccatctgtccacatccccagagcccagctcttgctctcttgtgacgtgcactgtgaatcctggcaagaaagcttgagtctcaagggtggcaggtcactgtcactgccgacatccctcccccagcagaatggaggcaggggacaagggaggcagtggctagtggggtgaacagctggtgccaaatagccccagactgggcccaggcaggtctgcaagggcccagagtgaaccgtcctttcacacatctgggtgccctgaaagggcccttcccctcccccactcctctaagacaaagtagattcttacaaggccctttcctttggaacaagacagccttcacttttctgagttcttgaagcatttcaaagccctgcctctgtgtagccgccctgagagagaatagagctgccactgggcacctgcgcacaggtgggaggaaagggcctggccagtcctggtcctggctgcactcttgaactgggcgaatgtcttatttaattaccgtgagtgacatagcctcatgttctgtgggggtcatcagggagggttaggaaaaccacaaacggagcccctgaaagcctcacgtatttcacagagcacgcctgccatcttctccccgaggctgccccaggccggagcccagatacgggggctgtgactctgggcagggacccggggtctcctggaccttgacagagcagctaactccgagagcagtgggcaggtggccgcccctgaggcttcacgccgggagaagccaccttcccaccccttcataccgcctcgtgccagcagcctcgcacaggccctagctttacgctcatcacctaaacttgtactttatttttctgatagaaatggtttcctctggatcgttttatgcggttcttacagcacatcacctctttgcccccgacggctgtgacgcagccggagggaggcactagtcaccgacagcggccttgaagacagagcaaagcgcccacccaggtcccccgactgcctgtctccatgaggtactggtcccttccttttgttaacgtgatgtgccactatattttacacgtatctcttggtatgcatcttttatagacgctcttttctaagtggcgtgtgcatagcgtcctgccctgccccctcgggggcctgtggtggctccccctctgcttctcggggtccagtgcattttgtttctgtatatgattctctgtggttttttttgaatccaaatctgtcctctgtagtattttttaaataaatcagtgtttacattagaa

SEQ ID NO: 658 - DNA, 4875 bp, Homo sapiens
  source 1..4875: mol_type = genomic DNA
agccaatcagcggtacggggggcggtgcctccggggctcacctggctgcagccacgcaccccctctcagtggcgtcggaactgcaaagcacctgtgagcttgcggaagtcagttcagactccagcccgctccagcccggcccgacccgaccgcacccggcgcctgccctcgctcggcgtccccggccagccatgggcccttggagccgcagcctctcggcgctgctgctgctgctgcaggtctcctcttggctctgccaggagccggagccctgccaccctggctttgacgccgagagctacacgttcacggtgccccggcgccacctggagagaggccgcgtcctgggcagagtgaattttgaagattgcaccggtcgacaaaggacagcctatttttccctcgacacccgattcaaagtgggcacagatggtgtgattacagtcaaaaggcctctacggtttcataacccacagatccatttcttggtctacgcctgggactccacctacagaaagttttccaccaaagtcacgctgaatacagtggggcaccaccaccgccccccgccccatcaggcctccgtttctggaatccaagcagaattgctcacatttcccaactcctctcctggcctcagaagacagaagagagactgggttattcctcccatcagctgcccagaaaatgaaaaaggcccatttcctaaaaacctggttcagatcaaatccaacaaagacaaagaaggcaaggttttctacagcatcactggccaaggagctgacacaccccctgttggtgtctttattattgaaagagaaacaggatggctgaaggtgacagagcctctggatagagaacgcattgccacatacactctcttctctcacgctgtgtcatccaacgggaatgcagttgaggatccaatggagattttgatcacggtaaccgatcagaatgacaacaagcccgaattcacccaggaggtctttaaggggtctgtcatggaaggtgctcttccaggaacctctgtgatggaggtcacagccacagacgcggacgatgatgtgaacacctacaatgccgccatcgcttacaccatcctcagccaagatcctgagctccctgacaaaaatatgttcaccattaacaggaacacaggagtcatcagtgtggtcaccactgggctggaccgagagagtttccctacgtataccctggtggttcaagctgctgaccttcaaggtgaggggttaagcacaacagcaacagctgtgatcacagtcactgacaccaacgataatcctccgatcttcaatcccaccacgtacaagggtcaggtgcctgagaacgaggctaacgtcgtaatcaccacactgaaagtgactgatgctgatgcccccaataccccagcgtgggaggctgtatacaccatattgaatgatgatggtggacaatttgtcgtcaccacaaatccagtgaacaacgatggcattttgaaaacagcaaagggcttggattttgaggccaagcagcagtacattctacacgtagcagtgacgaatgtggtaccttttgaggtctctctcaccacctccacagccaccgtcaccgtggatgtgctggatgtgaatgaagcccccatctttgtgcctcctgaaaagagagtggaagtgtccgaggactttggcgtgggccaggaaatcacatcctacactgcccaggagccagacacatttatggaacagaaaataacatatcggatttggagagacactgccaactggctggagattaatccggacactggtgccatttccactcgggctgagctggacagggaggattttgagcacgtgaagaacagcacgtacacagccctaatcatagctacagacaatggttctccagttgctactggaacagggacacttctgctgatcctgtctgatgtgaatgacaacgcccccataccagaacctcgaactatattcttctgtgagaggaatccaaagcctcaggtcataaacatcattgatgcagaccttcctcccaatacatctcccttcacagcagaactaacacacggggcgagtgccaactggaccattcagtacaacgacccaacccaagaatctatcattttgaagccaaagatggccttagaggtgggtgactacaaaatcaatctcaagctcatggataaccagaataaagaccaagtgaccaccttagaggtcagcgtgtgtgactgtgaaggggccgctggcgtctgtaggaaggcacagcctgtcgaagcaggattgcaaattcctgccattctggggattcttggaggaattcttgctttgctaattctgattctgctgctcttgctgtttcttcggaggagagcggtggtcaaagagcccttactgcccccagaggatgacacccgggacaacgtttattactatgatgaagaaggaggcggagaagaggaccaggactttgacttgagccagctgcacaggggcctggacgctcggcctgaagtgactcgtaacgacgttgcaccaaccctcatgagtgtcccccggtatcttccccgccctgccaatcccgatgaaattggaaattttattgatgaaaatctgaaagcggctgatactgaccccacagccccgccttatgattctctgctcgtgtttgactatgaaggaagcggttccgaagctgctagtctgagctccctgaactcctcagagtcagacaaagaccaggactatgactacttgaacgaatggggcaatcgcttcaagaagctggctgacatgtacggaggcggcgaggacgactaggggactcgagagaggcgggccccagacccatgtgctgggaaatgcagaaatcacgttgctggtggtttttcagctcccttcccttgagatgagtttctggggaaaaaaaagagactggttagtgatgcagttagtatagctttatactctctccactttatagctctaataagtttgtgttagaaaagtttcgacttatttcttaaagcttttttttttttcccatcactctttacatggtggtgatgtccaaaagatacccaaattttaatattccagaagaacaactttagcatcagaaggttcacccagcaccttgcagattttcttaaggaattttgtctcacttttaaaaagaaggggagaagtcagctactctagttctgttgttttgtgtatataattttttaaaaaaaatttgtgtgcttctgctcattactacactggtgtgtccctctgccttttttttttttttaagacagggtctcattctatcggccaggctggagtgcagtggtgcaatcacagctcactgcagccttgtcctcccaggctcaagctatccttgcacctcagcctcccaagtagctgggaccacaggcatgcaccactacgcatgactaattttttaaatatttgagacggggtctccctgtgttacccaggctggtctcaaactcctgggctcaagtgatcctcccatcttggcctcccagagtattgggattacagacatgagccactgcacctgcccagctccccaactccctgccattttttaagagacagtttcgctccatcgcccaggcctgggatgcagtgatgtgatcatagctcactgtaacctcaaactctggggctcaagcagttctcccaccagcctcctttttatttttttgtacagatggggtcttgctatgttgcccaagctggtcttaaactcctggcctcaagcaatccttctgccttggccccccaaagtgctgggattgtgggcatgagctgctgtgcccagcctccatgttttaatatcaactctcactcctgaattcagttgctttgcccaagataggagttctctgatgcagaaattattgggctcttttagggtaagaagtttgtgtctttgtctggccacatcttgactaggtattgtctactctgaagacctttaatggcttccctctttcatctcctgagtatgtaacttgcaatgggcagctatccagtgacttgttctgagtaagtgtgttcattaatgtttatttagctctgaagcaagagtgatatactccaggacttagaatagtgcctaaagtgctgcagccaaagacagagcggaactatgaaaagtgggcttggagatggcaggagagcttgtcattgagcctggcaatttagcaaactgatgctgaggatgattgaggtgggtctacctcatctctgaaaattctggaaggaatggaggagtctcaacatgtgtttctgacacaagatccgtggtttgtactcaaagcccagaatccccaagtgcctgcttttgatgatgtctacagaaaatgctggctgagctgaacacatttgcccaattccaggtgtgcacagaaaaccgagaatattcaaaattccaaatttttttcttaggagcaagaagaaaatgtggccctaaagggggttagttgaggggtagggggtagtgaggatcttgatttggatctctttttatttaaatgtgaatttcaacttttgacaatcaaagaaaagacttttgttgaaatagctttactgtttctcaagtgttttggagaaaaaaatcaaccctgcaatcactttttggaattgtcttgatttttcggcagttcaagctatatcgaatatagttctgtgtagagaatgtcactgtagttttgagtgtatacatgtgtgggtgctgataattgtgtattttctttgggggtggaaaaggaaaacaattcaagctgagaaaagtattctcaaagatgcatttttataaattttattaaacaattttgtt

SEQ ID NO: 659 - DNA, 3304 bp, Homo sapiens
  source 1..3304: mol_type = genomic DNA
aaagcacctgtgagcttgcggaagtcagttcagactccagcccgctccagcccggcccgacccgaccgcacccggcgcctgccctcgctcggcgtccccggccagccatgggcccttggagccgcagcctctcggcgctgctgctgctgctgcaggtctcctcttggctctgccaggagccggagccctgccaccctggctttgacgccgagagctacacgttcacggtgccccggcgccacctggagagaggccgcgtcctgggcagagtgaattttgaagattgcaccggtcgacaaaggacagcctatttttccctcgacacccgattcaaagtgggcacagatggtgtgattacagtcaaaaggcctctacggtttcataacccacagatccatttcttggtctacgcctgggactccacctacagaaagttttccaccaaagtcacgctgaatacagtggggcaccaccaccgccccccgccccatcaggcctccgtttctggaatccaagcagaattgctcacatttcccaactcctctcctggcctcagaagacagaagagagactgggttattcctcccatcagctgcccagaaaatgaaaaaggcccatttcctaaaaacctggttcagatcaaatccaacaaagacaaagaaggcaaggttttctacagcatcactggccaaggagctgacacaccccctgttggtgtctttattattgaaagagaaacaggatggctgaaggtgacagagcctctggatagagaacgcattgccacatacactctcttctctcacgctgtgtcatccaacgggaatgcagttgaggatccaatggagattttgatcacggtaaccgatcagaatgacaacaagcccgaattcacccaggaggtctttaaggggtctgtcatggaaggtgctcttccaggaacctctgtgatggaggtcacagccacagacgcggacgatgatgtgaacacctacaatgccgccatcgcttacaccatcctcagccaagatcctgagctccctgacaaaaatatgttcaccattaacaggaacacaggagtcatcagtgtggtcaccactgggctggaccgagagagtttccctacgtataccctggtggttcaagctgctgaccttcaaggtgaggggttaagcacaacagcaacagctgtgatcacagtcactgacaccaacgataatcctccgatcttcaatcccaccacgtacaagggtcaggtgcctgagaacgaggctaacgtcgtaatcaccacactgaaagtgactgatgctgatgcccccaataccccagcgtgggaggctgtatacaccatattgaatgatgatggtggacaatttgtcgtcaccacaaatccagtgaacaacgatggcattttgaaaacagcaaagggcttggattttgaggccaagcagcagtacattctacacgtagcagtgacgaatgtggtaccttttgaggtctctctcaccacctccacagccaccgtcaccgtggatgtgctggatgtgaatgaagcccccatctttgtgcctcctgaaaagagagtggaagtgtccgaggactttggcgtgggccaggaaatcacatcctacactgcccaggagccagacacatttatggaacagaaaataacatatcggatttggagagacactgccaactggctggagattaatccggacactggtgccatttccactcgggctgagctggacagggaggattttgagcacgtgaagaacagcacgtacacagccctaatcatagctacagacaatggttctccagttgctactggaacagggacacttctgctgatcctgtctgatgtgaatgacaacgcccccataccagaacctcgaactatattcttctgtgagaggaatccaaagcctcaggtcataaacatcattgatgcagaccttcctcccaacttggcctcccagagtattgggattacagacatgagccactgcacctgcccagctccccaactccctgccattttttaagagacagtttcgctccatcgcccaggcctgggatgcagtgatgtgatcatagctcactgtaacctcaaactctggggctcaagcagttctcccaccagcctcctttttatttttttgtacagatggggtcttgctatgttgcccaagctggtcttaaactcctggcctcaagcaatccttctgccttggccccccaaagtgctgggattgtgggcatgagctgctgtgcccagcctccatgttttaatatcaactctcactcctgaattcagttgctttgcccaagataggagttctctgatgcagaaattattgggctcttttagggtaagaagtttgtgtctttgtctggccacatcttgactaggtattgtctactctgaagacctttaatggcttccctctttcatctcctgagtatgtaacttgcaatgggcagctatccagtgacttgttctgagtaagtgtgttcattaatgtttatttagctctgaagcaagagtgatatactccaggacttagaatagtgcctaaagtgctgcagccaaagacagagcggaactatgaaaagtgggcttggagatggcaggagagcttgtcattgagcctggcaatttagcaaactgatgctgaggatgattgaggtgggtctacctcatctctgaaaattctggaaggaatggaggagtctcaacatgtgtttctgacacaagatccgtggtttgtactcaaagcccagaatccccaagtgcctgcttttgatgatgtctacagaaaatgctggctgagctgaacacatttgcccaattccaggtgtgcacagaaaaccgagaatattcaaaattccaaatttttttcttaggagcaagaagaaaatgtggccctaaagggggttagttgaggggtagggggtagtgaggatcttgatttggatctctttttatttaaatgtgaatttcaacttttgacaatcaaagaaaagacttttgttgaaatagctttactgtttctcaagtgttttggagaaaaaaatcaaccctgcaatcactttttggaattgtcttgatttttcggcagttcaagctatatcgaatatagttctgtgtagagaatgtcactgtagttttgagtgtatacatgtgtgggtgctgataattgtgtattttctttgggggtggaaaaggaaaacaattcaagctgagaaaagtattctcaaagatgcatttttataaattttattaaacaattttgtt

SEQ ID NO: 660 - DNA, 4869 bp, Homo sapiens
  source 1..4869: mol_type = genomic DNA
agtggcgtcggaactgcaaagcacctgtgagcttgcggaagtcagttcagactccagcccgctccagcccggcccgacccgaccgcacccggcgcctgccctcgctcggcgtccccggccagccatgggcccttggagccgcagcctctcggcgctgctgctgctgctgcaggtctcctcttggctctgccaggagccggagccctgccaccctggctttgacgccgagagctacacgttcacggtgccccggcgccacctggagagaggccgcgtcctgggcagagtgaattttgaagattgcaccggtcgacaaaggacagcctatttttccctcgacacccgattcaaagtgggcacagatggtgtgattacagtcaaaaggcctctacggtttcataacccacagatccatttcttggtctacgcctgggactccacctacagaaagttttccaccaaagtcacgctgaatacagtggggcaccaccaccgccccccgccccatcaggcctccgtttctggaatccaagcagaattgctcacatttcccaactcctctcctggcctcagaagacagaagagagactgggttattcctcccatcagctgcccagaaaatgaaaaaggcccatttcctaaaaacctggttcagatcaaatccaacaaagacaaagaaggcaaggttttctacagcatcactggccaaggagctgacacaccccctgttggtgtctttattattgaaagagaaacaggatggctgaaggtgacagagcctctggatagagaacgcattgccacatacactctcttctctcacgctgtgtcatccaacgggaatgcagttgaggatccaatggagattttgatcacggtaaccgatcagaatgacaacaagcccgaattcacccaggaggtctttaaggggtctgtcatggaaggtgctcttccaggaacctctgtgatggaggtcacagccacagacgcggacgatgatgtgaacacctacaatgccgccatcgcttacaccatcctcagccaagatcctgagctccctgacaaaaatatgttcaccattaacaggaacacaggagtcatcagtgtggtcaccactgggctggaccgagagagtttccctacgtataccctggtggttcaagctgctgaccttcaaggtgaggggttaagcacaacagcaacagctgtgatcacagtcactgacaccaacgataatcctccgatcttcaatcccaccacgtacaagggtcaggtgcctgagaacgaggctaacgtcgtaatcaccacactgaaagtgactgatgctgatgcccccaataccccagcgtgggaggctgtatacaccatattgaatgatgatggtggacaatttgtcgtcaccacaaatccagtgaacaacgatggcattttgaaaacagcaaagctggcaagatgcagaaactggcatcctcacagctgttcatacccttgtcccctgggcttggattttgaggccaagcagcagtacattctacacgtagcagtgacgaatgtggtaccttttgaggtctctctcaccacctccacagccaccgtcaccgtggatgtgctggatgtgaatgaagcccccatctttgtgcctcctgaaaagagagtggaagtgtccgaggactttggcgtgggccaggaaatcacatcctacactgcccaggagccagacacatttatggaacagaaaataacatatcggatttggagagacactgccaactggctggagattaatccggacactggtgccatttccactcgggctgagctggacagggaggattttgagcacgtgaagaacagcacgtacacagccctaatcatagctacagacaatggttctccagttgctactggaacagggacacttctgctgatcctgtctgatgtgaatgacaacgcccccataccagaacctcgaactatattcttctgtgagaggaatccaaagcctcaggtcataaacatcattgatgcagaccttcctcccaatacatctcccttcacagcagaactaacacacggggcgagtgccaactggaccattcagtacaacgacccaacccaagaatctatcattttgaagccaaagatggccttagaggtgggtgactacaaaatcaatctcaagctcatggataaccagaataaagaccaagtgaccaccttagaggtcagcgtgtgtgactgtgaaggggccgctggcgtctgtaggaaggcacagcctgtcgaagcaggattgcaaattcctgccattctggggattcttggaggaattcttgctttgctaattctgattctgctgctcttgctgtttcttcggaggagagcggtggtcaaagagcccttactgcccccagaggatgacacccgggacaacgtttattactatgatgaagaaggaggcggagaagaggaccaggactttgacttgagccagctgcacaggggcctggacgctcggcctgaagtgactcgtaacgacgttgcaccaaccctcatgagtgtcccccggtatcttccccgccctgccaatcccgatgaaattggaaattttattgatgaaaatctgaaagcggctgatactgaccccacagccccgccttatgattctctgctcgtgtttgactatgaaggaagcggttccgaagctgctagtctgagctccctgaactcctcagagtcagacaaagaccaggactatgactacttgaacgaatggggcaatcgcttcaagaagctggctgacatgtacggaggcggcgaggacgactaggggactcgagagaggcgggccccagacccatgtgctgggaaatgcagaaatcacgttgctggtggtttttcagctcccttcccttgagatgagtttctggggaaaaaaaagagactggttagtgatgcagttagtatagctttatactctctccactttatagctctaataagtttgtgttagaaaagtttcgacttatttcttaaagcttttttttttttcccatcactctttacatggtggtgatgtccaaaagatacccaaattttaatattccagaagaacaactttagcatcagaaggttcacccagcaccttgcagattttcttaaggaattttgtctcacttttaaaaagaaggggagaagtcagctactctagttctgttgttttgtgtatataattttttaaaaaaaatttgtgtgcttctgctcattactacactggtgtgtccctctgccttttttttttttttaagacagggtctcattctatcggccaggctggagtgcagtggtgcaatcacagctcactgcagccttgtcctcccaggctcaagctatccttgcacctcagcctcccaagtagctgggaccacaggcatgcaccactacgcatgactaattttttaaatatttgagacggggtctccctgtgttacccaggctggtctcaaactcctgggctcaagtgatcctcccatcttggcctcccagagtattgggattacagacatgagccactgcacctgcccagctccccaactccctgccattttttaagagacagtttcgctccatcgcccaggcctgggatgcagtgatgtgatcatagctcactgtaacctcaaactctggggctcaagcagttctcccaccagcctcctttttatttttttgtacagatggggtcttgctatgttgcccaagctggtcttaaactcctggcctcaagcaatccttctgccttggccccccaaagtgctgggattgtgggcatgagctgctgtgcccagcctccatgttttaatatcaactctcactcctgaattcagttgctttgcccaagataggagttctctgatgcagaaattattgggctcttttagggtaagaagtttgtgtctttgtctggccacatcttgactaggtattgtctactctgaagacctttaatggcttccctctttcatctcctgagtatgtaacttgcaatgggcagctatccagtgacttgttctgagtaagtgtgttcattaatgtttatttagctctgaagcaagagtgatatactccaggacttagaatagtgcctaaagtgctgcagccaaagacagagcggaactatgaaaagtgggcttggagatggcaggagagcttgtcattgagcctggcaatttagcaaactgatgctgaggatgattgaggtgggtctacctcatctctgaaaattctggaaggaatggaggagtctcaacatgtgtttctgacacaagatccgtggtttgtactcaaagcccagaatccccaagtgcctgcttttgatgatgtctacagaaaatgctggctgagctgaacacatttgcccaattccaggtgtgcacagaaaaccgagaatattcaaaattccaaatttttttcttaggagcaagaagaaaatgtggccctaaagggggttagttgaggggtagggggtagtgaggatcttgatttggatctctttttatttaaatgtgaatttcaacttttgacaatcaaagaaaagacttttgttgaaatagctttactgtttctcaagtgttttggagaaaaaaatcaaccctgcaatcactttttggaattgtcttgatttttcggcagttcaagctatatcgaatatagttctgtgtagagaatgtcactgtagttttgagtgtatacatgtgtgggtgctgataattgtgtattttctttgggggtggaaaaggaaaacaattcaagctgagaaaagtattctcaaagatgcatttttataaattttattaaacaattttgttaaaccat

SEQ ID NO: 661 - DNA, 2567 bp, Homo sapiens
  source 1..2567: mol_type = genomic DNA
gctccagcccggcccgacccgaccgcacccggcgcctgccctcgctcggcgtccccggccagccatgggcccttggagccgcagcctctcggcgctgctgctgctgctgcaggtctcctcttggctctgccaggagccggagccctgccaccctggctttgacgccgagagctacacgttcacggtgccccggcgccacctggagagaggccgcgtcctgggcagagtgaattttgaagattgcaccggtcgacaaaggacagcctatttttccctcgacacccgattcaaagtgggcacagatggtgtgattacagtcaaaaggcctctacggtttcataacccacagatccatttcttggtctacgcctgggactccacctacagaaagttttccaccaaagtcacgctgaatacagtggggcaccaccaccgccccccgccccatcaggcctccgtttctggaatccaagcagaattgctcacatttcccaactcctctcctggcctcagaagacagaagagagactgggttattcctcccatcagctgcccagaaaatgaaaaaggcccatttcctaaaaacctggttcagatcaaatccaacaaagacaaagaaggcaaggttttctacagcatcactggccaaggagctgacacaccccctgttggtgtctttattattgaaagagaaacaggatggctgaaggtgacagagcctctggatagagaacgcattgccacatacactctcttctctcacgctgtgtcatccaacgggaatgcagttgaggatccaatggagattttgatcacggtaaccgatcagaatgacaacaagcccgaattcacccaggaggtctttaaggggtctgtcatggaaggtgctcttccaggaacctctgtgatggaggtcacagccacagacgcggacgatgatgtgaacacctacaatgccgccatcgcttacaccatcctcagccaagatcctgagctccctgacaaaaatatgttcaccattaacaggaacacaggagtcatcagtgtggtcaccactgggctggaccgagagagtttccctacgtataccctggtggttcaagctgctgaccttcaaggtgaggggttaagcacaacagcaacagctgtgatcacagtcactgacaccaacgataatcctccgatcttcaatcccaccacgggcttggattttgaggccaagcagcagtacattctacacgtagcagtgacgaatgtggtaccttttgaggtctctctcaccacctccacagccaccgtcaccgtggatgtgctggatgtgaatgaagcccccatctttgtgcctcctgaaaagagagtggaagtgtccgaggactttggcgtgggccaggaaatcacatcctacactgcccaggagccagacacatttatggaacagaaaataacatatcggatttggagagacactgccaactggctggagattaatccggacactggtgccatttccactcgggctgagctggacagggaggattttgagcacgtgaagaacagcacgtacacagccctaatcatagctacagacaatggttctccagttgctactggaacagggacacttctgctgatcctgtctgatgtgaatgacaacgcccccataccagaacctcgaactatattcttctgtgagaggaatccaaagcctcaggtcataaacatcattgatgcagaccttcctcccaatacatctcccttcacagcagaactaacacacggggcgagtgccaactggaccattcagtacaacgacccaacccaagaatctatcattttgaagccaaagatggccttagaggtgggtgactacaaaatcaatctcaagctcatggataaccagaataaagaccaagtgaccaccttagaggtcagcgtgtgtgactgtgaaggggccgctggcgtctgtaggaaggcacagcctgtcgaagcaggattgcaaattcctgccattctggggattcttggaggaattcttgctttgctaattctgattctgctgctcttgctgtttcttcggaggagagcggtggtcaaagagcccttactgcccccagaggatgacacccgggacaacgtttattactatgatgaagaaggaggcggagaagaggaccaggactttgacttgagccagctgcacaggggcctggacgctcggcctgaagtgactcgtaacgacgttgcaccaaccctcatgagtgtcccccggtatcttccccgccctgccaatcccgatgaaattggaaattttattgatgaaaatctgaaagcggctgatactgaccccacagccccgccttatgattctctgctcgtgtttgactatgaaggaagcggttccgaagctgctagtctgagctccctgaactcctcagagtcagacaaagaccaggactatgactacttgaacgaatggggcaatcgcttcaagaagctggctgacatgtacggaggcggcgaggacgactaggggactcgagagaggcgggccccagacccatgtgctg

SEQ ID NO: 662 - DNA, 6857 bp, Homo sapiens
  source 1..6857: mol_type = genomic DNA
ttctctcagcccccgccctttccttccctcacagcggcagcctccctcctcccgccccccccgccccgcacccgcctgcccgcccgccacctccccccggtttctcattcctgccactagcgcgctcggcggctcattccgcggccgccgccagctgaggggagcgtcgcgggccgaggagcagatgccgcgggggccgctcgcagccgccgctgacttgtgaatgggaccgggactggggccgggactgacaccgcagcgcttgccctgcgccagggactggcggctcggaggttgcgtccaccctcaagggccccagaaatcactgtgttttcagctcagcggccctgtgacattccttcgtgttgtcatttgttgagtgaccaatcagatgggtggagtgtgttacagaaattggcagcaagtatccaatgggtgaagaagaagctaactggggacgtgggcagccctgacgtgatgagctcaaccagcagagacattccatcccaagagaggtctgcgtgacgcgtccgggaggccaccctcagcaagaccaccgtacagttggtggaaggggtgacagctgcattctcctgtgcctaccacgtaaccaaaaatgaaggagaactactgtttacaagccgccctggtgtgcctgggcatgctgtgccacagccatgcctttgccccagagcggcgggggcacctgcggccctccttccatgggcaccatgagaagggcaaggaggggcaggtgctacagcgctccaagcgtggctgggtctggaaccagttcttcgtgatagaggagtacaccgggcctgaccccgtgcttgtgggcaggcttcattcagatattgactctggtgatgggaacattaaatacattctctcaggggaaggagctggaaccatttttgtgattgatgacaaatcagggaacattcatgccaccaagacgttggatcgagaagagagagcccagtacacgttgatggctcaggcggtggacagggacaccaatcggccactggagccaccgtcggaattcattgtcaaggtccaggacattaatgacaaccctccggagttcctgcacgagacctatcatgccaacgtgcctgagaggtccaatgtgggaacgtcagtaatccaggtgacagcttcagatgcagatgaccccacttatggaaatagcgccaagttagtgtacagtatcctcgaaggacaaccctatttttcggtggaagcacagacaggtatcatcagaacagccctacccaacatggacagggaggccaaggaggagtaccacgtggtgatccaggccaaggacatgggtggacatatgggcggactctcagggacaaccaaagtgacgatcacactgaccgatgtcaatgacaacccaccaaagtttccgcagagcgtataccagatgtctgtgtcagaagcagccgtccctggggaggaagtaggaagagtgaaagctaaagatccagacattggagaaaatggcttagtcacatacaatattgttgatggagatggtatggaatcgtttgaaatcacaacggactatgaaacacaggagggggtgataaagctgaaaaagcctgtagattttgaaaccaaaagagcctatagcttgaaggtagaggcagccaacgtgcacatcgacccgaagtttatcagcaatggccctttcaaggacactgtgaccgtcaagatctcagtagaagatgctgatgagccccctatgttcttggccccaagttacatccacgaagtccaagaaaatgcagctgctggcaccgtggttgggagagtgcatgccaaagaccctgatgctgccaacagcccgataaggtattccatcgatcgtcacactgacctcgacagatttttcactattaatccagaggatggttttattaaaactacaaaacctctggatagagaggaaacagcctggctcaacatcactgtctttgcagcagaaatccacaatcggcatcaggaagccaaagtcccagtggccattagggtccttgatgtcaacgataatgctcccaagtttgctgccccttatgaaggtttcatctgtgagagtgatcagaccaagccactttccaaccagccaattgttacaattagtgcagatgacaaggatgacacggccaatggaccaagatttatcttcagcctaccccctgaaatcattcacaatccaaatttcacagtcagagacaaccgagataacacagcaggcgtgtacgcccggcgtggagggttcagtcggcagaagcaggacttgtaccttctgcccatagtgatcagcgatggcggcatcccgcccatgagtagcaccaacaccctcaccatcaaagtctgcgggtgcgacgtgaacggggcactgctctcctgcaacgcagaggcctacattctgaacgccggcctgagcacaggcgccctgatcgccatcctcgcctgcatcgtcattctcctggtcattgtagtattgtttgtgaccctgagaaggcaaaagaaagaaccactcattgtctttgaggaagaagatgtccgtgagaacatcattacttatgatgatgaagggggtggggaagaagacacagaagcctttgatattgccaccctccagaatcctgatggtatcaatggatttatcccccgcaaagacatcaaacctgagtatcagtacatgcctagacctgggctccggccagcgcccaacagcgtggatgtcgatgacttcatcaacacgagaatacaggaggcagacaatgaccccacggctcctccttatgactccattcaaatctacggttatgaaggcaggggctcagtggccgggtccctgagctccctagagtcggccaccacagattcagacttggactatgattatctacagaactggggacctcgttttaagaaactagcagatttgtatggttccaaagacacttttgatgacgattcttaacaataacgatacaaatttggccttaagaactgtgtctggcgttctcaagaatctagaagatgtgtaaacaggtatttttttaaatcaaggaaaggctcatttaaaacaggcaaagttttacagagaggatacatttaataaaactgcgaggacatcaaagtggtaaatactgtgaaataccttttctcacaaaaaggcaaatattgaagttgtttatcaacttcgctagaaaaaaaaaacacttggcatacaaaatatttaagtgaaggagaagtctaacgctgaactgacaatgaagggaaattgtttatgtgttatgaacatccaagtctttcttcttttttaagttgtcaaagaagcttccacaaaattagaaaggacaacagttctgagctgtaatttcgccttaaactctggacactctatatgtagtgcatttttaaacttgaaatatataatattcagccagcttaaacccatacaatgtatgtacaatacaatgtacaattatgtctcttgagcatcaatcttgttactgctgattcttgtaaatctttttgcttctactttcatcttaaactaatacgtgccagatataactgtcttgtttcagtgagagacgccctatttctatgtcatttttaatgtatctatttgtacaattttaaagttcttattttagtatacgtataaatatcagtattctgacatgtaagaaaatgttacggcatcacacttatattttatgaacattgtactgttgctttaatatgagcttcaatataagaagcaatctttgaaataaaaaaagatttttttttaattctgggtttgattcttaacattgaaacaaacgttaagtatttctaatgatccatttatatttctaatttaattgtgatcttttaataaccctatttatgatctgttgttgtctgtctgctgcttttattgtttatttaaaatcaaatatgttttacaaatgttttttcagacaagattctgtaacatcatgtaaagcttttttgtacattcttggtgttaacctcctggcttctcttcacacacatcttctaaaaaagaaggatgtgaaagaactaggtcagtctatgactttgcaatatgtgttatatagtatgcatttatcttgtatatcagtaatttgatggttatgagagatgaatccatgagggaatggagctatcagaactctaatgttccaggtatacattctatgccccacactgagcactggggaactgggggactagagtcaaaaatataaatttgcccagactctaatgttattctattttttcttctgttgaacttaccaggctattgtaagactcttgatagttgaaactgcttatttttcctcctgtaattttaactaattgtaaaatgatgtggcattttatgttttaatgagaatgggcgattcatttaaaaaagctttgtttagaatatgcttggggccgtaagctcagaatgagggcagggaccattttggattctgagagtcgatgccatttggtccaggagtgtgtctacagtcccctgcattccagctagtttcttggggattgaaacttatgtgaagggcatttcacctgttcagttgggccaaaggtcaaaacgtagcaatacttggggaaagaccacataaagtcacactgcaagtgctttccctctttccccctacacacagggcacgtgctttttcttggattgcagacaatttttacagtttttttctgactttattgtgaaagtttgtttcaagcatttcttgatatcatgttatgtactatttttatgatttagtcaacatgcatacaaagaaatgttttttatgaagtgctcacttccattttactttgcattgaaatcaaattgggctgaacacttcaatggaatacattttgtggacaatgtcactttagaatctttcatctcagtgaaggattacacattctcaatacttccataattgcaggttgtgttcatttttttatatagtttttgtaatccaaagaatattttgctagatttgcacagatctccaattgaatttgcaatgaagaaataactcaaaaggaatatgaatagcatttaaataagtatacagctgtaagtaaccctgtcaccatggatgatccttttctctaggaatgtatttggattagagatgacaactacattttcgcatttttatgttgaagtcttttttaaaaaggctgtttacttttcagtagttaagaatacttgtttttctttttcttttttttttttttttttaccttttattttttcgttaagcctctattgtttgtagaacactcttagaaacttggaaataaaatgtctttcccaactagtggagtcctttttcatttggagcacattgccttaaaagaagtcttaatttaaacggtccttccttattctaaagtaatcactgttttataccatctatgcagctaaaagaaggaacatgcttctgttcttttcctcaagtaatggttattgtttctagtcatcattcattcattgattcattcattaattcatcaaaatcttattttataaaccctgttccacttactggaggattcagaatgaatcttactaccttttctgacatcttttgataattcagccctgtaccaaagtatccaccttgttgtcttataatcacctatttacctatttgccctcctagaaaatgcaagaagatattttctctccttccaaattgaaggaagaacataaaagatataacaggaaggagatggtgagatatagagtgtgagcggaaattaggccagctgtggcaattctggacagatcttgggtttagctaagttatttcttttaggcctgggtttctgggggtgacagggaagataaaagagtagtttatttgcacctcttggagaattgcttaaaaatatagagatcatggctctgtatgtcaggtggaaccaggtcaggagtatttgaaactgctcctgggtcattgtgacatatccttcacatctttttgagaaactttataagacaatgggggtgaatgggggctgggcagttggagtctctgagcagaagaggggcaaaatttatttggcaggcagtgtggaggacagattaggagcatataaacccagaggtgtgccccaggagggcttttgcaaaggtcaatatgagatagaatgagggcctgaaataattcagtaatttggagatggagaagaggaaagacttctctgctcttgcactgccatcagcctggtctgggccatggtcatctctgacccggaagactgaccccacctcttggctcaccctctgcctcccaacctcctcttcacaaagaagccagagggatacttttaacacacaacccagatcacatgacttcgtaacttaaacctcttcactggcttcccaaagacttaaaatgaattctgatgcctttattttattgctttacatgaacagggccctgcgaacctctccagtgtcattccactccatcctcctttcagtgcacgatgctccagccacactggccatctttcggttcctgatacaaaaaaaaacacgttccttttccatggaaagcaggtcacccttgttattttgtatcgatgacaactctttaaacttattttgctttttggctttatgtatgtgtgtgggtgggtgggactgactgccccactagaatgtaagctccatgagggcagggaatcttgctttcttgtttaccattgtatactcagttctttacacagtgcctgaaacataacaggtacacaataaatatctattgaatgaaagcaaa

SEQ ID NO: 663 - DNA, 6874 bp, Homo sapiens
  source 1..6874: mol_type = genomic DNA
agcgtcgcgggccgaggagcagatgccgcgggggccgctcgcagccgccgctgacttgtgaatgggaccgggactggggccgggactgacaccgcagcgcttgccctgcgccagggactggcggctcggaggttgcgtccaccctcaagggccccagaaatcactgtgttttcagctcagcggccctgtgacattccttcgtgttgtcatttgttgagtgaccaatcagatgggtggagtgtgttacagaaattggcagcaagtatccaatgggtgaagaagaagctaactggggacgtgggcagccctgacgtgatgagctcaaccagcagagacattccatcccaagagaggtctgcgtgacgcgtccgggaggccaccctcagcaagaccaccgtacagttggtggaaggggtgacagctgcattctcctgtgcctaccacgtaaccaaaaatgaaggagaactactgtttacaagccgccctggtgtgcctgggcatgctgtgccacagccatgcctttgccccagagcggcgggggcacctgcggccctccttccatgggcaccatgagaagggcaaggaggggcaggtgctacagcgctccaagcgtggctgggtctggaaccagttcttcgtgatagaggagtacaccgggcctgaccccgtgcttgtgggcaggcttcattcagatattgactctggtgatgggaacattaaatacattctctcaggggaaggagctggaaccatttttgtgattgatgacaaatcagggaacattcatgccaccaagacgttggatcgagaagagagagcccagtacacgttgatggctcaggcggtggacagggacaccaatcggccactggagccaccgtcggaattcattgtcaaggtccaggacattaatgacaaccctccggagttcctgcacgagacctatcatgccaacgtgcctgagaggtccaatgtgggaacgtcagtaatccaggtgacagcttcagatgcagatgaccccacttatggaaatagcgccaagttagtgtacagtatcctcgaaggacaaccctatttttcggtggaagcacagacaggtatcatcagaacagccctacccaacatggacagggaggccaaggaggagtaccacgtggtgatccaggccaaggacatgggtggacatatgggcggactctcagggacaaccaaagtgacgatcacactgaccgatgtcaatgacaacccaccaaagtttccgcagagcgtataccagatgtctgtgtcagaagcagccgtccctggggaggaagtaggaagagtgaaagctaaagatccagacattggagaaaatggcttagtcacatacaatattgttgatggagatggtatggaatcgtttgaaatcacaacggactatgaaacacaggagggggtgataaagctgaaaaagcctgtagattttgaaaccaaaagagcctatagcttgaaggtagaggcagccaacgtgcacatcgacccgaagtttatcagcaatggccctttcaaggacactgtgaccgtcaagatctcagtagaagatgctgatgagccccctatgttcttggccccaagttacatccacgaagtccaagaaaatgcagctgctggcaccgtggttgggagagtgcatgccaaagaccctgatgctgccaacagcccgataaggtattccatcgatcgtcacactgacctcgacagatttttcactattaatccagaggatggttttattaaaactacaaaacctctggatagagaggaaacagcctggctcaacatcactgtctttgcagcagaaatccacaatcggcatcaggaagccaaagtcccagtggccattagggtccttgatgtcaacgataatgctcccaagtttgctgccccttatgaaggtttcatctgtgagagtgatcagaccaagccactttccaaccagccaattgttacaattagtgcagatgacaaggatgacacggccaatggaccaagatttatcttcagcctaccccctgaaatcattcacaatccaaatttcacagtcagagacaaccgagataacacagcaggcgtgtacgcccggcgtggagggttcagtcggcagaagcaggacttgtaccttctgcccatagtgatcagcgatggcggcatcccgcccatgagtagcaccaacaccctcaccatcaaagtctgcgggtgcgacgtgaacggggcactgctctcctgcaacgcagaggcctacattctgaacgccggcctgagcacaggcgccctgatcgccatcctcgcctgcatcgtcattctcctgggttgcccaagcttaatggaacccccctctcccagggaagacatgagattgctttatctgggcttccagctgatgctattttcctatgttaaagtaaacagaagattttgtcttctgggggtctttataaaacttcctttcctctatgtggtggctacagagagtccaaccacacttacgtcattgtagtattgtttgtgaccctgagaaggcaaaagaaagaaccactcattgtctttgaggaagaagatgtccgtgagaacatcattacttatgatgatgaagggggtggggaagaagacacagaagcctttgatattgccaccctccagaatcctgatggtatcaatggatttatcccccgcaaagacatcaaacctgagtatcagtacatgcctagacctgggctccggccagcgcccaacagcgtggatgtcgatgacttcatcaacacgagaatacaggaggcagacaatgaccccacggctcctccttatgactccattcaaatctacggttatgaaggcaggggctcagtggccgggtccctgagctccctagagtcggccaccacagattcagacttggactatgattatctacagaactggggacctcgttttaagaaactagcagatttgtatggttccaaagacacttttgatgacgattcttaacaataacgatacaaatttggccttaagaactgtgtctggcgttctcaagaatctagaagatgtgtaaacaggtatttttttaaatcaaggaaaggctcatttaaaacaggcaaagttttacagagaggatacatttaataaaactgcgaggacatcaaagtggtaaatactgtgaaataccttttctcacaaaaaggcaaatattgaagttgtttatcaacttcgctagaaaaaaaaaacacttggcatacaaaatatttaagtgaaggagaagtctaacgctgaactgacaatgaagggaaattgtttatgtgttatgaacatccaagtctttcttcttttttaagttgtcaaagaagcttccacaaaattagaaaggacaacagttctgagctgtaatttcgccttaaactctggacactctatatgtagtgcatttttaaacttgaaatatataatattcagccagcttaaacccatacaatgtatgtacaatacaatgtacaattatgtctcttgagcatcaatcttgttactgctgattcttgtaaatctttttgcttctactttcatcttaaactaatacgtgccagatataactgtcttgtttcagtgagagacgccctatttctatgtcatttttaatgtatctatttgtacaattttaaagttcttattttagtatacgtataaatatcagtattctgacatgtaagaaaatgttacggcatcacacttatattttatgaacattgtactgttgctttaatatgagcttcaatataagaagcaatctttgaaataaaaaaagatttttttttaattctgggtttgattcttaacattgaaacaaacgttaagtatttctaatgatccatttatatttctaatttaattgtgatcttttaataaccctatttatgatctgttgttgtctgtctgctgcttttattgtttatttaaaatcaaatatgttttacaaatgttttttcagacaagattctgtaacatcatgtaaagcttttttgtacattcttggtgttaacctcctggcttctcttcacacacatcttctaaaaaagaaggatgtgaaagaactaggtcagtctatgactttgcaatatgtgttatatagtatgcatttatcttgtatatcagtaatttgatggttatgagagatgaatccatgagggaatggagctatcagaactctaatgttccaggtatacattctatgccccacactgagcactggggaactgggggactagagtcaaaaatataaatttgcccagactctaatgttattctattttttcttctgttgaacttaccaggctattgtaagactcttgatagttgaaactgcttatttttcctcctgtaattttaactaattgtaaaatgatgtggcattttatgttttaatgagaatgggcgattcatttaaaaaagctttgtttagaatatgcttggggccgtaagctcagaatgagggcagggaccattttggattctgagagtcgatgccatttggtccaggagtgtgtctacagtcccctgcattccagctagtttcttggggattgaaacttatgtgaagggcatttcacctgttcagttgggccaaaggtcaaaacgtagcaatacttggggaaagaccacataaagtcacactgcaagtgctttccctctttccccctacacacagggcacgtgctttttcttggattgcagacaatttttacagtttttttctgactttattgtgaaagtttgtttcaagcatttcttgatatcatgttatgtactatttttatgatttagtcaacatgcatacaaagaaatgttttttatgaagtgctcacttccattttactttgcattgaaatcaaattgggctgaacacttcaatggaatacattttgtggacaatgtcactttagaatctttcatctcagtgaaggattacacattctcaatacttccataattgcaggttgtgttcatttttttatatagtttttgtaatccaaagaatattttgctagatttgcacagatctccaattgaatttgcaatgaagaaataactcaaaaggaatatgaatagcatttaaataagtatacagctgtaagtaaccctgtcaccatggatgatccttttctctaggaatgtatttggattagagatgacaactacattttcgcatttttatgttgaagtcttttttaaaaaggctgtttacttttcagtagttaagaatacttgtttttctttttcttttttttttttttttttaccttttattttttcgttaagcctctattgtttgtagaacactcttagaaacttggaaataaaatgtctttcccaactagtggagtcctttttcatttggagcacattgccttaaaagaagtcttaatttaaacggtccttccttattctaaagtaatcactgttttataccatctatgcagctaaaagaaggaacatgcttctgttcttttcctcaagtaatggttattgtttctagtcatcattcattcattgattcattcattaattcatcaaaatcttattttataaaccctgttccacttactggaggattcagaatgaatcttactaccttttctgacatcttttgataattcagccctgtaccaaagtatccaccttgttgtcttataatcacctatttacctatttgccctcctagaaaatgcaagaagatattttctctccttccaaattgaaggaagaacataaaagatataacaggaaggagatggtgagatatagagtgtgagcggaaattaggccagctgtggcaattctggacagatcttgggtttagctaagttatttcttttaggcctgggtttctgggggtgacagggaagataaaagagtagtttatttgcacctcttggagaattgcttaaaaatatagagatcatggctctgtatgtcaggtggaaccaggtcaggagtatttgaaactgctcctgggtcattgtgacatatccttcacatctttttgagaaactttataagacaatgggggtgaatgggggctgggcagttggagtctctgagcagaagaggggcaaaatttatttggcaggcagtgtggaggacagattaggagcatataaacccagaggtgtgccccaggagggcttttgcaaaggtcaatatgagatagaatgagggcctgaaataattcagtaatttggagatggagaagaggaaagacttctctgctcttgcactgccatcagcctggtctgggccatggtcatctctgacccggaagactgaccccacctcttggctcaccctctgcctcccaacctcctcttcacaaagaagccagagggatacttttaacacacaacccagatcacatgacttcgtaacttaaacctcttcactggcttcccaaagacttaaaatgaattctgatgcctttattttattgctttacatgaacagggccctgcgaacctctccagtgtcattccactccatcctcctttcagtgcacgatgctccagccacactggccatctttcggttcctgatacaaaaaaaaacacgttccttttccatggaaagcaggtcacccttgttattttgtatcgatgacaactctttaaacttattttgctttttggctttatgtatgtgtgtgggtgggtgggactgactgccccactagaatgtaagctccatgagggcagggaatcttgctttcttgtttaccattgtatactcagttctttacacagtgcctgaaacataacaggtacacaataaatatctattgaatgaaagcaaa

SEQ ID NO: 664 - DNA, 955 bp, Homo sapiens
  source 1..955: mol_type = genomic DNA
cgaggagcagatgccgcgggggccgctcgcagccgccgctgacttgtgaatgggaccgggactggggccgggactgacaccgcagcgcttgccctgcgccagggactggcggctcggaggttgcgtccaccctcaagggccccagaaatcactgtgttttcagctcagcggccctgtgacattccttcgtgttgtcatttgttgagtgaccaatcagatgggtggagtgtgttacagaaattggcagcaagtatccaatgggtgaagaagaagctaactggggacgtgggcagccctgacgtgatgagctcaaccagcagagacattccatcccaagagaggtctgcgtgacgcgtccgggaggccaccctcagcaagaccaccgtacagttggtggaaggggtgacagctgcattctcctgtgcctaccacgtaaccaaaaatgaaggagaactactgtttacaagccgccctggtgtgcctgggcatgctgtgccacagccatgcctttgccccagagcggcgggggcacctgcggccctccttccatgggcaccatgagaagggcaaggaggggcaggtgctacagcgctccaagcgtggctgggtctggaaccagttcttcgtgatagaggagtacaccgggcctgaccccgtgcttgtgggcaggcttcattcagatattgactctggtgatgggaacattaaatacattctctcaggggaaggagctggaaccatttttgtgattgatgacaaatcagggaacattcatgccaccaagacgttggatcgagaagagagagcccagtacacgttgatggctcaggcggtggacagggacaccaatcggaattcattgtcaaggtccaggacattaatgacaaccctccggagttcctgcacgagacctatcatgccaacgtgcctgagaggtccaatgtgggtgcgtacg

SEQ ID NO: 665 - DNA, 2513 bp, Homo sapiens
  source 1..2513: mol_type = genomic DNA
attcctgccactagcgcgctcggcggctcattccgcggccgccgccagctgaggggagcgtcgcgggccgaggagcagatgccgcgggggccgctcgcagccgccgctgacttgtgaatgggaccgggactggcggctcggaggttgcgtccaccctcaagggccccagaaatcactgtgttttcagctcagcggccctgtgacattccttcgtgttgtcatttgttgagtgaccaatcagatgggtggagtgtgttacagaaattggcagcaagtatccaatgggtgaagaagcttcattcagatattgactctggtgatgggaacattaaatacattctctcaggggaaggagctggaaccatttttgtgattgatgacaaatcagggaacattcatgccaccaagacgttggatcgagaagagagagcccagtacacgttgatggctcaggcggtggacagggacaccaatcggccactggagccaccgtcggaattcattgtcaaggtccaggacattaatgacaaccctccggagttcctgcacgagacctatcatgccaacgtgcctgagaggtccaatgtgggaacgtcagtaatccaggtgacagcttcagatgcagatgaccccacttatggaaatagcgccaagttagtgtacagtatcctcgaaggacaaccctatttttcggtggaagcacagacaggtatcatcagaacagccctacccaacatggacagggaggccaaggaggagtaccacgtggtgatccaggccaaggacatgggtggacatatgggcggactctcagggacaaccaaagtgacgatcacactgaccgatgtcaatgacaacccaccaaagtttccgcagagcgtataccagatgtctgtgtcagaagcagccgtccctggggaggaagtaggaagagtgaaagctaaagatccagacattggagaaaatggcttagtcacatacaatattgttgatggagatggtatggaatcgtttgaaatcacaacggactatgaaacacaggagggggtgataaagctgaaaaagcctgtagattttgaaaccaaaagagcctatagcttgaaggtagaggcagccaacgtgcacatcgacccgaagtttatcagcaatggccctttcaaggacactgtgaccgtcaagatctcagtagaagatgctgatgagccccctatgttcttggccccaagttacatccacgaagtccaagaaaatgcagctgctggcaccgtggttgggagagtgcatgccaaagaccctgatgctgccaacagcccgataaggtattccatcgatcgtcacactgacctcgacagatttttcactattaatccagaggatggttttattaaaactacaaaacctctggatagagaggaaacagcctggctcaacatcactgtctttgcagcagaaatccacaatcggcatcaggaagccaaagtcccagtggccattagggtccttgatgtcaacgataatgctcccaagtttgctgccccttatgaaggtttcatctgtgagagtgatcagaccaagccactttccaaccagccaattgttacaattagtgcagatgacaaggatgacacggccaatggaccaagatttatcttcagcctaccccctgaaatcattcacaatccaaatttcacagtcagagacaaccgagataacacagcaggcgtgtacgcccggcgtggagggttcagtcggcagaagcaggacttgtaccttctgcccatagtgatcagcgatggcggcatcccgcccatgagtagcaccaacaccctcaccatcaaagtctgcgggtgcgacgtgaacggggcactgctctcctgcaacgcagaggcctacattctgaacgccggcctgagcacaggcgccctgatcgccatcctcgcctgcatcgtcattctcctggtcattgtagtattgtttgtgaccctgagaaggcaaaagaaagaaccactcattgtctttgaggaagaagatgtccgtgagaacatcattacttatgatgatgaagggggtggggaagaagacacagaagcctttgatattgccaccctccagaatcctgatggtatcaatggatttatcccccgcaaagacatcaaacctgagtatcagtacatgcctagacctgggctccggccagcgcccaacagcgtggatgtcgatgacttcatcaacacgagaatacaggaggcagacaatgaccccacggctcctccttatgactccattcaaatctacggttatgaaggcaggggctcagtggccgggtccctgagctccctagagtcggccaccacagattcagacttggactatgattatctacagaactggggacctcgttttaagaaactagcagatttgtatggttccaaagacacttttgatgacgattcttaacaataacgatacaaatttggccttaagaactgtgtctggcgttctcaagaatctag

SEQ ID NO: 666 - DNA, 810 bp, Homo sapiens
  source 1..810: mol_type = genomic DNA
tttgggaagttggctggctggcgaggcagagcctctcctcaaagcctggctcccacggaaaatatgctcagtgcagccgcgtgcatgaatgaaaacgccgccgggcgcttctagtcggacaaaatgcagccgagaactccgctcgttctgtgcgttctcctgtcccaggtgctgctgctaacatctgcagaagatttggactgcactcctggatttcagcagaaagtgttccatatcaatcagccagctgaattcattgaggaccagtcaattctaaacttgaccttcagtgactgtaagggaaacgacaagctacgctatgaggtctcgagcccatacttcaaggtgaacagcgatggcggcttagttgctctgagaaacataactgcagtgggcaaaactctgttcgtccatgcacggaccccccatgcggaagatatggcagaactcgtgattgtcggggggaaagacatccagggctccttgcaggatatatttaaatttgcaagaacttctcctgtcccaagacaaaagaggtccattgtggtatctcccattttaattccagagaatcagagacagcctttcccaagagatgttggcaagatgaagatttggcaagttctgtgcctagcacgatggctgacatgagataaaacccacaatcctattaacagcgaacttctcttgaatgaaggcattacagcagatttaaatccatgcattacaattttagcaatttaatgaacatcctatttggcgacattattgctttaaaggaataaatcacaaacattttacttcccacta

SEQ ID NO: 667 - DNA, 4001 bp, Homo sapiens
  source 1..4001: mol_type = genomic DNA
aagaagcaaatgggatgccacctccgcggggctcgctcctcgcgaggtgctcaccccgtatctgccatgcaaaacgagggagcgttaggaaggaatccgtcttgtaaagccattggtcctggtcatcagcctctacccaatgctttcgtgatgctgctgctgatctatttgggaagttggctggctggcgaggcagagcctctcctcaaagcctggctcccacggaaaatatgctcagtgcagccgcgtgcatgaatgaaaacgccgccgggcgcttctagtcggacaaaatgcagccgagaactccgctcgttctgtgcgttctcctgtcccaggtgctgctgctaacatctgcagaagatttggactgcactcctggatttcagcagaaagtgttccatatcaatcagccagctgaattcattgaggaccagtcaattctaaacttgaccttcagtgactgtaagggaaacgacaagctacgctatgaggtctcgagcccatacttcaaggtgaacagcgatggcggcttagttgctctgagaaacataactgcagtgggcaaaactctgttcgtccatgcacggaccccccatgcggaagatatggcagaactcgtgattgtcggggggaaagacatccagggctccttgcaggatatatttaaatttgcaagaacttctcctgtcccaagacaaaagaggtccattgtggtatctcccattttaattccagagaatcagagacagcctttcccaagagatgttggcaaggtagtcgatagtgacaggccagaaaggtccaagttccggctcactggaaagggagtggatcaagagcctaaaggaattttcagaatcaatgagaacacagggagcgtctccgtgacacggaccttggacagagaagtaatcgctgtttatcaactatttgtggagaccactgatgtcaatggcaaaactctcgaggggccggtgcctctggaagtcattgtgattgatcagaatgacaaccgaccgatctttcgggaaggcccctacatcggccacgtcatggaagggtcacccacaggcaccacagtgatgcggatgacagcctttgatgcagatgacccagccaccgataatgccctcctgcggtataatatccgtcagcagacgcctgacaagccatctcccaacatgttctacatcgatcctgagaaaggagacattgtcactgttgtgtcacctgcgctgctggaccgagagactctggaaaatcccaagtatgaactgatcatcgaggctcaagatatggctggactggatgttggattaacaggcacggccacagccacgatcatgatcgatgacaaaaatgatcactcaccaaaattcaccaagaaagagtttcaagccacagtcgaggaaggagctgtgggagttattgtcaatttgacagttgaagataaggatgaccccaccacaggtgcatggagggctgcctacaccatcatcaacggaaaccccgggcagagctttgaaatccacaccaaccctcaaaccaacgaagggatgctttctgttgtcaaaccattggactatgaaatttctgccttccacaccctgctgatcaaagtggaaaatgaagacccactcgtacccgacgtctcctacggccccagctccacagccaccgtccacatcactgtcctggatgtcaacgagggcccagtcttctacccagaccccatgatggtgaccaggcaggaggacctctctgtgggcagcgtgctgctgacagtgaatgccacggaccccgactccctgcagcatcaaaccatcaggtattctgtttacaaggacccagcaggttggctgaatattaaccccatcaatgggactgttgacaccacagctgtgctggaccgtgagtccccatttgtcgacaacagcgtgtacactgctctcttcctggcaattgacagtggcaaccctcccgctacgggcactgggactttgctgataaccctggaggacgtgaatgacaatgccccgttcatttaccccacagtagctgaagtctgtgatgatgccaaaaacctcagtgtagtcattttgggagcatcagataaggatcttcacccgaatacagatcctttcaaatttgaaatccacaaacaagctgttcctgataaagtctggaagatctccaagatcaacaatacacacgccctggtaagccttcttcaaaatctgaacaaagcaaactacaacctgcccatcatggtgacagattcagggaaaccacccatgacgaatatcacagatctcagggtacaagtgtgctcctgcaggaattccaaagtggactgcaacgcggcaggggccctgcgcttcagcctgccctcagtcctgctcctcagcctcttcagcttagcttgtctgtgagaactcctgacgtctgaagcttgactcccaagtttccatagcaacaggaaaaaaaaaaatctatccaaatctgaagattgcggtttacagctatcgaacttcacaactaggcctcaattgttccggttttttattttctttacaatttcacttagtctgtacttcatcattttgacagcatcttcctccctcctttaattaatggaatcttctgaattttccctgaatgtttaaagatcatgacatatgacttgatcttctgggagcaggaacaatgactactttttctggtgtgttaacatgtcgctagccagtgctccaggcacccagctttgtctgtgggttagtattggtgtatgtatgagtatctgtatgtatatatacacggtatttatagagagagactatcctggagaagcctcgttttgatgccattcttccttgcaaggttaagcaaggtgggtggaaactaagacacctgaaccctccagggcctcccgcatcaaggtcagcatgaggacagaccacagagctgtcacttttgctccgaagctacttctccactgtcccgttcagtctgaatgctgccacaaccagccaggcaggtccacagagagggagagcagagaaagaagtcctttctctttattgagttcgaggactacaaccaatttacactgccatctgatgccgtgatcctgagccaaggaggtgaggagcagagcaggcaatttcaccaccaaatgccaagaaaagggctgacattttctttcatgggcaccaacctgcatttgtatgtgtcccgaatccacagtcgtactgattctaatggggacacagatcatggtagagaatctctccctcctcagtaaatgtacaactgcacctgtcatcatggaggtcatacatgcatacaaagaggtgtacaggtaccatcttgtatacacatatatacccacatgtacagacatacatttatgcacattcacgctgtttgtttcatatatacaggcataaaatagagtaaatacaggtagttttaaaagtacccttttgtgtgaattgactaccgttgtttgcaaacccgaaaataaaagacgttcattatgtatgaaaagtaactgatttgtattctgtgagcatgtaaaagcggaaagttagtgcttgttctaagattaccttcttgttgataaaccataaatgaatcatcaaagctcacaccaaatttttctatcaaataaaactagtgacagcttgtggctttttattagagctcgccacgaactagggtaaggtgagtgtcttagcatattttaatgcagttgcttactaaaggttttaaccgcacatgcacacacacacgctttcttatgcaatctatgtttgcacttgtgctttcagttagccttctgtaggaagtagaagtcatatgttgtctttgttgtagtgaaattatacagatagagttccatatattgtatttgtttcaatggtaaatccttttggaacatatagaatgcagagatttttttttccattaaaataaatgggtattggtggttaaaactg

SEQ ID NO: 668 - DNA, 2280 bp, Homo sapiens
  source 1..2280: mol_type = genomic DNA
atgaaaacgccgccgggcgcttctagtcggacaaaatgcagccgagaactccgctcgttctgtgcgttctcctgtcccagggccaaacaacccacctgcactgcatggttcccccagcaagaacatcccagtgagaatggcccacagatgcctgggcgtgacccacctgcagcttcaaccatgcaggtgctgctgctaacatctgcagaagatttggactgcactcctggatttcagcagaaagtgttccatatcaatcagccagctgaattcattgaggaccagtcaattctaaacttgaccttcagtgactgtaagggaaacgacaagctacgctatgaggtctcgagcccatacttcaaggtgaacagcgatggcggcttagttgctctgagaaacataactgcagtgggcaaaactctgttcgtccatgcacggaccccccatgcggaagatatggcagaactcgtgattgtcggggggaaagacatccagggctccttgcaggatatatttaaatttgcaagaacttctcctgtcccaagacaaaagaggtccattgtggtatctcccattttaattccagagaatcagagacagcctttcccaagagatgttggcaaggtagtcgatagtgacaggccagaaaggtccaagttccggctcactggaaagggagtggatcaagagcctaaaggaattttcagaatcaatgagaacacagggagcgtctccgtgacacggaccttggacagagaagtaatcgctgtttatcaactatttgtggagaccactgatgtcaatggcaaaactctcgaggggccggtgcctctggaagtcattgtgattgatcagaatgacaaccgaccgatctttcgggaaggcccctacatcggccacgtcatggaagggtcacccacaggcaccacagtgatgcggatgacagcctttgatgcagatgacccagccaccgataatgccctcctgcggtataatatccgtcagcagacgcctgacaagccatctcccaacatgttctacatcgatcctgagaaaggagacattgtcactgttgtgtcacctgcgctgctggaccgagagactctggaaaatcccaagtatgaactgatcatcgaggctcaagatatggctggactggatgttggattaacaggcacggccacagccacgatcatgatcgatgacaaaaatgatcactcaccaaaattcaccaagaaagagtttcaagccacagtcgaggaaggagctgtgggagttattgtcaatttgacagttgaagataaggatgaccccaccacaggtgcatggagggctgcctacaccatcatcaacggaaaccccgggcagagctttgaaatccacaccaaccctcaaaccaacgaagggatgctttctgttgtcaaaccattggactatgaaatttctgccttccacaccctgctgatcaaagtggaaaatgaagacccactcgtacccgacgtctcctacggccccagctccacagccaccgtccacatcactgtcctggatgtcaacgagggcccagtcttctacccagaccccatgatggtgaccaggcaggaggacctctctgtgggcagcgtgctgctgacagtgaatgccacggaccccgactccctgcagcatcaaaccatcaggtattctgtttacaaggacccagcaggttggctgaatattaaccccatcaatgggactgttgacaccacagctgtgctggaccgtgagtccccatttgtcgacaacagcgtgtacactgctctcttcctggcaattgacagtggcaaccctcccgctacgggcactgggactttgctgataaccctggaggacgtgaatgacaatgccccgttcatttaccccacagtagctgaagtctgtgatgatgccaaaaacctcagtgtagtcattttgggagcatcagataaggatcttcacccgaatacagatcctttcaaatttgaaatccacaaacaagctgttcctgataaagtctggaagatctccaagatcaacaatacacacgccctggtaagccttcttcaaaatctgaacaaagcaaactacaacctgcccatcatggtgacagattcagggaaaccacccatgacgaatatcacagatctcagggtacaagtgtgctcctgcaggaattccaaagtggactgcaacgcggcaggggccctgcgcttcagcctgccctcagtcctgctcctcagcctcttcagcttagcttgtaag

SEQ ID NO: 669 - DNA, 2139 bp, Homo sapiens
  source 1..2139: mol_type = genomic DNA
atgcagccgagaactccgctcgttctgtgcgttctcctgtcccaggtgctgctgctaacatctgcagaagatttggactgcactcctggatttcagcagaaagtgttccatatcaatcagccagctgaattcattgaggaccagtcaattctaaacttgaccttcagtgactgtaagggaaacgacaagctacgctatgaggtctcgagcccatacttcaaggtgaacagcgatggcggcttagttgctctgagaaacataactgcagtgggcaaaactctgttcgtccatgcacggaccccccatgcggaagatatggcagaactcgtgattgtcggggggaaagacatccagggctccttgcaggatatatttaaatttgcaagaacttctcctgtcccaagacaaaagaggtccattgtggtatctcccattttaattccagagaatcagagacagcctttcccaagagatgttggcaaggtagtcgatagtgacaggccagaaaggtccaagttccggctcactggaaagggagtggatcaagagcctaaaggaattttcagaatcaatgagaacacagggagcgtctccgtgacacggaccttggacagagaagtaatcgctgtttatcaactatttgtggagaccactgatgtcaatggcaaaactctcgaggggccggtgcctctggaagtcattgtgattgatcagaatgacaaccgaccgatctttcgggaaggcccctacatcggccacgtcatggaagggtcacccacaggcaccacagtgatgcggatgacagcctttgatgcagatgacccagccaccgataatgccctcctgcggtataatatccgtcagcagacgcctgacaagccatctcccaacatgttctacatcgatcctgagaaaggagacattgtcactgttgtgtcacctgcgctgctggaccgagagactctggaaaatcccaagtatgaactgatcatcgaggctcaagatatggctggactggatgttggattaacaggcacggccacagccacgatcatgatcgatgacaaaaatgatcactcaccaaaattcaccaagaaagagtttcaagccacagtcgaggaaggagctgtgggagttattgtcaatttgacagttgaagataaggatgaccccaccacaggtgcatggagggctgcctacaccatcatcaacggaaaccccgggcagagctttgaaatccacaccaaccctcaaaccaacgaagggatgctttctgttgtcaaaccattggactatgaaatttctgccttccacaccctgctgatcaaagtggaaaatgaagacccactcgtacccgacgtctcctacggccccagctccacagccaccgtccacatcactgtcctggatgtcaacgagggcccagtcttctacccagaccccatgatggtgaccaggcaggaggacctctctgtgggcagcgtgctgctgacagtgaatgccacggaccccgactccctgcagcatcaaaccatcaggtattctgtttacaaggacccagcaggttggctgaatattaaccccatcaatgggactgttgacaccacagctgtgctggaccgtgagtccccatttgtcgacaacagcgtgtacactgctctcttcctggcaattgacagtggcaaccctcccgctacgggcactgggactttgctgataaccctggaggacgtgaatgacaatgccccgttcatttaccccacagtagctgaagtctgtgatgatgccaaaaacctcagtgtagtcattttgggagcatcagataaggatcttcacccgaatacagatcctttcaaatttgaaatccacaaacaagctgttcctgataaagtctggaagatctccaagatcaacaatacacacgccctggtaagccttcttcaaaatctgaacaaagcaaactacaacctgcccatcatggtgacagattcagggaaaccacccatgacgaatatcacagatctcagggtacaagtgtgctcctgcaggaattccaaagtggactgcaacgcggcaggggccctgcgcttcagcctgccctcagtcctgctcctcagcctcttcagcttagcttgtaag

SEQ ID NO: 670 - DNA, 573 bp, Homo sapiens
  source 1..573: mol_type = genomic DNA
atgcagccgagaactccgctcgttctgtgcgttctcctgtcccaggtgctgctgctaacatctgcagaagatttggactgcactcctggatttcagcagaaagtgttccatatcaatcagccagctgaattcattgaggaccagtcaattctaaacttgaccttcagtgactgtaagggaaacgacaagctacgctatgaggtctcgagcccatacttcaaggtgaacagcgatggcggcttagttgctctgagaaacataactgcagtgggcaaaactctgttcgtccatgcacggaccccccatgcggaagatatggcagaactcgtgattgtcggggggaaagacatccagggctccttgcaggatatatttaaatttgcaagaacttctcctgtcccaagacaaaagaggtccattgtggtatctcccattttaattccagagaatcagagacagcctttcccaagagatgttggcaagagaacccacaatcctattaacagcgaacttctcttgaatgaaggcattacagcagatttaaatccatgcattacaattttagcaatttaa

SEQ ID NO: 671 - DNA, 528 bp, Homo sapiens
  source 1..528: mol_type = genomic DNA
atgcagccgagaactccgctcgttctgtgcgttctcctgtcccaggtgctgctgctaacatctgcagaagatttggactgcactcctggatttcagcagaaagtgttccatatcaatcagccagctgaattcattgaggaccagtcaattctaaacttgaccttcagtgactgtaagggaaacgacaagctacgctatgaggtctcgagcccatacttcaaggtgaacagcgatggcggcttagttgctctgagaaacataactgcagtgggcaaaactctgttcgtccatgcacggaccccccatgcggaagatatggcagaactcgtgattgtcggggggaaagacatccagggctccttgcaggatatatttaaatttgcaagaacttctcctgtcccaagacaaaagaggtccattgtggtatctcccattttaattccagagaatcagagacagcctttcccaagagatgttggcaagatgaagatttggcaagttctgtgcctagcacgatggctgacatga

SEQ ID NO: 672 - DNA, 2022 bp, Homo sapiens
  source 1..2022: mol_type = genomic DNA
atgcagccgagaactccgctcgttctgtgcgttctcctgtcccaggtgctgctgctaacatctgcagaagatttggactgcactcctggatttcagcagaaagtgttccatatcaatcagccagctgaattcattgaggaccagtcaattctaaacttgaccttcagtgactgtaagggaaacgacaagctacgctatgaggtctcgagcccatacttcaaggtgaacagcgatggcggcttagttgctctgagaaacataactgcagtgggcaaaactctgttcgtccatgcacggaccccccatgcggaagatatggcagaactcgtgattgtcggggggaaagacatccagggctccttgcaggtagtcgatagtgacaggccagaaaggtccaagttccggctcactggaaagggagtggatcaagagcctaaaggaattttcagaatcaatgagaacacagggagcgtctccgtgacacggaccttggacagagaagtaatcgctgtttatcaactatttgtggagaccactgatgtcaatggcaaaactctcgaggggccggtgcctctggaagtcattgtgattgatcagaatgacaaccgaccgatctttcgggaaggcccctacatcggccacgtcatggaagggtcacccacaggcaccacagtgatgcggatgacagcctttgatgcagatgacccagccaccgataatgccctcctgcggtataatatccgtcagcagacgcctgacaagccatctcccaacatgttctacatcgatcctgagaaaggagacattgtcactgttgtgtcacctgcgctgctggaccgagagactctggaaaatcccaagtatgaactgatcatcgaggctcaagatatggctggactggatgttggattaacaggcacggccacagccacgatcatgatcgatgacaaaaatgatcactcaccaaaattcaccaagaaagagtttcaagccacagtcgaggaaggagctgtgggagttattgtcaatttgacagttgaagataaggatgaccccaccacaggtgcatggagggctgcctacaccatcatcaacggaaaccccgggcagagctttgaaatccacaccaaccctcaaaccaacgaagggatgctttctgttgtcaaaccattggactatgaaatttctgccttccacaccctgctgatcaaagtggaaaatgaagacccactcgtacccgacgtctcctacggccccagctccacagccaccgtccacatcactgtcctggatgtcaacgagggcccagtcttctacccagaccccatgatggtgaccaggcaggaggacctctctgtgggcagcgtgctgctgacagtgaatgccacggaccccgactccctgcagcatcaaaccatcaggtattctgtttacaaggacccagcaggttggctgaatattaaccccatcaatgggactgttgacaccacagctgtgctggaccgtgagtccccatttgtcgacaacagcgtgtacactgctctcttcctggcaattgacagtggcaaccctcccgctacgggcactgggactttgctgataaccctggaggacgtgaatgacaatgccccgttcatttaccccacagtagctgaagtctgtgatgatgccaaaaacctcagtgtagtcattttgggagcatcagataaggatcttcacccgaatacagatcctttcaaatttgaaatccacaaacaagctgttcctgataaagtctggaagatctccaagatcaacaatacacacgccctggtaagccttcttcaaaatctgaacaaagcaaactacaacctgcccatcatggtgacagattcagggaaaccacccatgacgaatatcacagatctcagggtacaagtgtgctcctgcaggaattccaaagtggactgcaacgcggcaggggccctgcgcttcagcctgccctcagtcctgctcctcagcctcttcagcttagcttgtaag

SEQ ID NO: 673 - DNA, 1245 bp, Homo sapiens
  source 1..1245: mol_type = genomic DNA
atgcagccgagaactccgctcgttctgtgcgttctcctgtcccaggtagcgctgctggaccgagagactctggaaaatcccaagtatgaactgatcatcgaggctcaagatatggctggactggatgttggattaacaggcacggccacagccacgatcatgatcgatgacaaaaatgatcactcaccaaaattcaccaagaaagagtttcaagccacagtcgaggaaggagctgtgggagttattgtcaatttgacagttgaagataaggatgaccccaccacaggtgcatggagggctgcctacaccatcatcaacggaaaccccgggcagagctttgaaatccacaccaaccctcaaaccaacgaagggatgctttctgttgtcaaaccattggactatgaaatttctgccttccacaccctgctgatcaaagtggaaaatgaagacccactcgtacccgacgtctcctacggccccagctccacagccaccgtccacatcactgtcctggatgtcaacgagggcccagtcttctacccagaccccatgatggtgaccaggcaggaggacctctctgtgggcagcgtgctgctgacagtgaatgccacggaccccgactccctgcagcatcaaaccatcaggtattctgtttacaaggacccagcaggttggctgaatattaaccccatcaatgggactgttgacaccacagctgtgctggaccgtgagtccccatttgtcgacaacagcgtgtacactgctctcttcctggcaattgacagtggcaaccctcccgctacgggcactgggactttgctgataaccctggaggacgtgaatgacaatgccccgttcatttaccccacagtagctgaagtctgtgatgatgccaaaaacctcagtgtagtcattttgggagcatcagataaggatcttcacccgaatacagatcctttcaaatttgaaatccacaaacaagctgttcctgataaagtctggaagatctccaagatcaacaatacacacgccctggtaagccttcttcaaaatctgaacaaagcaaactacaacctgcccatcatggtgacagattcagggaaaccacccatgacgaatatcacagatctcagggtacaagtgtgctcctgcaggaattccaaagtggactgcaacgcggcaggggccctgcgcttcagcctgccctcagtcctgctcctcagcctcttcagcttagcttgtaag

SEQ ID NO: 674 - DNA, 816 bp, Homo sapiens
  source 1..816: mol_type = genomic DNA
atgcagccgagaactccgctcgttctgtgcgttctcctgtcccaggtgctgctgctaacatctgcagaagatttggactgcactcctggatttcagcagaaagtgttccatatcaatcagccagctgaattcattgaggaggacctctctgtgggcagcgtgctgctgacagtgaatgccacggaccccgactccctgcagcatcaaaccatcaggtattctgtttacaaggacccagcaggttggctgaatattaaccccatcaatgggactgttgacaccacagctgtgctggaccgtgagtccccatttgtcgacaacagcgtgtacactgctctcttcctggcaattgacagtggcaaccctcccgctacgggcactgggactttgctgataaccctggaggacgtgaatgacaatgccccgttcatttaccccacagtagctgaagtctgtgatgatgccaaaaacctcagtgtagtcattttgggagcatcagataaggatcttcacccgaatacagatcctttcaaatttgaaatccacaaacaagctgttcctgataaagtctggaagatctccaagatcaacaatacacacgccctggtaagccttcttcaaaatctgaacaaagcaaactacaacctgcccatcatggtgacagattcagggaaaccacccatgacgaatatcacagatctcagggtacaagtgtgctcctgcaggaattccaaagtggactgcaacgcggcaggggccctgcgcttcagcctgccctcagtcctgctcctcagcctcttcagcttagcttgtaag

SEQ ID NO: 675 - DNA, 1751 bp, Homo sapiens
  source 1..1751: mol_type = genomic DNA
gttgtgtcacctgcgctgctggaccgagagactctggaaaatcccaagtatgaactgatcatcgaggctcaagatatggctggactggatgttggattaacaggcacggccacagccacgatcatgatcgatgacaaaaatgatcactcaccaaaattcaccaagaaagagtttcaagccacagtcgaggaaggagctgtgggagttattgtcaatttgacagttgaagataaggatgaccccaccacaggtgcatggagggctgcctacaccatcatcaacggaaaccccgggcagagctttgaaatccacaccaaccctcaaaccaacgaagggatgctttctgttgtcaaaccattggactatgaaatttctgccttccacaccctgctgatcaaagtggaaaatgaagacccactcgtacccgacgtctcctacggccccagctccacagccaccgtccacatcactgtcctggatgtcaacgagggcccagtcttctacccagaccccatgatggtgaccaggcaggaggacctctctgtgggcagcgtgctgctgacagtgaatgccacggaccccgactccctgcagcatcaaaccatcaggtattctgtttacaaggacccagcaggttggctgaatattaaccccatcaatgggactgttgacaccacagctgtgctggaccgtgagtccccatttgtcgacaacagcgtgtacactgctctcttcctggcaattgacagtggcaaccctcccgctacgggcactgggactttgctgataaccctggaggacgtgaatgacaatgccccgttcatttaccccacagtagctgaagtctgtgatgatgccaaaaacctcagtgtagtcattttgggagcatcagataaggatcttcacccgaatacagatcctttcaaatttgaaatccacaaacaagctgttcctgataaagtctggaagatctccaagatcaacaatacacacgccctggtaagccttcttcaaaatctgaacaaagcaaactacaacctgcccatcatggtgacagattcagggaaaccacccatgacgaatatcacagatctcagggtacaagtgtgctcctgcaggaattccaaagtggactgcaacgcggcaggggccctgcgcttcagcctgccctcagtcctgctcctcagcctcttcagcttagcttgtctgtgagaactcctgacgtctgaagcttgactcccaagtttccatagcaacaggaaaaaaaaaaatctatccaaatctgaagattgcggtttacagctatcgaacttcacaactaggcctcaattgttccggttttttattttctttacaatttcacttagtctgtacttcatcattttgacagcatcttcctccctcctttaattaatggaatcttctgaattttccctgaatgtttaaagatcatgacatatgacttgatcttctgggagcaggaacaatgactactttttctggtgtgttaacatgtcgctagccagtgctccaggcacccagctttgtctgtgggttagtattggtgtatgtatgagtatctgtatgtatatatacacggtatttatagagagagactatcctggagaagcctcgttttgatgccattcttccttgcaaggttaagcaaggtgggtggaaactaagacacctgaaccctccagggcctcccgcatcaaggtcagcatgaggacagaccacagagctgtcac

SEQ ID NO: 676 - DNA, 4332 bp, Homo sapiens
  source 1..4332: mol_type = genomic DNA
cctccaccggccaaggtccccgccgctgcatccctcgcggcttccgctgcgctccgggccggagccgagccgcctgcgctgccacagcagccgcctccacacactcgcagacgctcacacgctctccctccctgttcccccgccccctccccagctccttgatctctgggtctgttttattactcctggtgcgagtcccgcggactccgcggcccgctatttgtcatcagctcgctctccattggcggggagcggagagcagcgaagaagggggtggggaggggaggggaagggaagggggtggaaactgcctggagccgtttctccgcgccgctgttggtgctgccgctgcctcctcctcctccgccgccgccgccgccgccgccgcctcctccggctcttcgctcggcccctctccgcctccatgtgccggatagcgggagcgctgcggaccctgctgccgctgctggcggccctgcttcaggcgtctgtagaggcttctggtgaaatcgcattatgcaagactggatttcctgaagatgtttacagtgcagtcttatcgaaggatgtgcatgaaggacagcctcttctcaatgtgaagtttagcaactgcaatggaaaaagaaaagtacaatatgagagcagtgagcctgcagattttaaggtggatgaagatggcatggtgtatgccgtgagaagctttccactctcttctgagcatgccaagttcctgatatatgcccaagacaaagagacccaggaaaagtggcaagtggcagtaaaattgagcctgaagccaaccttaactgaggagtcagtgaaggagtcagcagaagttgaagaaatagtgttcccaagacaattcagtaagcacagtggccacctacaaaggcagaagagagactgggtcatccctccaatcaacttgccagaaaactccaggggaccttttcctcaagagcttgtcaggatcaggtctgatagagataaaaacctttcactgcggtacagtgtaactgggccaggagctgaccagcctccaactggtatcttcattatcaaccccatctcgggtcagctgtcggtgacaaagcccctggatcgcgagcagatagcccggtttcatttgagggcacatgcagtagatattaatggaaatcaagtggagaaccccattgacattgtcatcaatgttattgacatgaatgacaacagacctgagttcttacaccaggtttggaatgggacagttcctgagggatcaaagcctggaacatatgtgatgaccgtaacagcaattgatgctgacgatcccaatgccctcaatgggatgttgaggtacagaatcgtgtctcaggctccaagcaccccttcacccaacatgtttacaatcaacaatgagactggtgacatcatcacagtggcagctggacttgatcgagaaaaagtgcaacagtatacgttaataattcaagctacagacatggaaggcaatcccacatatggcctttcaaacacagccacggccgtcatcacagtgacagatgtcaatgacaatcctccagagtttactgccatgacgttttatggtgaagttcctgagaacagggtagacatcatagtagctaatctaactgtgaccgataaggatcaaccccatacaccagcctggaacgcagtgtacagaatcagtggcggagatcctactggacggttcgccatccagaccgacccaaacagcaacgacgggttagtcaccgtggtcaaaccaatcgactttgaaacaaataggatgtttgtccttactgttgctgcagaaaatcaagtgccattagccaagggaattcagcacccccctcagtcaactgcaaccgtgtctgttacagttattgacgtaaatgaaaacccttattttgcccccaatcctaagatcattcgccaagaagaagggcttcatgccggtaccatgttgacaacattcactgctcaggacccagatcgatatatgcagcaaaatattagatacactaaattatctgatcctgccaattggctaaaaatagatcctgtgaatggacaaataactacaattgctgttttggaccgagaatcaccaaatgtgaaaaacaatatatataatgctactttccttgcttctgacaatggaattcctcctatgagtggaacaggaacgctgcagatctatttacttgatattaatgacaatgcccctcaagtgttacctcaagaggcagagacttgcgaaactccagaccccaattcaattaatattacagcacttgattatgacattgatccaaatgctggaccatttgcttttgatcttcctttatctccagtgactattaagagaaattggaccatcactcggcttaatggtgattttgctcagcttaatttaaagataaaatttcttgaagctggtatctatgaagttcccatcataatcacagattcgggtaatcctcccaaatcaaatatttccatcctgcgtgtgaaggtttgccagtgtgactccaacggggactgcacagatgtggacaggattgtgggtgcggggcttggcaccggtgccatcattgccatcctgctctgcatcatcatcctgcttatccttgtgctgatgtttgtggtatggatgaaacgccgggataaagaacgccaggccaaacaacttttaattgatccagaagatgatgtaagagataatattttaaaatatgatgaagaaggtggaggagaagaagaccaggactatgacttgagccagctgcagcagcctgacactgtggagcctgatgccatcaagcctgtgggaatccgacgaatggatgaaagacccatccacgccgagccccagtatccggtccgatctgcagccccacaccctggagacattggggacttcattaatgagggccttaaagcggctgacaatgaccccacagctccaccatatgactccctgttagtgtttgactatgaaggcagtggctccactgctgggtccttgagctcccttaattcctcaagtagtggtggtgagcaggactatgattacctgaacgactgggggccacggttcaagaaacttgctgacatgtatggtggaggtgatgactgaacttcagggtgaacttggtttttggacaagtacaaacaatttcaactgatattcccaaaaagcattcagaagctaggctttaactttgtagtctactagcacagtgcttgctggaggctttggcataggctgcaaaccaatttgggctcagagggaatatcagtgatccatactgtttggaaaaacactgagctcagttacacttgaattttacagtacagaagcactgggattttatgtgcctttttgtacctttttcagattggaattagttttctgtttaaggctttaatggtactgatttctgaaacgataagtaaaagacaaaatattttgtggtgggagcagtaagttaaaccatgatatgcttcaacacgcttttgttacattgcatttgcttttattaaaatacaaaattaaacaaacaaaaaaactcatggagcgattttattatcttgggggatgagaccatgagattggaaaatgtacattacttctagttttagactttagtttgtttttttttttttcactaaaatcttaaaacttactcagctggttgcaaataaagggagttttcatatcaccaatttgtagcaaaattgaattttttcataaactagaatgttagacacattttggtcttaatccatgtacacttttttatttctgtatttttccacttcactgtaaaaatagtatgtgtacataatgttttattggcatagtctatggagaagtgcagaaacttcagaacatgtgtatgtattatttggactatggattcaggttttttgcatgtttatatctttcgttatggataaagtatttacaaaacagtgacatttgattcaattgttgagctgtagttagaatactcaatttttaatttttttaatttttttattttttattttctttttggtttggggagggagaaaagttcttagcacaaatgttttacataatttgtaccaaaaaaaaaaaaaaaggaaaggaaagaaaggggtggcctgacactggtggcactactaagtgtgtgtttttttaaaaaaaaaatggaaaaaaaaaagcttttaaactggagagacttctgacaacagctttgcctctgtattgtgtaccagaatataaatgatacacctctgaccccagcgttctgaataaaatgctaattttggatctgg

SEQ ID NO: 677 - DNA, 3737 bp, Homo sapiens
  source 1..3737: mol_type = genomic DNA
aagcagaaggaattatgggaaatggaaacttgatggcatgtttttattaaggcgttatgtgtgtatcttcactgagaaattaaagaaccaagcagaattgtatgttttcctttcagtgaagtttagcaactgcaatggaaaaagaaaagtacaatatgagagcagtgagcctgcagattttaaggtggatgaagatggcatggtgtatgccgtgagaagctttccactctcttctgagcatgccaagttcctgatatatgcccaagacaaagagacccaggaaaagtggcaagtggcagtaaaattgagcctgaagccaaccttaactgaggagtcagtgaaggagtcagcagaagttgaagaaatagtgttcccaagacaattcagtaagcacagtggccacctacaaaggcagaagagagactgggtcatccctccaatcaacttgccagaaaactccaggggaccttttcctcaagagcttgtcaggatcaggtctgatagagataaaaacctttcactgcggtacagtgtaactgggccaggagctgaccagcctccaactggtatcttcattatcaaccccatctcgggtcagctgtcggtgacaaagcccctggatcgcgagcagatagcccggtttcatttgagggcacatgcagtagatattaatggaaatcaagtggagaaccccattgacattgtcatcaatgttattgacatgaatgacaacagacctgagttcttacaccaggtttggaatgggacagttcctgagggatcaaagcctggaacatatgtgatgaccgtaacagcaattgatgctgacgatcccaatgccctcaatgggatgttgaggtacagaatcgtgtctcaggctccaagcaccccttcacccaacatgtttacaatcaacaatgagactggtgacatcatcacagtggcagctggacttgatcgagaaaaagtgcaacagtatacgttaataattcaagctacagacatggaaggcaatcccacatatggcctttcaaacacagccacggccgtcatcacagtgacagatgtcaatgacaatcctccagagtttactgccatgacgttttatggtgaagttcctgagaacagggtagacatcatagtagctaatctaactgtgaccgataaggatcaaccccatacaccagcctggaacgcagtgtacagaatcagtggcggagatcctactggacggttcgccatccagaccgacccaaacagcaacgacgggttagtcaccgtggtcaaaccaatcgactttgaaacaaataggatgtttgtccttactgttgctgcagaaaatcaagtgccattagccaagggaattcagcacccccctcagtcaactgcaaccgtgtctgttacagttattgacgtaaatgaaaacccttattttgcccccaatcctaagatcattcgccaagaagaagggcttcatgccggtaccatgttgacaacattcactgctcaggacccagatcgatatatgcagcaaaatattagatacactaaattatctgatcctgccaattggctaaaaatagatcctgtgaatggacaaataactacaattgctgttttggaccgagaatcaccaaatgtgaaaaacaatatatataatgctactttccttgcttctgacaatggaattcctcctatgagtggaacaggaacgctgcagatctatttacttgatattaatgacaatgcccctcaagtgttacctcaagaggcagagacttgcgaaactccagaccccaattcaattaatattacagcacttgattatgacattgatccaaatgctggaccatttgcttttgatcttcctttatctccagtgactattaagagaaattggaccatcactcggcttaatggtgattttgctcagcttaatttaaagataaaatttcttgaagctggtatctatgaagttcccatcataatcacagattcgggtaatcctcccaaatcaaatatttccatcctgcgtgtgaaggtttgccagtgtgactccaacggggactgcacagatgtggacaggattgtgggtgcggggcttggcaccggtgccatcattgccatcctgctctgcatcatcatcctgcttatccttgtgctgatgtttgtggtatggatgaaacgccgggataaagaacgccaggccaaacaacttttaattgatccagaagatgatgtaagagataatattttaaaatatgatgaagaaggtggaggagaagaagaccaggactatgacttgagccagctgcagcagcctgacactgtggagcctgatgccatcaagcctgtgggaatccgacgaatggatgaaagacccatccacgccgagccccagtatccggtccgatctgcagccccacaccctggagacattggggacttcattaatgagggccttaaagcggctgacaatgaccccacagctccaccatatgactccctgttagtgtttgactatgaaggcagtggctccactgctgggtccttgagctcccttaattcctcaagtagtggtggtgagcaggactatgattacctgaacgactgggggccacggttcaagaaacttgctgacatgtatggtggaggtgatgactgaacttcagggtgaacttggtttttggacaagtacaaacaatttcaactgatattcccaaaaagcattcagaagctaggctttaactttgtagtctactagcacagtgcttgctggaggctttggcataggctgcaaaccaatttgggctcagagggaatatcagtgatccatactgtttggaaaaacactgagctcagttacacttgaattttacagtacagaagcactgggattttatgtgcctttttgtacctttttcagattggaattagttttctgtttaaggctttaatggtactgatttctgaaacgataagtaaaagacaaaatattttgtggtgggagcagtaagttaaaccatgatatgcttcaacacgcttttgttacattgcatttgcttttattaaaatacaaaattaaacaaacaaaaaaactcatggagcgattttattatcttgggggatgagaccatgagattggaaaatgtacattacttctagttttagactttagtttgtttttttttttttcactaaaatcttaaaacttactcagctggttgcaaataaagggagttttcatatcaccaatttgtagcaaaattgaattttttcataaactagaatgttagacacattttggtcttaatccatgtacacttttttatttctgtatttttccacttcactgtaaaaatagtatgtgtacataatgttttattggcatagtctatggagaagtgcagaaacttcagaacatgtgtatgtattatttggactatggattcaggttttttgcatgtttatatctttcgttatggataaagtatttacaaaacagtgacatttgattcaattgttgagctgtagttagaatactcaatttttaatttttttaatttttttattttttattttctttttggtttggggagggagaaaagttcttagcacaaatgttttacataatttgtaccaaaaaaaaaaaaaaaggaaaggaaagaaaggggtggcctgacactggtggcactactaagtgtgtgtttttttaaaaaaaaaatggaaaaaaaaaa

SEQ ID NO: 678 - DNA, 4117 bp, Homo sapiens
  source 1..4117: mol_type = genomic DNA
ctcgccagcggggtgtggctcccctccaaagacggtcggctgacaggctccacagagctccactcacgctcagccctggacggacaggcagtccaacggaacagaaacatccctcagcccacaggcacgatctgttcctcctgggaagatgcagaggctcatgatgctcctcgccacatcgggcgcctgcctgggcctgctggcagtggcagcagtggcagcagcaggtgctaaccctgcccaacgggacacccacagcctgctgcccacccaccggcgccaaaagagagattggatttggaaccagatgcacattgatgaagagaaaaacacctcacttccccatcatgtaggcaagatcaagtcaagcgtgagtcgcaagaatgccaagtacctgctcaaaggagaatatgtgggcaaggtcttccgggtcgatgcagagacaggagacgtgttcgccattgagaggctggaccgggagaatatctcagagtaccacctcactgctgtcattgtggacaaggacactggcgaaaacctggagactccttccagcttcaccatcaaagttcatgacgtgaacgacaactggcctgtgttcacgcatcggttgttcaatgcgtccgtgcctgagtcgtcggctgtggggacctcagtcatctctgtgacagcagtggatgcagacgaccccactgtgggagaccacgcctctgtcatgtaccaaatcctgaaggggaaagagtattttgccatcgataattctggacgtattatcacaataacgaaaagcttggaccgagagaagcaggccaggtatgagatcgtggtggaagcgcgagatgcccagggcctccggggggactcgggcacggccaccgtgctggtcactctgcaagacatcaatgacaacttccccttcttcacccagaccaagtacacatttgtcgtgcctgaagacacccgtgtgggcacctctgtgggctctctgtttgttgaggacccagatgagccccagaaccggatgaccaagtacagcatcttgcggggcgactaccaggacgctttcaccattgagacaaaccccgcccacaacgagggcatcatcaagcccatgaagcctctggattatgaatacatccagcaatacagcttcatcgtcgaggccacagaccccaccatcgacctccgatacatgagccctcccgcgggaaacagagcccaggtcattatcaacatcacagatgtggacgagccccccattttccagcagcctttctaccacttccagctgaaggaaaaccagaagaagcctctgattggcacagtgctggccatggaccctgatgcggctaggcatagcattggatactccatccgcaggaccagtgacaagggccagttcttccgagtcacaaaaaagggggacatttacaatgagaaagaactggacagagaagtctacccctggtataacctgactgtggaggccaaagaactggattccactggaacccccacaggaaaagaatccattgtgcaagtccacattgaagttttggatgagaatgacaatgccccggagtttgccaagccctaccagcccaaagtgtgtgagaacgctgtccatggccagctggtcctgcagatctccgcaatagacaaggacataacaccacgaaacgtgaagttcaaattcatcttgaatactgagaacaactttaccctcacggataatcacgataacacggccaacatcacagtcaagtatgggcagtttgaccgggagcataccaaggtccacttcctacccgtggtcatctcagacaatgggatgccaagtcgcacgggcaccagcacgctgaccgtggccgtgtgcaagtgcaacgagcagggcgagttcaccttctgcgaggatatggccgcccaggtgggcgtgagcatccaggcagtggtagccatcttactctgcatcctcaccatcacagtgatcaccctgctcatcttcctgcggcggcggctccggaagcaggcccgcgcgcacggcaagagcgtgccggagatccacgagcagctggtcacctacgacgaggagggcggcggcgagatggacaccaccagctacgatgtgtcggtgctcaactcggtgcgccgcggcggggccaagcccccgcggcccgcgctggacgcccggccttccctctatgcgcaggtgcagaagccaccgaggcacgcgcctggggcacacggagggcccggggagatggcagccatgatcgaggtgaagaaggacgaggcggaccacgacggcgacggccccccctacgacacgctgcacatctacggctacgagggctccgagtccatagccgagtccctcagctccctgggcaccgactcatccgactctgacgtggattacgacttccttaacgactggggacccaggtttaagatgctggctgagctgtacggctcggacccccgggaggagctgctgtattaggcggccgaggtcactctgggcctggggacccaaaccccctgcagcccaggccagtcagacgccaggcaccacagcctccaaaaatggcagtgactccccagcccagcaccccttcctcgtgggtcccagagacctcatcagccttgggatagcaaactccaggttcctgaaatatccaggaatatatgtcagtgatgactattctcaaatgctggcaaatccaggctggtgttctgtctgggctcagacatccacataaccctgtcacccacagaccgccgtctaactcaaagacttcctctggctccccaaggctgcaaagcaaaacagactgtgtttaactgctgcagggtctttttctagggtccctgaacgccctggtaaggctggtgaggtcctggtgcctatctgcctggaggcaaaggcctggacagcttgacttgtggggcaggattctctgcagcccattcccaagggagactgaccatcatgccctctctcgggagccctagccctgctccaactccatactccactccaagtgccccaccactccccaacccctctccaggcctgtcaagagggaggaaggggccccatggcagctcctgaccttgggtcctgaagtgacctcactggcctgccatgccagtaactgtgctgtactgagcactgaaccacattcagggaaatggcttattaaactttgaagcaactgtgaattcattctggaggggcagtggagatcaggagtgacagatcacagggtgagggccacctccacacccaccccctctggagaaggcctggaagagctgagaccttgctttgagactcctcagcacccctccagttttgcctgagaaggggcagatgttcccggagcagaagacgtctccccttctctgcctcacctggtcgccaatccatgctctctttcttttctctgtctactccttatcccttggtttagaggaacccaagatgtggcctttagcaaaactggacaatgtccaaacccactcatgactgcatgacggagccgagccatgtgtctttacacctcgctgttgtcacatctcagggaactgaccctcaggcacaccttgcagaaggcaaggccctgccctgcccaacctctgtggtcacccatgcatcttccactggaacgtttcactgcaaacacaccttggagaagtggcatcagtcaacagagaggggcagggaaggagacaccaagctcacccttcgtcatggaccgaggttcccactctgggcaaagcccctcacactgcaagggattgtagataacactgacttgtttgttttaaccaataactagcttcttataatgatttttttactaatgatacttacaagtttctagctctcacagacatatagaataagggtttttgcataataagcaggttgttatttaggttaacaatattaattcaggttttttagttggaaaaacaattcctgtaaccttctattttctataattgtagtaattgctctacagataatgtctatatattggccaaactggtgcatgacaagtactgtatttttttatacctaaataaagaaaaatctttagcctgggca

SEQ ID NO: 679 - DNA, 2464 bp, Homo sapiens
  source 1..2464: mol_type = genomic DNA
gcagtccaacggaacagaaacatccctcagcccacaggcacgatctgttcctcctgggaagatgcagaggctcatgatgctcctcgccacatcgggcgcctgcctgggcctgctggcagtggcagcagtggcagcagcaggtgctaaccctgcccaacgggacacccacagcctgctgcccacccaccggcgccaaaagagagattggatttggaaccagatgcacattgatgaagagaaaaacacctcacttccccatcatgtaggcaagatcaagtcaagcgtgagtcgcaagaatgccaagtacctgctcaaaggagaatatgtgggcaaggtcttccgggtcgatgcagagacaggagacgtgttcgccattgagaggctggaccgggagaatatctcagagtaccacctcactgctgtcattgtggacaaggacactggcgaaaacctggagactccttccagcttcaccatcaaagttcatgacgtgaacgacaactggcctgtgttcacgcatcggttgttcaatgcgtccgtgcctgagtcgtcggctgtggggacctcagtcatctctgtgacagcagtggatgcagacgaccccactgtgggagaccacgcctctgtcatgtaccaaatcctgaaggggaaagagtattttgccatcgataattctggacgtattatcacaataacgaaaagcttggaccgagagaagcaggccaggtatgagatcgtggtggaagcgcgagatgcccagggcctccggggggactcgggcacggccaccgtgctggtcactctgcaagacatcaatgacaacttccccttcttcacccagaccaagtacacatttgtcgtgcctgaagacacccgtgtgggcacctctgtgggctctctgtttgttgaggacccagatgagccccagaaccggatgaccaagtacagcatcttgcggggcgactaccaggacgctttcaccattgagacaaaccccgcccacaacgagggcatcatcaagcccatgaagcctctggattatgaatacatccagcaatacagcttcatcgtcgaggccacagaccccaccatcgacctccgatacatgagccctcccgcgggaaacagagcccaggtcattatcaacatcacagatgtggacgagccccccattttccagcagcctttctaccacttccagctggtcctgcagatctccgcaatagacaaggacataacaccacgaaacgtgaagttcaaattcatcttgaatactgagaacaactttaccctcacggataatcacgataacacggccaacatcacagtcaagtatgggcagtttgaccgggagcataccaaggtccacttcctacccgtggtcatctcagacaatgggatgccaagtcgcacgggcaccagcacgctgaccgtggccgtgtgcaagtgcaacgagcagggcgagttcaccttctgcgaggatatggccgcccaggtgggcgtgagcatccaggcagtggtagccatcttactctgcatcctcaccatcacagtgatcaccctgctcatcttcctgcggcggcggctccggaagcaggcccgcgcgcacggcaagagcgtgccggagatccacgagcagctggtcacctacgacgaggagggcggcggcgagatggacaccaccagctacgatgtgtcggtgctcaactcggtgcgccgcggcggggccaagcccccgcggcccgcgctggacgcccggccttccctctatgcgcaggtgcagaagccaccgaggcacgcgcctggggcacacggagggcccggggagatggcagccatgatcgaggtgaagaaggacgaggcggaccacgacggcgacggccccccctacgacacgctgcacatctacggctacgagggctccgagtccatagccgagtccctcagctccctgggcaccgactcatccgactctgacgtggattacgacttccttaacgactggggacccaggtttaagatgctggctgagctgtacggctcggacccccgggaggagctgctgtattaggcggccgaggtcactctgggcctggggacccaaaccccctgcagcccaggccagtcagacgccaggcaccacagcctccaaaaatggcagtgactccccagcccagcaccccttcctcgtgggtcccagagacctcatcagccttgggatagcaaactccaggttcctgaaatatccaggaatatatgtcagtgatgactattctcaaatgctggcaaatccaggctggtgttctgtctgggctcagacatccacataaccctgtcacccacagaccgccgtctaactcaaagacttcctctggctccccaaggctgcaaagcaaaacagactgtgtttaactgctgcagggtctttttctagggtccctgaacgccctggtaaggctggtga

SEQ ID NO: 680 - DNA, 1672 bp, Homo sapiens
  source 1..1672: mol_type = genomic DNA
ataatgtgtagactcaagcctttcttcagatcaggaaacttttcttttctttttttttttttttttttttgttatttcttctgttctgtttgttctgggattttcctcattaatagcaactattattcctatatacacaaaacatatatatttatctttccatagatttttcctgatttctgaaagaactttttaagttttttatttcacaaagttaatttctttgtaattacttcttatctcttccagctctttttgtattccttcctggctcttgcccaatgatcttttcattaatcactaaaacaagtcccagctatggtgtgatgtcacctgttcagctctgaaagtgcatctgatggtctcagatactccatccgcaggaccagtgacaagggccagttcttccgagtcacaaaaaagggggacatttacaatgagaaagaactggacagagaagtctacccctggtataacctgactgtggaggccaaagaactggattccactggaacccccacaggaaaagaatccattgtgcaagtccacattgaagttttggatgagaatgacaatgccccggagtttgccaagccctaccagcccaaagtgtgtgagaacgctgtccatggccagctggtcctgcagatctccgcaatagacaaggacataacaccacgaaacgtgaagttcaaattcatcttgaatactgagaacaactttaccctcacggataatcacgataacacggccaacatcacagtcaagtatgggcagtttgaccgggagcataccaaggtccacttcctacccgtggtcatctcagacaatgggatgccaagtcgcacgggcaccagcacgctgaccgtggccgtgtgcaagtgcaacgagcagggcgagttcaccttctgcgaggatatggccgcccaggtgggcgtgagcatccaggcagtggtagccatcttactctgcatcctcaccatcacagtgatcaccctgctcatcttcctgcggcggcggctccggaagcaggcccgcgcgcacggcaagagcgtgccggagatccacgagcagctggtcacctacgacgaggagggcggcggcgagatggacaccaccagctacgatgtgtcggtgctcaactcggtgcgccgcggcggggccaagcccccgcggcccgcgctggacgcccggccttccctctatgcgcaggtgcagaagccaccgaggcacgcgcctggggcacacggagggcccggggagatggcagccatgatcgaggtgaagaaggacgaggcggaccacgacggcgacggccccccctacgacacgctgcacatctacggctacgagggctccgagtccatagccgagtccctcagctccctgggcaccgactcatccgactctgacgtggattacgacttccttaacgactggggacccaggtttaagatgctggctgagctgtacggctcggacccccgggaggagctgctgtattaggcggccgaggtcactctgggcctggggacccaaaccccctgcagcccaggccagtcagacgccaggcaccacagcctccaaaaatggcagtgactccccagcccagcaccccttcctcgtgggtcccagagacctcatcagccttgggatagcaaactccaggttc

SEQ ID NO: 681 - DNA, 3191 bp, Homo sapiens
  source 1..3191: mol_type = genomic DNA
atgccaagtacctgctcaaaggagaatatgtgggcaaggtcttccgggtcgatgcagagacaggagacgtgttcgccattgagagcccagaaccggatgaccaagtacagcatcttgcggggcgactaccaggacgctttcaccattgagacaaaccccgcccacaacgagggcatcatcaagcccatgaagcctctggattatgaatacatccagcaatacagcttcatcgtcgaggccacagaccccaccatcgacctccgatacatgagccctcccgcgggaaacagagcccaggtcattatcaacatcacagatgtggacgagccccccattttccagcagcctttctaccacttccagctgaaggaaaaccagaagaagcctctgattggcacagtgctggccatggaccctgatgcggctaggcatagcattggatactccatccgcaggaccagtgacaagggccagttcttccgagtcacaaaaaagggggacatttacaatgagaaagaactggacagagaagtctacccctggtataacctgactgtggaggccaaagaactggattccactggaacccccacaggaaaagaatccattgtgcaagtccacattgaagttttggatgagaatgacaatgccccggagtttgccaagccctaccagcccaaagtgtgtgagaacgctgtccatggccagctggtcctgcagatctccgcaatagacaaggacataacaccacgaaacgtgaagttcaaattcatcttgaatactgagaacaactttaccctcacggataatcacgataacacggccaacatcacagtcaagtatgggcagtttgaccgggagcataccaaggtccacttcctacccgtggtcatctcagacaatgggatgccaagtcgcacgggcaccagcacgctgaccgtggccgtgtgcaagtgcaacgagcagggcgagttcaccttctgcgaggatatggccgcccaggtgggcgtgagcatccaggcagtggtagccatcttactctgcatcctcaccatcacagtgatcaccctgctcatcttcctgcggcggcggctccggaagcaggcccgcgcgcacggcaagagcgtgccggagatccacgagcagctggtcacctacgacgaggagggcggcggcgagatggacaccaccagctacgatgtgtcggtgctcaactcggtgcgccgcggcggggccaagcccccgcggcccgcgctggacgcccggccttccctctatgcgcaggtgcagaagccaccgaggcacgcgcctggggcacacggagggcccggggagatggcagccatgatcgaggtgaagaaggacgaggcggaccacgacggcgacggccccccctacgacacgctgcacatctacggctacgagggctccgagtccatagccgagtccctcagctccctgggcaccgactcatccgactctgacgtggattacgacttccttaacgactggggacccaggtttaagatgctggctgagctgtacggctcggacccccgggaggagctgctgtattaggcggccgaggtcactctgggcctggggacccaaaccccctgcagcccaggccagtcagacgccaggcaccacagcctccaaaaatggcagtgactccccagcccagcaccccttcctcgtgggtcccagagacctcatcagccttgggatagcaaactccaggttcctgaaatatccaggaatatatgtcagtgatgactattctcaaatgctggcaaatccaggctggtgttctgtctgggctcagacatccacataaccctgtcacccacagaccgccgtctaactcaaagacttcctctggctccccaaggctgcaaagcaaaacagactgtgtttaactgctgcagggtctttttctagggtccctgaacgccctggtaaggctggtgaggtcctggtgcctatctgcctggaggcaaaggcctggacagcttgacttgtggggcaggattctctgcagcccattcccaagggagactgaccatcatgccctctctcgggagccctagccctgctccaactccatactccactccaagtgccccaccactccccaacccctctccaggcctgtcaagagggaggaaggggccccatggcagctcctgaccttgggtcctgaagtgacctcactggcctgccatgccagtaactgtgctgtactgagcactgaaccacattcagggaaatggcttattaaactttgaagcaactgtgaattcattctggaggggcagtggagatcaggagtgacagatcacagggtgagggccacctccacacccaccccctctggagaaggcctggaagagctgagaccttgctttgagactcctcagcacccctccagttttgcctgagaaggggcagatgttcccggagcagaagacgtctccccttctctgcctcacctggtcgccaatccatgctctctttcttttctctgtctactccttatcccttggtttagaggaacccaagatgtggcctttagcaaaactggacaatgtccaaacccactcatgactgcatgacggagccgagccatgtgtctttacacctcgctgttgtcacatctcagggaactgaccctcaggcacaccttgcagaaggcaaggccctgccctgcccaacctctgtggtcacccatgcatcttccactggaacgtttcactgcaaacacaccttggagaagtggcatcagtcaacagagaggggcagggaaggagacaccaagctcacccttcgtcatggaccgaggttcccactctgggcaaagcccctcacactgcaagggattgtagataacactgacttgtttgttttaaccaataactagcttcttataatgatttttttactaatgatacttacaagtttctagctctcacagacatatagaataagggtttttgcataataagcaggttgttatttaggttaacaatattaattcaggttttttagttggaaaaacaattcctgtaaccttctattttctataattgtagtaattgctctacagataatgtctatatattggccaaactggtgcatgacaagtactgtatttttttatacctaaataaagaaaaatctttagcctgggc

SEQ ID NO: 682 - DNA, 8476 bp, Homo sapiens
  source 1..8476: mol_type = genomic DNA
ttcgcatcccaagagctgcagtttcagccgcgacagcaagaacggcagagccggcgaccgcggcggcggcggcggcggaggcaggagcagcctgggcgggtcgcagggtctccgcgggcgcaggaaggcgagcagagatatcctctgagagccaagcaaagaacattaaggaaggaaggaggaatgaggctggatacggtgcagtgaaaaaggcacttccaagagtggggcactcactacgcacagactcgacggtgccatcagcatgagaacttaccgctacttcttgctgctcttttgggtgggccagccctacccaactctctcaactccactatcaaagaggactagtggtttcccagcaaagaaaagggccctggagctctctggaaacagcaaaaatgagctgaaccgttcaaaaaggagctggatgtggaatcagttctttctcctggaggaatacacaggatccgattatcagtatgtgggcaagttacattcagaccaggatagaggagatggatcacttaaatatatcctttcaggagatggagcaggagatctcttcattattaatgaaaacacaggcgacatacaggccaccaagaggctggacagggaagaaaaacccgtttacatccttcgagctcaagctataaacagaaggacagggagacccgtggagcccgagtctgaattcatcatcaagatccatgacatcaatgacaatgaaccaatattcaccaaggaggtttacacagccactgtccctgaaatgtctgatgtcggtacatttgttgtccaagtcactgcgacggatgcagatgatccaacatatgggaacagtgctaaagttgtctacagtattctacagggacagccctatttttcagttgaatcagaaacaggtattatcaagacagctttgctcaacatggatcgagaaaacagggagcagtaccaagtggtgattcaagccaaggatatgggcggccagatgggaggattatctgggaccaccaccgtgaacatcacactgactgatgtcaacgacaaccctccccgattcccccagagtacataccagtttaaaactcctgaatcttctccaccggggacaccaattggcagaatcaaagccagcgacgctgatgtgggagaaaatgctgaaattgagtacagcatcacagacggtgaggggctggatatgtttgatgtcatcaccgaccaggaaacccaggaagggattataactgtcaaaaagctcttggactttgaaaagaagaaagtgtatacccttaaagtggaagcctccaatccttatgttgagccacgatttctctacttggggcctttcaaagattcagccacggttagaattgtggtggaggatgtagatgagccacctgtcttcagcaaactggcctacatcttacaaataagagaagatgctcagataaacaccacaataggctccgtcacagcccaagatccagatgctgccaggaatcctgtcaagtactctgtagatcgacacacagatatggacagaatattcaacattgattctggaaatggttcgatttttacatcgaaacttcttgaccgagaaacactgctatggcacaacattacagtgatagcaacagagatcaataatccaaagcaaagtagtcgagtacctctatatattaaagttctagatgtcaatgacaacgccccagaatttgctgagttctatgaaacttttgtctgtgaaaaagcaaaggcagatcagttgattcagaccctgcatgctgttgacaaggatgacccttatagtggacaccaattttcgttttccttggcccctgaagcagccagtggctcaaactttaccattcaagacaacaaagacaacacggcgggaatcttaactcggaaaaatggctataatagacacgagatgagcacctatctcttgcctgtggtcatttcagacaacgactacccagttcaaagcagcactgggacagtgactgtccgggtctgtgcatgtgaccaccacgggaacatgcaatcctgccatgcggaggcgctcatccaccccacgggactgagcacgggggctctggttgccatccttctgtgcatcgtgatcctactagtgacagtggtgctgtttgcagctctgaggcggcagcgaaaaaaagagcctttgatcatttccaaagaggacatcagagataacattgtcagttacaacgacgaaggtggtggagaggaggacacccaggcttttgatatcggcaccctgaggaatcctgaagccatagaggacaacaaattacgaagggacattgtgcccgaagcccttttcctaccccgacggactccaacagctcgcgacaacaccgatgtcagagatttcattaaccaaaggttaaaggaaaatgacacggaccccactgccccgccatacgactccttggccacttacgcctatgaaggcactggctccgtggcggattccctgagctcgctggagtcagtgaccacggatgcagatcaagactatgattaccttagtgactggggacctcgattcaaaaagcttgcagatatgtatggaggagtggacagtgacaaagactcctaatctgttgcctttttcattttccaatacgacactgaaatatgtgaagtggctatttctttatatttatccactactccgtgaaggcttctctgttctacccgttccaaaagccaatggctgcagtccgtgtggatccaatgttagagacttttttctagtacacttttatgagcttccaaggggcaaatttttattttttagtgcatccagttaaccaagtcagcccaacaggcaggtgccggaggggaggacagggaacagtatttccacttgttctcagggcagcgtgcccgcttccgctgtcctggtgttttactacactccatgtcaggtcagccaactgccctaactgtacatttcacaggctaatgggataaaggactgtgctttaaagataaaaatatcatcatagtaaaagaaatgagggcatatcggctcacaaagagataaactacataggggtgtttatttgtgtcacaaagaatttaaaataacacttgcccatgctatttgttcttcaagaactttctctgccatcaactactattcaaaacctcaaatccacccatatgttaaaattctcattactcttaaggaatagaagcaaattaaacggtaacatccaaaagcaaccacaaacctagtacgacttcattccttccactaactcatagtttgttatatcctagactagacatgcgaaagtttgcctttgtaccatataaagggggagggaaatagctaataatgttaaccaaggaaatatattttaccatacatttaaagttttggccaccacatgtatcacgggtcacttgaaattctttcagctatcagtaggctaatgtcaaaattgtttaaaaattcttgaaagaattttcctgagacaaattttaacttcttgtctatagttgtcagtattattctactatactgtacatgaaagtagcagtgtgaagtacaataattcatattcttcatatccttcttacacgactaagttgaattagtaaagttagattaaataaaacttaaatctcactctaggagttcagtggagaggttagagccagccacacttgaacctaataccctgcccttgacatctggaaacctctacatatttatataacgtgatacatttggataaacaacattgagattatgatgaaaacctacatattccatgtttggaagacccttggaagaggaaaattggattcccttaaacaaaagtgtttaagattgtaattaaaatgatagttgattttcaaaagcattaattttttttcattgtttttaactttgctttcatgaccatcctgccatccttgactttgaactaatgataaagtaatgatctcaaactatgacagaaaagtaatgtaaaatccatccaatctattatttctctaattatgcaattagcctcatagttattatccagaggacccaactgaactgaactaatccttctggcagattcaaatcgtttatttcacacgctgttctaatggcacttatcattagaatcttaccttgtgcagtcatcagaaattccagcgtactataatgaaaacatccttgttttgaaaacctaaaagacaggctctgtatatatatatacttaagaatatgctgacttcacttattagtcttagggatttattttcaattaatattaattttctacaaataattttagtgtcatttccatttggggatattgtcatatcagcacatattttctgtttggaaacacactgttgtttagttaagttttaaataggtgtattacccaagaagtaaagatggaaacgttaaaagaagagaaatgtagtattttgggttacctgattagagtgaaaattttttacaatcatattattccttgtgtcttctgaatggtttccgattttataatggactgccctatatagtaacaagtatttcatgcttgagctatttcctgctttcagggtttcttttttctagttcttcatacacacacatacacacacacacacacacacacacacacacacacgaatgcaaacaaaaggctatatgaggtcttcactctaatgaattgatatgtatcatagtcacaggtaagtgttgaaaaaagcttagtaaagttagaagctacttactcatagcaatagaacagcaccttaatcacacgatttactgtaaaattaaagaggtctctatctgtatgtttcatgtcacgtaacaaattgaatcaaggaagatagtcctgtaaaaagaaaggtatcatctgaagttgaggattgacactagcagtttccaatgtttaaaggtaagatctgagttctcctaataagtaaaagtaagtagttctatagcagaatatctgagatgtaattggcaaggtattttatccctccctgcagatgacacagcataccaagaacaggttaatatgattacttatggaaataactttaatctcttatcataaaagctgatgatgaagtaaatttataggaaattggataatttgagactggggctaaatatttagtaccagggtactgtaagtatcaagttggagtgacgttttcctataattcagactctttgacatcgtggaaccaataagagtcatagttccatcattctccagcttcgtctcacttccttcccaccccacctgagtatcaggtcaaacatcattgcatgcgcaggttttttttttaattgctaggtcccaggcaacatgaaagattattggagaaaaaaataattttcagcccagttttttcattgtctgtttcctaattttagatgttggtgatgggaaagatggaaggagagtgggaagaagtaaaattttaatatttgtttcaatcactttgaaactaaaattcattaagcataaccagattgcttttgtgggttgtttcaaggacattgagagctttctgatgatatgtttttgccctctattcaaaagcaagagttcctttaaactactaagatattccctagaataagctgaatttaaaaaaacattaagccattgtttaaagccccttcacttcctggccacttacttctgaaaggcctaaaaaacatttgtgcccaaataagtaaataaaccaaatgggaaagaagcaaagattattccatagaaccacaagagagggaatgtgggcacagtaaatagatgtttctttcagaactttcctgcctttacagtttgtgtccataaagggatgttcagcaatgaaattactcccttttcagatggaacaaaacctgcccatttaattttaacgcagtataaaaaacgtgtggtttagtttttattttcagctcccaaagagttgtgcagaaaatcttaaaattttttttttttttttttttttttttttgagacagaatctcgctctgtcgcccaggctggaatgcagtggcgcgatctctgctcactacaagctccgcctcccgggttcacgccattctcctgcctcagcgcccccagtagctgggactacaggcacacaccaccacgcccggctaatttttgttgtattttttagtggagacagggtttcaccatgttagccaggatgatctccatctcctgacctcgtggtccgcccgcctcggcctcccaaagtgctgggattacaggcgtgagccaccgcgcccggccttaaaaattgaatctgtagcttaggccatccaaattttataaatccaaattaactttagaatgtttctattactttcacttttacatatataaattttaagtgtcctgattggctgaacaatatctcacatcaaatgctttgcctggaaatagatatcccactggggatagtggtgtgtaaactatgacttggacaattctatatactcaagcaccataaaaagtatgcagttgaaaagaaaatcaaagttgattcctgggtgccaactaaatattcaaatcaggtactcatccttatcagctaaattcattttcaccaggaacagaccaccaaataaattattttatcctaataactagttttgaagcagtgtaattactctggaagaaggctctaaaaagtcatgattcccccactattttgaaatgtatcctctaacaaggatcattatagtgtaatcttaatttttatgttttatcaagatgaaatcttgtttgaattgtgatattataaaaggggactcaaaaatccaagcagtctactgtgtttaaattaacaccacaaccttccttatcagattataagagtagaaaaattaacacttggtgtgtgaatcttcaggaaaatgagctatttcataagctcaaacaagcagcttccttttccagagaatatagaattatattatggtctccttaaatgtttagtagctcttatggtcacagcatttttaatctccctatggcatctttatggaataattttctaaagggtaattctctactaaaaatatcagaccccgaccatatttaatgtggagagcaataccctcttagaaagaaaatacattgactcatacacttgttaaaagttaataaagaaatagctcatttttaaagccggaagtttatggtctctgcatcgtcaatttaatttaagcattgctgagacaatctttaatctactcccctttttgtaataccttatttatggtgcattttcatttttatttgggggaaacgttagcccaacagagccggcagatgaaagtgttgaaaagaggtcaaatggaaacaaaggctcttacccgctgtatttcagacaggactgaggcacttagccgaggagccactgggttattagattaatttcaaaagagcttttacaagttgcttaattcctttttttttttttttttttttcaaaaacccatgaaccacaaactcaaatttctcctcaaatggggttaatctgacaaacgaggcatggacccagccttgtggaaaaagcattccacgctaatgagatcttggtctttcttgtgaggctacgttatttatgtaaatatgtctggaggcaccttctctaagcttttagttttctatgatctattagtttagtgtttattaaagaatcaaatgtatagaattaccaggcattcgtggggaatgctgtgtagcaaatgtaaaactgacctgctcggaagaaacgtaggaacgcttcaaacccactgtaatgtttggtttgagattattttcattgctttgagagtgaactgcctaagagtaggccttataataaatgctatgtgcgtcttcagtagttccaagctaaagcaatttggcattctcccactgtgatttgtgacttttaaacccacaaaataaaagctttttggtattgattgtttttaattaaaaatacttccaagtataaattgaaacggatgccacccttgaagatttactggcgggaatgctcactcttgtcgttttcctcagtatcgttcatgtctttggcaacaagaacacctgatgaaagcaagcaatgctcagttcccatcaacatttctagttagggggattctcataaccccacagtttacctgagaaagttttctgtgttagaagaatggggtcgagagtattaccttttagctcagtgtggccgggccttttgttgcagtcaaatggcaaatacgcactccttgaaatggcttcttttatttggttttgttttcttagacttataaatttgaaaagaatgcaatttaaaaagtgatttctcacaaagagtaaatatgccttttgcaaatcaatttttgtaacaagttatttatatgatattacttaataaactggtttttttctaa

SEQ ID NO: 683 - DNA, 1247 bp, Homo sapiens
  source 1..1247: mol_type = genomic DNA
ggctgggaacgcctggcagcttttaggagggggcgggcccgggggtggtggccccaggagcggttgccgcggggaccgggcagtgacgcggcccaagggcggaagtgagaaagttgtctgcgtctcgaggcgagttggcggagctgtgcgcgcggcggggcgatggggggctcgggcagtcgcctgtccaaggagctgctggccgagtaccaggacttgacgttcctgacgaagcaggagatcctcctagcccacaggcggttttgtgagctgcttccccaggagcagcggagcgtggagtcgtcacttcgggcacaagtgcccttcgagcagattctcagccttccagagctcaaggccaaccccttcaaggagcgaatctgcagggtcttctccacatccccagccaaagacagccttagctttgaggacttcctggatctcctcagtgtgttcagtgacacagccacgccagacatcaagtcccattatgccttccgcatctttgactttgatgatgacggaaccttgaacagagaagacctgagccggctggtgaactgcctcacgggagagggcgaggacacacggcttagtgcgtctgagatgaagcagctcatcgacaacatcctggaggagtctgacattgacagggatggaaccatcaacctctctgagttccagcacgtcatctcccgttctccagactttgccagctcctttaagattgtcctgtgacagcagccccagcgtgtgtcctggcaccctgtccaagaacctttctactgctgagctgtggccaaggtcaagcctgtgttgccagtgcgggccaagctggcccagcctggagctggcgctgtgcagcctcaccccgggcaggggcggccctcgttgtcagggcctctcctcactgctgttgtcattgctccgtttgtgtttgtactaatcagtaataaaggtttagaagtttgaccctatgtgtgacatgagatacactggtatgaggaaggactggacttctcttctaagagccttcaatcatcctaggaataagcagcatatcgagcagaggccagcgggaagtcaagccgcacccacgctggctgtccccgtgggagggtgtgaggatgaaggggcagcaggaggtgtgggactcgcctgtatcctgattggggtggtggttagatgagtctctgcatgcatcaaaatgtaaagaaccgtacatcagtaaagtctattttactgca

SEQ ID NO: 684 - DNA, 2336 bp, Homo sapiens
  source 1..2336: mol_type = genomic DNA
cgcggccggcatttctcctcgcagctcgctgcctcctctatccctgcctccctctcccccctctgtttttctcccttccttccctctccgaccctcttcctctccctcccgatcctttccctcctcctctcatctttcccctgtctctccgttctagctcgtcccccaccccaccttttcttctttctcctcctctccttcctctccccctctcctctgtctccttccaccgtctcccctgcctccctgtctttcagtccctgtttttcagccccgtctccctctcggtttctctcccccaccctccctccgggtttcctccccggtgccctccctcctctctccctcccctccccctccgcccctcgcagccccgccgctcgcagctcccagtctgcctccccgaaccggcgccgccgcccgcactcgccgcaggaccggcccgcccggctcccggggtgcgccctcctcggtcccgcgccctccgggctcgcagggacgtctcctccctcccggctcgcggccccgcccggcccggcccccgcccagagccccagcgcgccgaggatgtgagtcctgctcgcctctggcggagcagcagccactcgcgcgcggagccggagcgcagcgcagcgcagccgcgggcgctctccgggccgctcgcgcgagtgccgcgctcttgccctagcggcgtcccccggcctctcgccggcgccaccgccgcagcagcccgcgggccgtccccggccggccgcccccggccccagcgccgctgaccctgtccgccgcgggcggggacgcgggcggaggaggcgccgcggcggagcccccggacgcgaccatgtcggaggtgctgccctacggcgacgagaagctgagcccctacggcgacggcggcgacgtgggccagatcttctcctgccgcctgcaggacaccaacaacttcttcggcgccgggcagaacaagcggccgcccaagctgggccagatcggccggagcaagcgggttgttattgaagatgataggattgatgacgtgctgaaaaatatgaccgacaaggcacctcctggtgtctaactcccccaaagacaatgagttaagggagagaataagaacggcggtaacagttattggcaaaaagcatgaaaagagaaagcactttgaaatttattactagcttgctacccacgatgaaatcaacaacctgtatctggtatcaggccgggagacagatgaggcgagaggaggaggaggaggaggagaaggctctgggctcctctgcaaaaataaaaataaaaaaataaataaaattttaaaaataataaaaattcactatatacacatataaagaaataaaaagaagtctcagttgcagctatttgtcaaaattaatatccatttctttttatatacggtgaatattgcgcaattatagatctggattttgaaccacttaatgaagcggcaacaccaggtgttttgaggtgttggcattcttcgctgatttggctgttcccaatgtttacattatttaatcttgcaaaaatggttctgtgcacttggatgtgaaatgctgtccagttttattttttttatgttgttatccttggatgtacaaaaaattcagaaaatgatctctgtagatattctgttttattttggtcatctttagaagttatcaggaatgtgtttaaaacaagaagagaacttttctaaggaatgatacatagaaaagattttattttaaaatgagttgtaaagcttgtgtttctttgttgctgcaagctatctgcccaagttaatgcaaatggacacattttttatgtcagaaaaacacacacacacacacacacacacacacacacacacgaaaaacaaagaaaaaaatgcttgagctttttctaacttccccttgcagtctgttgtgtgagcagcctgtttatttctctaatattatgtcagtttattctctttaatggactgtaaaaaaatgtaatcacaagagtgccaaatatcttgaaatgccaaaaggcattttagtttcttttctctgtgctctgagtccacgtacaggaatgcttggagtgtcttttctgttatttatagggattctcttaaggcacaccagctgcctgttttgcatggtatttgcaaaaatgcctcttgcgtgaggaaatcttttaccattttttgtttgcaactttggacctcaagaggtttcccttcccttccccgttccctcttttcttaattcaatattctgtatgttgcaccttgaaccagcacacagggctatttctccaatgtacaataaaagaattgttcctgtgtctca

SEQ ID NO: 685 - DNA, 2459 bp, Homo sapiens
  source 1..2459: mol_type = genomic DNA
tctgggccccagcgaggcggtggggcggggcggggcggggcggggcgcgcagcaggagcgagtggggccgcccgccgggccgcggacactgtcgcccggcgcccaggttcccaacaaggctacgcagaagaacccccttgactgaagcaatggaggggggtccagctgtctgctgccaggatcctcgggcagagctggtagaacgggtggcagccatcgatgtgactcacttggaggaggcagatggtggcccagagcctactagaaacggtgtggaccccccaccacgggccagagctgcctctgtgatccctggcagtacttcaagactgctcccagcccggcctagcctctcagccaggaagctttccctacaggagcggccagcaggaagctatctggaggcgcaggctgggccttatgccacggggcctgccagccacatctccccccgggcctggcggaggcccaccatcgagtcccaccacgtggccatctcagatgcagaggactgcgtgcagctgaaccagtacaagctgcagagtgagattggcaagggtgcctacggtgtggtgaggctggcctacaacgaaagtgaagacagacactatgcaatgaaagtcctttccaaaaagaagttactgaagcagtatggctttccacgtcgccctcccccgagagggtcccaggctgcccagggaggaccagccaagcagctgctgcccctggagcgggtgtaccaggagattgccatcctgaagaagctggaccacgtgaatgtggtcaaactgatcgaggtcctggatgacccagctgaggacaacctctatttggccctgcagaaccaggcccagaatatccagttagattcaacaaatatcgccaagccccactccctgcttccctctgagcagcaagacagtggatccacgtgggctgcgcgctcagtgtttgacctcctgagaaaggggcccgtcatggaagtgccctgtgacaagcccttctcggaggagcaagctcgcctctacctgcgggacgtcatcctgggcctcgagtacttgcactgccagaagatcgtccacagggacatcaagccatccaacctgctcctgggggatgatgggcacgtgaagatcgccgactttggcgtcagcaaccagtttgaggggaacgacgctcagctgtccagcacggcgggaaccccagcattcatggcccccgaggccatttctgattccggccagagcttcagtgggaaggccttggatgtatgggccactggcgtcacgttgtactgctttgtctatgggaagtgcccattcatcgacgatttcatcctggccctccacaggaagatcaagaatgagcccgtggtgtttcctgaggagccagaaatcagcgaggagctcaaggacctgatcctgaagatgttagacaagaatcccgagacgagaattggggtgccagacatcaagttgcacccttgggtgaccaagaacggggaggagccccttccttcggaggaggagcactgcagcgtggtggaggtgacagaggaggaggttaagaactcagtcaggctcatccccagctggaccacggtgatcctggtgaagtccatgctgaggaagcgttcctttgggaacccgtttgagccccaagcacggagggaagagcgatccatgtctgctccaggaaacctactggtgtaagtactggtgggccagggactgccgggcactccctggagttgggtggggaggtctgaggcccatcctcccactctcactgtcgttgggccaaggccagagcctggggacttggccaggtctcggtgttggccccatttgcatctctgtccccaaggttagtcggggctagaagggaccttttgggcccagctcttgcttcattcctggggccagcatccctcacacacacacttccagggatgaggagctcacgcagcccctccatgggacaggaagacccttcttccatgcagcttgatgtcactctctcactgggtccagcccctctggggcttcaaatctgtggccccctcagcccttggcagcctggcagaggtttgcagacaggctgatgttggcttcctgtaggaggctggcgggctgtagaggaggggtgctggcccctctgcctggccctggggactgttggctgctctcccaagtggcccaggctgcctgcagccattgctggggctctgtgcccagtcagcactttgtgagtgcttgttcagtgagtaagcagggacaggctggccggtggaccacgggagaggaacccgcattggccgagggctccctatggtgagccacgcctgtgggttcaccacctcctaggagggtccagaaaagcagctccccaagcctgtgcgcctcgtcctcagcagatccaccttcttcactataataaaagccagtctgggatgctaa

SEQ ID NO: 686 - DNA, 3563 bp, Homo sapiens
  source 1..3563: mol_type = genomic DNA
tctgggccccagcgaggcggtggggcggggcggggcggggcggggcgcgcagcaggagcgagtggggccgcccgccgggccgcggacactgtcgcccggcgcccaggttcccaacaaggctacgcagaagaacccccttgactgaagcaatggaggggggtccagctgtctgctgccaggatcctcgggcagagctggtagaacgggtggcagccatcgatgtgactcacttggaggaggcagatggtggcccagagcctactagaaacggtgtggaccccccaccacgggccagagctgcctctgtgatccctggcagtacttcaagactgctcccagcccggcctagcctctcagccaggaagctttccctacaggagcggccagcaggaagctatctggaggcgcaggctgggccttatgccacggggcctgccagccacatctccccccgggcctggcggaggcccaccatcgagtcccaccacgtggccatctcagatgcagaggactgcgtgcagctgaaccagtacaagctgcagagtgagattggcaagggtgcctacggtgtggtgaggctggcctacaacgaaagtgaagacagacactatgcaatgaaagtcctttccaaaaagaagttactgaagcagtatggctttccacgtcgccctcccccgagagggtcccaggctgcccagggaggaccagccaagcagctgctgcccctggagcgggtgtaccaggagattgccatcctgaagaagctggaccacgtgaatgtggtcaaactgatcgaggtcctggatgacccagctgaggacaacctctatttggtgtttgacctcctgagaaaggggcccgtcatggaagtgccctgtgacaagcccttctcggaggagcaagctcgcctctacctgcgggacgtcatcctgggcctcgagtacttgcactgccagaagatcgtccacagggacatcaagccatccaacctgctcctgggggatgatgggcacgtgaagatcgccgactttggcgtcagcaaccagtttgaggggaacgacgctcagctgtccagcacggcgggaaccccagcattcatggcccccgaggccatttctgattccggccagagcttcagtgggaaggccttggatgtatgggccactggcgtcacgttgtactgctttgtctatgggaagtgcccattcatcgacgatttcatcctggccctccacaggaagatcaagaatgagcccgtggtgtttcctgaggagccagaaatcagcgaggagctcaaggacctgatcctgaagatgttagacaagaatcccgagacgagaattggggtgccagacatcaagttgcacccttgggtgaccaagaacggggaggagccccttccttcggaggaggagcactgcagcgtggtggaggtgacagaggaggaggttaagaactcagtcaggctcatccccagctggaccacggtgatcctggtgaagtccatgctgaggaagcgttcctttgggaacccgtttgagccccaagcacggagggaagagcgatccatgtctgctccaggaaacctactggtgaaagaagggtttggtgaagggggcaagagcccagagctccccggcgtccaggaagacgaggctgcatcctgagcccctgcatgcacccagggccacccggcagcacactcatcccgcgcctccagaggcccacccctcatgcaacagccgcccccgcaggcagggggctggggactgcagccccactcccgcccctcccccatcgtgctgcatgacctccacgcacgcacgtccagggacagactggaatgtatgtcatttggggtcttgggggcagggctcccacgaggccatcctcctcttcttggacctccttggcctgacccattctgtggggaaaccgggtgcccatggagcctcagaaatgccacccggctggttggcatggcctggggcaggaggcagaggcaggagaccaagatggcaggtggaggccaggcttaccacaacggaagagacctcccgctggggccgggcaggcctggctcagctgccacaggcatatggtggagaggggggtaccctgcccaccttggggtggtggcaccagagctcttgtctattcagacgctggtatgggggctcggacccctcactggggacagggccagtgttggagaattctgattccttttttgttgtcttttacttttgtttttaacctgggggttcggggagaggccctgcttgggaacatctcacgagctttcctacatcttccgtggttcccagcacagcccaagattatttggcagccaagtggatggaactaactttcctggactgtgtttcgcattcggcgttatctggaaagtggactgaacggaatcaagctctgagcagaggcctgaagcggaagcaccacatcgtccctgcccatctcactctctcccttgatgatgcccctagagctgaggctggagaagacaccagggctgactttgaccgagggccatggacgcgacaggcctgtggccctgcgcatgctgaaataactggaacccagcctctcctcctacaccggcctacccatctgggcccaagagctgcactcacactcctacaacgaaggacaaactgtccaggtcggagggatcacgagacacagaacctggaggggtgtgcacgctggcaggtggcctctgcggcaattgcctcaccctgaggacatcagcagtcagcctgctcagagcgggggtgctggagcgcgtgcagacacagctcttccggagcagccttcaccttctctctgggatcagtgtccggctggccgacgtggcatttgctgaccgaatgctcatagaggttgacccccacagggtcacgcaggactcggacactgccctggaaacatggatggacaagggcttttggccacaggtgtgggtgtcctgttggaggagggcttgtttggagaagggaggctggctgggggagaaacccggatcccgctgcatctccgcgcctgtgggtgcatgtcgcgtgctcatctgttgcacacagctcactcgtatgtcctgcactggtacatgcatctgtaatacagtttctacgtctatttaaggctaggagccgaatgtgccccattgtcagtgggtccacgtttctccccggctcctctgggctaaggcagtgtggcccgaagcttaaaaagttactcggtactgtttttaagaacacttttatagagttagtggaaggcaagttaagagccaatcactgatccccaagtgtttcttgagcatctggtctggggggaccactttgatcggacccacccttggaaagctcaggggtaggcccaggtgggatgctcaccctgtcactgagggttttggttggcatcgttgtttttgaatgtagcacaagcgatgagcaaactctataagagtgttttaaaaattaacttcccaggaagtgagttaaaaacaataaaagccctttcttgagttaaaaagaaaaaaaaaa

SEQ ID NO: 687 - DNA, 3509 bp, Homo sapiens
  source 1..3509: mol_type = genomic DNA
cagcagaacagagtatgcaatttgggaagctgtggtgtggctgcagtggagagttcccaacaaggctacgcagaagaacccccttgactgaagcaatggaggggggtccagctgtctgctgccaggatcctcgggcagagctggtagaacgggtggcagccatcgatgtgactcacttggaggaggcagatggtggcccagagcctactagaaacggtgtggaccccccaccacgggccagagctgcctctgtgatccctggcagtacttcaagactgctcccagcccggcctagcctctcagccaggaagctttccctacaggagcggccagcaggaagctatctggaggcgcaggctgggccttatgccacggggcctgccagccacatctccccccgggcctggcggaggcccaccatcgagtcccaccacgtggccatctcagatgcagaggactgcgtgcagctgaaccagtacaagctgcagagtgagattggcaagggtgcctacggtgtggtgaggctggcctacaacgaaagtgaagacagacactatgcaatgaaagtcctttccaaaaagaagttactgaagcagtatggctttccacgtcgccctcccccgagagggtcccaggctgcccagggaggaccagccaagcagctgctgcccctggagcgggtgtaccaggagattgccatcctgaagaagctggaccacgtgaatgtggtcaaactgatcgaggtcctggatgacccagctgaggacaacctctatttggtgtttgacctcctgagaaaggggcccgtcatggaagtgccctgtgacaagcccttctcggaggagcaagctcgcctctacctgcgggacgtcatcctgggcctcgagtacttgcactgccagaagatcgtccacagggacatcaagccatccaacctgctcctgggggatgatgggcacgtgaagatcgccgactttggcgtcagcaaccagtttgaggggaacgacgctcagctgtccagcacggcgggaaccccagcattcatggcccccgaggccatttctgattccggccagagcttcagtgggaaggccttggatgtatgggccactggcgtcacgttgtactgctttgtctatgggaagtgcccattcatcgacgatttcatcctggccctccacaggaagatcaagaatgagcccgtggtgtttcctgaggagccagaaatcagcgaggagctcaaggacctgatcctgaagatgttagacaagaatcccgagacgagaattggggtgccagacatcaagttgcacccttgggtgaccaagaacggggaggagccccttccttcggaggaggagcactgcagcgtggtggaggtgacagaggaggaggttaagaactcagtcaggctcatccccagctggaccacggtgatcctggtgaagtccatgctgaggaagcgttcctttgggaacccgtttgagccccaagcacggagggaagagcgatccatgtctgctccaggaaacctactggtgaaagaagggtttggtgaagggggcaagagcccagagctccccggcgtccaggaagacgaggctgcatcctgagcccctgcatgcacccagggccacccggcagcacactcatcccgcgcctccagaggcccacccctcatgcaacagccgcccccgcaggcagggggctggggactgcagccccactcccgcccctcccccatcgtgctgcatgacctccacgcacgcacgtccagggacagactggaatgtatgtcatttggggtcttgggggcagggctcccacgaggccatcctcctcttcttggacctccttggcctgacccattctgtggggaaaccgggtgcccatggagcctcagaaatgccacccggctggttggcatggcctggggcaggaggcagaggcaggagaccaagatggcaggtggaggccaggcttaccacaacggaagagacctcccgctggggccgggcaggcctggctcagctgccacaggcatatggtggagaggggggtaccctgcccaccttggggtggtggcaccagagctcttgtctattcagacgctggtatgggggctcggacccctcactggggacagggccagtgttggagaattctgattccttttttgttgtcttttacttttgtttttaacctgggggttcggggagaggccctgcttgggaacatctcacgagctttcctacatcttccgtggttcccagcacagcccaagattatttggcagccaagtggatggaactaactttcctggactgtgtttcgcattcggcgttatctggaaagtggactgaacggaatcaagctctgagcagaggcctgaagcggaagcaccacatcgtccctgcccatctcactctctcccttgatgatgcccctagagctgaggctggagaagacaccagggctgactttgaccgagggccatggacgcgacaggcctgtggccctgcgcatgctgaaataactggaacccagcctctcctcctacaccggcctacccatctgggcccaagagctgcactcacactcctacaacgaaggacaaactgtccaggtcggagggatcacgagacacagaacctggaggggtgtgcacgctggcaggtggcctctgcggcaattgcctcaccctgaggacatcagcagtcagcctgctcagagcgggggtgctggagcgcgtgcagacacagctcttccggagcagccttcaccttctctctgggatcagtgtccggctggccgacgtggcatttgctgaccgaatgctcatagaggttgacccccacagggtcacgcaggactcggacactgccctggaaacatggatggacaagggcttttggccacaggtgtgggtgtcctgttggaggagggcttgtttggagaagggaggctggctgggggagaaacccggatcccgctgcatctccgcgcctgtgggtgcatgtcgcgtgctcatctgttgcacacagctcactcgtatgtcctgcactggtacatgcatctgtaatacagtttctacgtctatttaaggctaggagccgaatgtgccccattgtcagtgggtccacgtttctccccggctcctctgggctaaggcagtgtggcccgaagcttaaaaagttactcggtactgtttttaagaacacttttatagagttagtggaaggcaagttaagagccaatcactgatccccaagtgtttcttgagcatctggtctggggggaccactttgatcggacccacccttggaaagctcaggggtaggcccaggtgggatgctcaccctgtcactgagggttttggttggcatcgttgtttttgaatgtagcacaagcgatgagcaaactctataagagtgttttaaaaattaacttcccaggaagtgagttaaaaacaataaaagccctttcttgagttaaaaagaaaaaaaaaa

SEQ ID NO: 688 - DNA, 3660 bp, Homo sapiens
  source 1..3660: mol_type = genomic DNA
ctgggccccagcgaggcggtggggcggggcggggcggggcggggcgcgcagcaggagcgagtggggccgcccgccgggccgcggacactgtcgcccggcgcccaggttcccaacaaggctacgcagaagaacccccttgactgaagcaatggaggggggtccagctgtctgctgccaggatcctcgggcagagctggtagaacgggtggcagccatcgatgtgactcacttggaggaggcagatggtggcccagagcctactagaaacggtgtggaccccccaccacgggccagagctgcctctgtgatccctggcagtacttcaagactgctcccagcccggcctagcctctcagccaggaagctttccctacaggagcggccagcaggaagctatctggaggcgcaggctgggccttatgccacggggcctgccagccacatctccccccgggcctggcggaggcccaccatcgagtcccaccacgtggccatctcagatgcagaggactgcgtgcagctgaaccagtacaagctgcagagtgagattggcaagggtgcctacggtgtggtgaggctggcctacaacgaaagtgaagacagacactatgcaatgaaagtcctttccaaaaagaagttactgaagcagtatggctttccacgtcgccctcccccgagagggtcccaggctgcccagggaggaccagccaagcagctgctgcccctggagcgggtgtaccaggagattgccatcctgaagaagctggaccacgtgaatgtggtcaaactgatcgaggtcctggatgacccagctgaggacaacctctatttggccctgcagaaccaggcccagaatatccagttagattcaacaaatatcgccaagccccactccctgcttccctctgagcagcaagacagtggatccacgtgggctgcgcgctcagtgtttgacctcctgagaaaggggcccgtcatggaagtgccctgtgacaagcccttctcggaggagcaagctcgcctctacctgcgggacgtcatcctgggcctcgagtacttgcactgccagaagatcgtccacagggacatcaagccatccaacctgctcctgggggatgatgggcacgtgaagatcgccgactttggcgtcagcaaccagtttgaggggaacgacgctcagctgtccagcacggcgggaaccccagcattcatggcccccgaggccatttctgattccggccagagcttcagtgggaaggccttggatgtatgggccactggcgtcacgttgtactgctttgtctatgggaagtgcccattcatcgacgatttcatcctggccctccacaggaagatcaagaatgagcccgtggtgtttcctgaggagccagaaatcagcgaggagctcaaggacctgatcctgaagatgttagacaagaatcccgagacgagaattggggtgccagacatcaagttgcacccttgggtgaccaagaacggggaggagccccttccttcggaggaggagcactgcagcgtggtggaggtgacagaggaggaggttaagaactcagtcaggctcatccccagctggaccacggtgatcctggtgaagtccatgctgaggaagcgttcctttgggaacccgtttgagccccaagcacggagggaagagcgatccatgtctgctccaggaaacctactggtgaaagaagggtttggtgaagggggcaagagcccagagctccccggcgtccaggaagacgaggctgcatcctgagcccctgcatgcacccagggccacccggcagcacactcatcccgcgcctccagaggcccacccctcatgcaacagccgcccccgcaggcagggggctggggactgcagccccactcccgcccctcccccatcgtgctgcatgacctccacgcacgcacgtccagggacagactggaatgtatgtcatttggggtcttgggggcagggctcccacgaggccatcctcctcttcttggacctccttggcctgacccattctgtggggaaaccgggtgcccatggagcctcagaaatgccacccggctggttggcatggcctggggcaggaggcagaggcaggagaccaagatggcaggtggaggccaggcttaccacaacggaagagacctcccgctggggccgggcaggcctggctcagctgccacaggcatatggtggagaggggggtaccctgcccaccttggggtggtggcaccagagctcttgtctattcagacgctggtatgggggctcggacccctcactggggacagggccagtgttggagaattctgattccttttttgttgtcttttacttttgtttttaacctgggggttcggggagaggccctgcttgggaacatctcacgagctttcctacatcttccgtggttcccagcacagcccaagattatttggcagccaagtggatggaactaactttcctggactgtgtttcgcattcggcgttatctggaaagtggactgaacggaatcaagctctgagcagaggcctgaagcggaagcaccacatcgtccctgcccatctcactctctcccttgatgatgcccctagagctgaggctggagaagacaccagggctgactttgaccgagggccatggacgcgacaggcctgtggccctgcgcatgctgaaataactggaacccagcctctcctcctacaccggcctacccatctgggcccaagagctgcactcacactcctacaacgaaggacaaactgtccaggtcggagggatcacgagacacagaacctggaggggtgtgcacgctggcaggtggcctctgcggcaattgcctcaccctgaggacatcagcagtcagcctgctcagagcgggggtgctggagcgcgtgcagacacagctcttccggagcagccttcaccttctctctgggatcagtgtccggctggccgacgtggcatttgctgaccgaatgctcatagaggttgacccccacagggtcacgcaggactcggacactgccctggaaacatggatggacaagggcttttggccacaggtgtgggtgtcctgttggaggagggcttgtttggagaagggaggctggctgggggagaaacccggatcccgctgcatctccgcgcctgtgggtgcatgtcgcgtgctcatctgttgcacacagctcactcgtatgtcctgcactggtacatgcatctgtaatacagtttctacgtctatttaaggctaggagccgaatgtgccccattgtcagtgggtccacgtttctccccggctcctctgggctaaggcagtgtggcccgaagcttaaaaagttactcggtactgtttttaagaacacttttatagagttagtggaaggcaagttaagagccaatcactgatccccaagtgtttcttgagcatctggtctggggggaccactttgatcggacccacccttggaaagctcaggggtaggcccaggtgggatgctcaccctgtcactgagggttttggttggcatcgttgtttttgaatgtagcacaagcgatgagcaaactctataagagtgttttaaaaattaacttcccaggaagtgagttaaaaacaataaaagccctttcttgagtt

SEQ ID NO: 689 - DNA, 4544 bp, Homo sapiens
  source 1..4544: mol_type = genomic DNA
gatgagtgatttcctgagcatgcctagggaatgacaggcatctccacaggcaggctgcatccaccttggctggggtgtcgtcattggctgcctattagaaaaacgacaggacaatgcataccaccgcctcccgactgtaaacataggggatatgtgttcacttagcatggacttctgggaggggccaaggaagggcggtctggagttttattgaatagagcagtgtgtattcggctgcctgcctgcccgcctgcttgctctctggctgtgctcctgcttaaagaaatcagtccttcctttccgacttagtcctcgggaagaagtttcagactacaaggtatcattggaacatttcaagatcatcaaatcaaattccacagggattggtgaccaaccagaaggctcagacatctgattgctgacctgtccagacatcatctggtctccctgaacctgaaatcacaccatggatgattttgagcgtcgcagagaacttagaaggcaaaagagggaggagatgcgactcgaagcagaaagaatcgcctaccagaggaatgacgatgatgaagaggaggcagcccgggaacggcgccgccgagcccgacaggaacggctgcggcagaagcaggaggaagaatccttgggacaggtgaccgaccaggtggaggtgaatgcccagaacagtgtgcctgacgaggaggccaagacaaccaccacaaacactcaagtggaaggggatgatgaggccgcattcctggagcgcctggctcggcgtgaggaaagacgccaaaaacgccttcaggaggctctggagcggcagaaggagttcgacccaacaataacagatgcaagtctgtcgctcccaagcagaagaatgcaaaatgacacagcagaaaatgaaactaccgagaaggaagaaaaaagtgaaagtcgccaagaaagatacgagatagaggaaacagaaacagtcaccaagtcctaccagaagaatgattggagggatgctgaagaaaacaagaaagaagacaaggaaaaggaggaggaggaagaggagaagccaaagcgagggagcattggagaaaatcagggagaagagaagggaactaaagtgcaagctaaaagagaaaagctccaagaagacaagcctaccttcaaaaaagaagagatcaaagatgaaaagattaaaaaggacaaagaacccaaagaagaagttaagagcttcatggatcgaaagaagggatttacagaagttaagtcgcagaatggagaattcatgacccacaaacttaaacatactgagaatactttcagccgccctggagggagggccagcgtggacaccaaggaggctgagggcgccccccaggtggaagccggcaaaaggctggaggagcttcgtcgtcgtcgcggggagaccgagagcgaagagttcgagaagctcaaacagaagcagcaggaggcggctttggagctggaggaactcaagaaaaagagggaggagagaaggaaggtcctggaggaggaagagcagaggaggaagcaggaggaagccgatcgaaaactcagagaggaggaagagaagaggaggctaaaggaagagattgaaaggcgaagagcagaagctgctgagaaacgccagaagatgccagaagatggcttgtcagatgacaagaaaccattcaagtgtttcactcctaaaggttcatctctcaagatagaagagcgagcagaatttttgaataagtctgtgcagaaaagcagtggtgtcaaatcgacccatcaagcagcaatagtctccaagattgacagcagactggagcagtataccagtgcaattgagggaacaaaaagcgcaaaacctacaaagccggcagcctcggatcttcctgttcctgctgaaggtgtacgcaacatcaagagtatgtgggagaaagggaatgtgttttcatcccccactgcagcaggcacaccaaataaggaaactgctggcttgaaggtaggggtttctagccgcatcaatgaatggctaactaaaaccccagatggaaacaagtcacctgctcccaaaccttctgacttgagaccaggagacgtatccagcaagcggaacctctgggaaaagcaatctgtggataaggtcacttcccccactaaggtttgagacagttccagaaagaacccaagctcaagacgcaggacgagctcagttgtagagggctaattcgctctgttttgtatttatgttgatttactaaattgggttcattatcttttatttttcaatatcccagtaaacccatgtatattatcactatatttaataatcacagtctagagatgttcatggtaaaagtactgcctttgcacaggagcctgtttctaaagaaacccatgctgtgaaatagagacttttctactgatcatcataactctgtatctgagcagtgataccaaccacatctgaagtcaacagaagatccaagtttaaaattgcctgcggaatgtgtgcagtatctagaaaaatgaaccgtagtttttgtttttttaaatacagaagtcatgttgtttctgcactttataataaagcatggaagaaattatcttagtaggcaattgtaacactttttgaaagtaacccatttcagatttgaaatactgcaataatggttgtctttaaaaaaaaaaaagaaatgtactgttaaggtattactttttttcatgctgatgattcatatctaaattacattattatgttagctgacagtggtactgattttttaggttggttgttttgtggatttctttagtagtgatagtagcctgaaccacattttagataactcaattatgtatgtatgtgcatacacatatacaaacacactaatggtagaatgcttttttatgtgctagactattatatttagtagtatgtcattgtaactagccaatatcacagcttttgaaaaattaaaaaatcacactatattaatattttatatttgccaacagaaacatggcagataggtatcaatatgttttcaatgcctgatgacctataagaagaaagtattgaaaagaagagagattagaactgttagaaggagttgaaattttctaaaagacatagtatttagtttataattaaatgcattcttgaagtccagtgtgaattttattaatgctatcatctcgaccaagctcaaagcctacttattagaaacaatgaagttcacaataggtcataaggtctcttccttttctaaaattgaaagacaagaaatttagtgccaatattgtacagacagaaattccatgtatgagtctcaacaaagactacctttggctaaatgtctagaagcagagaagtaaagtgagcaaaatccagtgttgaggagtcatgacagtactttgatctttatatactctgaagcatttcttcaaacttttctacttttatttgtcattgatacctgtagtaagttgacaatgtggtgaaatttcaaaattatatgtaacttctactagttttactttctcccccaagtcttttttaactcatgatttttacacacacaatccagaacttattatatagcctctaagtctttattcttcacagtagataatgaaagagtcctccagtgtcttggcaaaatgttctagtatagctggatacatacagtggagttctataaactcatacctcagtggacttaaccaaaattgtgttagtctcaattcctaccacactgagggagcctcccaaataactattttcttatctgcagtattcctccagaagagctaaccagggcagggctggcatgagaagtgacatctgcgttacaaagtctatcttcctcataagtctgtaaagagcaattgaatcttctagctttagcaaacctaagccaaaggaaggaaagccatgaagaatgcagaagtcaaaccctcatgacaaagtaggcacaagtctacaataagctaaatcagaatttacaaatacaagtgtcccaggtagcattgactcccgtcattggagtgaaatggatcaaagtttgaattaaggcctatggtaaggtaacattgctttgttgtacttttgaacaagagctcctcctgatcactattacatatttttctagaaaatctaaagttcagaagagaatgtatcactgctgacttttattccaatatttggatggagtaagttttagggtagaattttgttcagtttggatttaatcttttgaaaagtaaattccttgtttactggtttgactataattctctgttatctttacgaggtaaaactgcaagctgactagcatgttctgtgaatctgccattcctaaaaattttataaacacttgatacttttcactgataatggatcgctccaataaacatatattgtgaaaatgcatccacaataaatggaattccttcctgcaaaatgtctttttctcacttatttttatgtacaatattgatagtgagaggtatgtctattataataaagattatggcacagtaaaacctgt

SEQ ID NO: 690 - DNA, 3612 bp, Homo sapiens
  source 1..3612: mol_type = genomic DNA
cctgcctgcccgcctgcttgctctctggctgtgctcctgcttaaagaaatcagtccttcctttccgacttagtcctcgggaagaagtttcagactacaaggtatcattggaacatttcaagatcatcaaatcaaattccacagggattggtgaccaaccagaaggctcagacatctgattgctgacctgtccagacatcatctggtctccctgaacctgaaatcacaccatggatgattttgagcgtcgcagagaacttagaaggcaaaagagggaggagatgcgactcgaagcagaaagaatcgcctaccagaggaatgacgatgatgaagaggaggcagcccgggaacggcgccgccgagcccgacaggaacggctgcggcagaagcaggaggaagaatccttgggacaggtgaccgaccaggtggaggtgaatgcccagaacagtgtgcctgacgaggaggccaagacaaccaccacaaacactcaagtggaaggggatgatgaggccgcattcctggagcgcctggctcggcgtgaggaaagacgccaaaaacgccttcaggaggctctggagcggcagaaggagttcgacccaacaataacagatgcaagtctgtcgctcccaagcagaagaatgcaaaatgacacagcagaaaatgaaactaccgagaaggaagaaaaaagtgaaagtcgccaagaaagatacgagatagaggaaacagaaacagtcaccaagtcctaccagaagaatgattggagggatgctgaagaaaacaagaaagaagacaaggaaaaggaggaggaggaagaggagaagccaaagcgagggagcattggagaaaatcaggtagaggtgatggtggaagagaaaacaactgaaagccaggaggaaacagtggtaatgtcattaaaaaatgggcagatcagttcagaagagcctaaacaagaggaggagagggaacaaggttcagatgagatttcccatcatgaaaagatggaagaggaagacaaggaaagagctgaggcagagagggcaaggttggaagcagaagaaagagaaagaattaaagccgagcaagacaaaaagatagcagatgaacgagcaagaattgaagcagaagaaaaagcagctgcccaagaaagagaaaggagagaggcagaagagagggaaaggatgagggaggaagagaaaagggcagcagaggagaggcagaggataaaggaggaagagaaaagggcagcagaggagaggcagaggataaaggaggaagagaaaagggcagcagaggagaggcagaggataaaagaggaagagaaaagggcagcagaggagaggcaaagggccagggcagaggaggaagagaaggctaaggtagaagagcagaaacgtaacaagcagctagaagagaaaaaacatgccatgcaagagacaaagataaaaggggaaaaggtagaacagaaaatagaagggaaatgggtaaatgaaaagaaagcacaagaagataaacttcagacagctgtcctaaagaaacagggagaagagaagggaactaaagtgcaagctaaaagagaaaagctccaagaagacaagcctaccttcaaaaaagaagagatcaaagatgaaaagattaaaaaggacaaagaacccaaagaagaagttaagagcttcatggatcgaaagaagggatttacagaagttaagtcgcagaatggagaattcatgacccacaaacttaaacatactgagaatactttcagccgccctggagggagggccagcgtggacaccaaggaggctgagggcgccccccaggtggaagccggcaaaaggctggaggagcttcgtcgtcgtcgcggggagaccgagagcgaagagttcgagaagctcaaacagaagcagcaggaggcggctttggagctggaggaactcaagaaaaagagggaggagagaaggaaggtcctggaggaggaagagcagaggaggaagcaggaggaagccgatcgaaaactcagagaggaggaagagaagaggaggctaaaggaagagattgaaaggcgaagagcagaagctgctgagaaacgccagaagatgccagaagatggcttgtcagatgacaagaaaccattcaagtgtttcactcctaaaggttcatctctcaagatagaagagcgagcagaatttttgaataagtctgtgcagaaaagcagtggtgtcaaatcgacccatcaagcagcaatagtctccaagattgacagcagactggagcagtataccagtgcaattgagggaacaaaaagcgcaaaacctacaaagccggcagcctcggatcttcctgttcctgctgaaggtgtacgcaacatcaagagtatgtgggagaaagggaatgtgttttcatcccccactgcagcaggcacaccaaataaggaaactgctggcttgaaggtaggggtttctagccgcatcaatgaatggctaactaaaaccccagatggaaacaagtcacctgctcccaaaccttctgacttgagaccaggagacgtatccagcaagcggaacctctgggaaaagcaatctgtggataaggtcacttcccccactaaggtttgagacagttccagaaagaacccaagctcaagacgcaggacgagctcagttgtagagggctaattcgctctgttttgtatttatgttgatttactaaattgggttcattatcttttatttttcaatatcccagtaaacccatgtatattatcactatatttaataatcacagtctagagatgttcatggtaaaagtactgcctttgcacaggagcctgtttctaaagaaacccatgctgtgaaatagagacttttctactgatcatcataactctgtatctgagcagtgataccaaccacatctgaagtcaacagaagatccaagtttaaaattgcctgcggaatgtgtgcagtatctagaaaaatgaaccgtagtttttgtttttttaaatacagaagtcatgttgtttctgcactttataataaagcatggaagaaattatcttagtaggcaattgtaacactttttgaaagtaacccatttcagatttgaaatactgcaataatggttgtctttaaaaaaaaaaaagaaatgtactgttaaggtattactttttttcatgctgatgattcatatctaaattacattattatgttagctgacagtggtactgattttttaggttggttgttttgtggatttctttagtagtgatagtagcctgaaccacattttagataactcaattatgtatgtatgtgcatacacatatacaaacacactaatggtagaatgcttttttatgtgctagactattatatttagtagtatgtcattgtaactagccaatatcacagcttttgaaaaattaaaaaatcacactatattaatattttatatttgccaacagaaacatggcagataggtatcaatatgttttcaatgcctgatgacctataagaagaaagtattgaaaagaagagagattagaactgttagaaggagttgaaattttctaaaagacatagtatttagtttataattaaatgcattcttgaagtcc

SEQ ID NO: 691 - DNA, 4114 bp, Homo sapiens
  source 1..4114: mol_type = genomic DNA
ctgtgctcctgcttaaagaaatcagtccttcctttccgacttagtcctcgggaagaagtttcagactacaaggtatcattggaacatttcaagatcatcaaatcaaattccacagggattggtgaccaaccagaaggctcagacatctgattgctgacctgtccagacatcatctggtctccctgaacctgaaatcacaccatggatgattttgagcgtcgcagagaacttagaaggcaaaagagggaggagatgcgactcgaagcagaaagaatcgcctaccagaggaatgacgatgatgaagaggaggcagcccgggaacggcgccgccgagcccgacaggaacggctgcggcagaagcaggaggaagaatccttgggacaggtgaccgaccaggtggaggtgaatgcccagaacagtgtgcctgacgaggaggccaagacaaccaccacaaacactcaagtggaaggggatgatgaggccgcattcctggagcgcctggctcggcgtgaggaaagacgccaaaaacgccttcaggaggctctggagcggcagaaggagttcgacccaacaataacagatgcaagtctgtcgctcccaagcagaagaatgcaaaatgacacagcagaaaatgaaactaccgagaaggaagaaaaaagtgaaagtcgccaagaaagatacgagatagaggaaacagaaacagtcaccaagtcctaccagaagaatgattggagggatgctgaagaaaacaagaaagaagacaaggaaaaggaggaggaggaagaggagaagccaaagcgagggagcattggagaaaatcagatcaaagatgaaaagattaaaaaggacaaagaacccaaagaagaagttaagagcttcatggatcgaaagaagggatttacagaagttaagtcgcagaatggagaattcatgacccacaaacttaaacatactgagaatactttcagccgccctggagggagggccagcgtggacaccaaggaggctgagggcgccccccaggtggaagccggcaaaaggctggaggagcttcgtcgtcgtcgcggggagaccgagagcgaagagttcgagaagctcaaacagaagcagcaggaggcggctttggagctggaggaactcaagaaaaagagggaggagagaaggaaggtcctggaggaggaagagcagaggaggaagcaggaggaagccgatcgaaaactcagagaggaggaagagaagaggaggctaaaggaagagattgaaaggcgaagagcagaagctgctgagaaacgccagaagatgccagaagatggcttgtcagatgacaagaaaccattcaagtgtttcactcctaaaggttcatctctcaagatagaagagcgagcagaatttttgaataagtctgtgcagaaaagcagtggtgtcaaatcgacccatcaagcagcaatagtctccaagattgacagcagactggagcagtataccagtgcaattgagggaacaaaaagcgcaaaacctacaaagccggcagcctcggatcttcctgttcctgctgaaggtgtacgcaacatcaagagtatgtgggagaaagggaatgtgttttcatcccccactgcagcaggcacaccaaataaggaaactgctggcttgaaggtaggggtttctagccgcatcaatgaatggctaactaaaaccccagatggaaacaagtcacctgctcccaaaccttctgacttgagaccaggagacgtatccagcaagcggaacctctgggaaaagcaatctgtggataaggtcacttcccccactaaggtttgagacagttccagaaagaacccaagctcaagacgcaggacgagctcagttgtagagggctaattcgctctgttttgtatttatgttgatttactaaattgggttcattatcttttatttttcaatatcccagtaaacccatgtatattatcactatatttaataatcacagtctagagatgttcatggtaaaagtactgcctttgcacaggagcctgtttctaaagaaacccatgctgtgaaatagagacttttctactgatcatcataactctgtatctgagcagtgataccaaccacatctgaagtcaacagaagatccaagtttaaaattgcctgcggaatgtgtgcagtatctagaaaaatgaaccgtagtttttgtttttttaaatacagaagtcatgttgtttctgcactttataataaagcatggaagaaattatcttagtaggcaattgtaacactttttgaaagtaacccatttcagatttgaaatactgcaataatggttgtctttaaaaaaaaaaaagaaatgtactgttaaggtattactttttttcatgctgatgattcatatctaaattacattattatgttagctgacagtggtactgattttttaggttggttgttttgtggatttctttagtagtgatagtagcctgaaccacattttagataactcaattatgtatgtatgtgcatacacatatacaaacacactaatggtagaatgcttttttatgtgctagactattatatttagtagtatgtcattgtaactagccaatatcacagcttttgaaaaattaaaaaatcacactatattaatattttatatttgccaacagaaacatggcagataggtatcaatatgttttcaatgcctgatgacctataagaagaaagtattgaaaagaagagagattagaactgttagaaggagttgaaattttctaaaagacatagtatttagtttataattaaatgcattcttgaagtccagtgtgaattttattaatgctatcatctcgaccaagctcaaagcctacttattagaaacaatgaagttcacaataggtcataaggtctcttccttttctaaaattgaaagacaagaaatttagtgccaatattgtacagacagaaattccatgtatgagtctcaacaaagactacctttggctaaatgtctagaagcagagaagtaaagtgagcaaaatccagtgttgaggagtcatgacagtactttgatctttatatactctgaagcatttcttcaaacttttctacttttatttgtcattgatacctgtagtaagttgacaatgtggtgaaatttcaaaattatatgtaacttctactagttttactttctcccccaagtcttttttaactcatgatttttacacacacaatccagaacttattatatagcctctaagtctttattcttcacagtagataatgaaagagtcctccagtgtcttggcaaaatgttctagtatagctggatacatacagtggagttctataaactcatacctcagtggacttaaccaaaattgtgttagtctcaattcctaccacactgagggagcctcccaaataactattttcttatctgcagtattcctccagaagagctaaccagggcagggctggcatgagaagtgacatctgcgttacaaagtctatcttcctcataagtctgtaaagagcaattgaatcttctagctttagcaaacctaagccaaaggaaggaaagccatgaagaatgcagaagtcaaaccctcatgacaaagtaggcacaagtctacaataagctaaatcagaatttacaaatacaagtgtcccaggtagcattgactcccgtcattggagtgaaatggatcaaagtttgaattaaggcctatggtaaggtaacattgctttgttgtacttttgaacaagagctcctcctgatcactattacatatttttctagaaaatctaaagttcagaagagaatgtatcactgctgacttttattccaatatttggatggagtaagttttagggtagaattttgttcagtttggatttaatcttttgaaaagtaaattccttgtttactggtttgactataattctctgttatctttacgaggtaaaactgcaagctgactagcatgttctgtgaatctgccattcctaaaaattttataaacacttgatacttttcactgataatggatcgctccaataaacatatattgtgaaaatgcatccacaataaatggaattccttcctgcaaaa

SEQ ID NO: 692 - DNA, 4281 bp, Homo sapiens
  source 1..4281: mol_type = genomic DNA
aacgggttgggaggagtagatttggctgaggacaagcccagactttcgtcacagggacagaccaacgtgttaacacaaagggagaacacgggagcatcctgcaccgtgcatttcagccacagatcacatggcccctccgcgggcccagcccacgccctgaccgcccggcctggccaggtctccgtatctctctgccccgccgccccttcccaactgcggacatgctgggtggatccggatcgcatggaagacgcagcctggccgcgctctcccaaatcgcctaccagaggaatgacgatgatgaagaggaggcagcccgggaacggcgccgccgagcccgacaggaacggctgcggcagaagcaggaggaagaatccttgggacaggtgaccgaccaggtggaggtgaatgcccagaacagtgtgcctgacgaggaggccaagacaaccaccacaaacactcaagtggaaggggatgatgaggccgcattcctggagcgcctggctcggcgtgaggaaagacgccaaaaacgccttcaggaggctctggagcggcagaaggagttcgacccaacaataacagatgcaagtctgtcgctcccaagcagaagaatgcaaaatgacacagcagaaaatgaaactaccgagaaggaagaaaaaagtgaaagtcgccaagaaagatacgagatagaggaaacagaaacagtcaccaagtcctaccagaagaatgattggagggatgctgaagaaaacaagaaagaagacaaggaaaaggaggaggaggaagaggagaagccaaagcgagggagcattggagaaaatcagggagaagagaagggaactaaagtgcaagctaaaagagaaaagctccaagaagacaagcctaccttcaaaaaagaagagatcaaagatgaaaagattaaaaaggacaaagaacccaaagaagaagttaagagcttcatggatcgaaagaagggatttacagaagttaagtcgcagaatggagaattcatgacccacaaacttaaacatactgagaatactttcagccgccctggagggagggccagcgtggacaccaaggaggctgagggcgccccccaggtggaagccggcaaaaggctggaggagcttcgtcgtcgtcgcggggagaccgagagcgaagagttcgagaagctcaaacagaagcagcaggaggcggctttggagctggaggaactcaagaaaaagagggaggagagaaggaaggtcctggaggaggaagagcagaggaggaagcaggaggaagccgatcgaaaactcagagaggaggaagagaagaggaggctaaaggaagagattgaaaggcgaagagcagaagctgctgagaaacgccagaagatgccagaagatggcttgtcagatgacaagaaaccattcaagtgtttcactcctaaaggttcatctctcaagatagaagagcgagcagaatttttgaataagtctgtgcagaaaagcagtggtgtcaaatcgacccatcaagcagcaatagtctccaagattgacagcagactggagcagtataccagtgcaattgagggaacaaaaagcgcaaaacctacaaagccggcagcctcggatcttcctgttcctgctgaaggtgtacgcaacatcaagagtatgtgggagaaagggaatgtgttttcatcccccactgcagcaggcacaccaaataaggaaactgctggcttgaaggtaggggtttctagccgcatcaatgaatggctaactaaaaccccagatggaaacaagtcacctgctcccaaaccttctgacttgagaccaggagacgtatccagcaagcggaacctctgggaaaagcaatctgtggataaggtcacttcccccactaaggtttgagacagttccagaaagaacccaagctcaagacgcaggacgagctcagttgtagagggctaattcgctctgttttgtatttatgttgatttactaaattgggttcattatcttttatttttcaatatcccagtaaacccatgtatattatcactatatttaataatcacagtctagagatgttcatggtaaaagtactgcctttgcacaggagcctgtttctaaagaaacccatgctgtgaaatagagacttttctactgatcatcataactctgtatctgagcagtgataccaaccacatctgaagtcaacagaagatccaagtttaaaattgcctgcggaatgtgtgcagtatctagaaaaatgaaccgtagtttttgtttttttaaatacagaagtcatgttgtttctgcactttataataaagcatggaagaaattatcttagtaggcaattgtaacactttttgaaagtaacccatttcagatttgaaatactgcaataatggttgtctttaaaaaaaaaaaagaaatgtactgttaaggtattactttttttcatgctgatgattcatatctaaattacattattatgttagctgacagtggtactgattttttaggttggttgttttgtggatttctttagtagtgatagtagcctgaaccacattttagataactcaattatgtatgtatgtgcatacacatatacaaacacactaatggtagaatgcttttttatgtgctagactattatatttagtagtatgtcattgtaactagccaatatcacagcttttgaaaaattaaaaaatcacactatattaatattttatatttgccaacagaaacatggcagataggtatcaatatgttttcaatgcctgatgacctataagaagaaagtattgaaaagaagagagattagaactgttagaaggagttgaaattttctaaaagacatagtatttagtttataattaaatgcattcttgaagtccagtgtgaattttattaatgctatcatctcgaccaagctcaaagcctacttattagaaacaatgaagttcacaataggtcataaggtctcttccttttctaaaattgaaagacaagaaatttagtgccaatattgtacagacagaaattccatgtatgagtctcaacaaagactacctttggctaaatgtctagaagcagagaagtaaagtgagcaaaatccagtgttgaggagtcatgacagtactttgatctttatatactctgaagcatttcttcaaacttttctacttttatttgtcattgatacctgtagtaagttgacaatgtggtgaaatttcaaaattatatgtaacttctactagttttactttctcccccaagtcttttttaactcatgatttttacacacacaatccagaacttattatatagcctctaagtctttattcttcacagtagataatgaaagagtcctccagtgtcttggcaaaatgttctagtatagctggatacatacagtggagttctataaactcatacctcagtggacttaaccaaaattgtgttagtctcaattcctaccacactgagggagcctcccaaataactattttcttatctgcagtattcctccagaagagctaaccagggcagggctggcatgagaagtgacatctgcgttacaaagtctatcttcctcataagtctgtaaagagcaattgaatcttctagctttagcaaacctaagccaaaggaaggaaagccatgaagaatgcagaagtcaaaccctcatgacaaagtaggcacaagtctacaataagctaaatcagaatttacaaatacaagtgtcccaggtagcattgactcccgtcattggagtgaaatggatcaaagtttgaattaaggcctatggtaaggtaacattgctttgttgtacttttgaacaagagctcctcctgatcactattacatatttttctagaaaatctaaagttcagaagagaatgtatcactgctgacttttattccaatatttggatggagtaagttttagggtagaattttgttcagtttggatttaatcttttgaaaagtaaattccttgtttactggtttgactataattctctgttatctttacgaggtaaaactgcaagctgactagcatgttctgtgaatctgccattcctaaaaattttataaacacttgatacttttcactgataatggatcgctccaataaacatatattgtgaaaatgcatccacaataaatggaattccttcctgcaaaatgtctttttctcacttatttttatgtacaatattgatagtgagaggtatgtctattataataaagattatggcacagtaaaacctgt

SEQ ID NO: 693 - DNA, 1915 bp, Homo sapiens
  source 1..1915: mol_type = genomic DNA
atattcaagcctgctctcaggcctgaaatcttttgacttcattctcaggaggcaagactgggtctacctctagatgtctctgatgggatttagtgtgcagcttgaaatgcaggtatcattggaacatttcaagatcatcaaatcaaattccacagggattggtgaccaaccagaaggctcagacatctgattgctgacctgtccagacatcatctggtctccctgaacctgaaatcacaccatggatgattttgagcgtcgcagagaacttagaaggcaaaagagggaggagatgcgactcgaagcagaaagaatcgcctaccagaggaatgacgatgatgaagaggaggcagcccgggaacggcgccgccgagcccgacaggaacggctgcggcagaagcaggaggaagaatccttgggacaggtgaccgaccaggtggaggtgaatgcccagaacagtgtgcctgacgaggaggccaagacaaccaccacaaacactcaagtggaaggggatgatgaggccgcattcctggagcgcctggctcggcgtgaggaaagacgccaaaaacgccttcaggaggctctggagcggcagaaggagttcgacccaacaataacagatgcaagtctgtcgctcccaagcagaagaatgcaaaatgacacagcagaaaatgaaactaccgagaaggaagaaaaaagtgaaagtcgccaagaaagatacgagatagaggaaacagaaacagtcaccaagtcctaccagaagaatgattggagggatgctgaagaaaacaagaaagaagacaaggaaaaggaggaggaggaagaggagaagccaaagcgagggagcattggagaaaatcagatcaaagatgaaaagattaaaaaggacaaagaacccaaagaagaagttaagagcttcatggatcgaaagaagggatttacagaagttaagtcgcagaatggagaattcatgacccacaaacttaaacatactgagaatactttcagccgccctggagggagggccagcgtggacaccaaggaggctgagggcgccccccaggtggaagccggcaaaaggctggaggagcttcgtcgtcgtcgcggggagaccgagagcgaagagttcgagaagctcaaacagaagcagcaggaggcggctttggagctggaggaactcaagaaaaagagggaggagagaaggaaggtcctggaggaggaagagcagaggaggaagcaggaggaagccgatcgaaaactcagagaggaggaagagaagaggaggctaaaggaagagattgaaaggcgaagagcagaagctgctgagaaacgccagaagatgccagaagatggcttgtcagatgacaagaaaccattcaagtgtttcactcctaaaggttcatctctcaagatagaagagcgagcagaatttttgaataagtctgtgcagaaaagcagtggtgtcaaatcgacccatcaagcagcaatagtctccaagattgacagcagactggagcagtataccagtgcaattgagggaacaaaaagcgcaaaacctacaaagccggcagcctcggatcttcctgttcctgctgaaggtgtacgcaacatcaagagtatgtgggagaaagggaatgtgttttcatcccccactgcagcaggcacaccaaataaggaaactgctggcttgaaggtaggggtttctagccgcatcaatgaatggctaactaaaaccccagatggaaacaagtcacctgctcccaaaccttctgacttgagaccaggagacgtatccagcaagcggaacctctgggaaaagcaatctgtggataaggtcacttcccccactaaggtttgagacagttccagaaagaacccaagctcaagacgcaggacgagctcagttgtagagggc

SEQ ID NO: 694 - DNA, 2665 bp, Homo sapiens
  source 1..2665: mol_type = genomic DNA
gatttcctgagcatgcctagggaatgacaggcatctccacaggcaggctgcatccaccttggctggggtgtcgtcattggctgcctattagaaaaacgacaggacaatgcataccaccgcctcccgactgtaaacataggggatatgtgttcacttagcatggacttctgggaggggccaaggaagggcggtctggagttttattgaatagagcagtgtgtattcggctgcctgcctgcccgcctgcttgctctctggctgtgctcctgcttaaagaaatcagtccttcctttccgacttagtcctcgggaagaagtttcagactacaaggtatcattggaacatttcaagatcatcaaatcaaattccacagggattggtgaccaaccagaaggctcagacatctgattgctgacctgtccagacatcatctggtctccctgaacctgaaatcacaccatggatgattttgagcgtcgcagagaacttagaaggcaaaagagggaggagatgcgactcgaagcagaaagaatcgcctaccagaggaatgacgatgatgaagaggaggcagcccgggaacggcgccgccgagcccgacaggaacggctgcggcagaagcaggaggaagaatccttgggacaggtgaccgaccaggtggaggtgaatgcccagaacagtgtgcctgacgaggaggccaagacaaccaccacaaacactcaagtggaaggggatgatgaggccgcattcctggagcgcctggctcggcgtgaggaaagacgccaaaaacgccttcaggaggctctggagcggcagaaggagttcgacccaacaataacagatgcaagtctgtcgctcccaagcagaagaatgcaaaatgacacagcagaaaatgaaactaccgagaaggaagaaaaaagtgaaagtcgccaagaaagatacgagatagaggaaacagaaacagtcaccaagtcctaccagaagaatgattggagggatgctgaagaaaacaagaaagaagacaaggaaaaggaggaggaggaagaggagaagccaaagcgagggagcattggagaaaatcagggagaagagaagggaactaaagtgcaagctaaaagagaaaagctccaagaagacaagcctaccttcaaaaaagaagagatcaaagatgaaaagattaaaaaggacaaagaacccaaagaagaagttaagagcttcatggatcgaaagaagggatttacagaagttaagtcgcagaatggagaattcatgacccacaaacttaaacatactgagaatactttcagccgccctggagggagggccagcgtggacaccaaggaggctgagggcgccccccaggtggaagccggcaaaaggctggaggagcttcgtcgtcgtcgcggggagaccgagagcgaagagttcgagaagctcaaacagaagcagcaggaggcggctttggagctggaggaactcaagaaaaagagggaggagagaaggaaggtcctggaggaggaagagcagaggaggaagcaggaggaagccgatcgaaaactcagagaggaggaagagaagaggaggctaaaggaagagattgaaaggcgaagagcagaagctgctgagaaacgccagaagatgccagaagatggcttgtcagatgacaagaaaccattcaagtgtttcactcctaaaggttcatctctcaagatagaagagcgagcagaatttttgaataagtctgtgcagaaaagtggtgtcaaatcgacccatcaagcagcaatagtctccaagattgacagcagactggagcagtataccagtgcaattgagggaacaaaaagcgcaaaacctacaaagccggcagcctcggatcttcctgttcctgctgaaggtgtacgcaacatcaagagtatgtgggagaaagggaatgtgttttcatcccccactgcagcaggcacaccaaataaggaaactgctggcttgaaggtaggggtttctagccgcatcaatgaatggctaactaaaaccccagatggaaacaagtcacctgctcccaaaccttctgacttgagaccaggagacgtatccagcaagcggaacctctgggaaaagcaatctgtggataaggtcacttcccccactaaggtttgagacagttccagaaagaacccaagctcaagacgcaggacgagctcagttgtagagggctaattcgctctgttttgtatttatgttgatttactaaattgggttcattatcttttatttttcaatatcccagtaaacccatgtatattatcactatatttaataatcacagtctagagatgttcatggtaaaagtactgcctttgcacaggagcctgtttctaaagaaacccatgctgtgaaatagagacttttctactgatcatcataactctgtatctgagcagtgataccaaccacatctgaagtcaacagaagatccaagtttaaaattgcctgcggaatgtgtgcagtatctagaaaaatgaaccgtagtttttgtttttttaaatacagaagtcatgttgtttctgcactttataataaagcatggaagaaattatcttagtaggcaattgtaacactttttgaaagtaacccatttcagatttgaaatactgcaataatggttgtcttt

SEQ ID NO: 695 - DNA, 2124 bp, Homo sapiens
  source 1..2124: mol_type = genomic DNA
caactgcggacatgctgggtggatccggatcgcatggaagacgcagcctggccgcgctctcccaaatcgcctaccagaggaatgacgatgatgaagaggaggcagcccgggaacggcgccgccgagcccgacaggaacggctgcggcagaagcaggaggaagaatccttgggacaggtgaccgaccaggtggaggtgaatgcccagaacagtgtgcctgacgaggaggccaagacaaccaccacaaacactcaagtggaaggggatgatgaggccgcattcctggagcgcctggctcggcgtgaggaaagacgccaaaaacgccttcaggaggctctggagcggcagaaggagttcgacccaacaataacagatgcaagtctgtcgctcccaagcagaagaatgcaaaatgacacagcagaaaatgaaactaccgagaaggaagaaaaaagtgaaagtcgccaagaaagatacgagatagaggaaacagaaacagtcaccaagtcctaccagaagaatgattggagggatgctgaagaaaacaagaaagaagacaaggaaaaggaggaggaggaagaggagaagccaaagcgagggagcattggagaaaatcagatcaaagatgaaaagattaaaaaggacaaagaacccaaagaagaagttaagagcttcatggatcgaaagaagggatttacagaagttaagtcgcagaatggagaattcatgacccacaaacttaaacatactgagaatactttcagccgccctggagggagggccagcgtggacaccaaggaggctgagggcgccccccaggtggaagccggcaaaaggctggaggagcttcgtcgtcgtcgcggggagaccgagagcgaagagttcgagaagctcaaacagaagcagcaggaggcggctttggagctggaggaactcaagaaaaagagggaggagagaaggaaggtcctggaggaggaagagcagaggaggaagcaggaggaagccgatcgaaaactcagagaggaggaagagaagaggaggctaaaggaagagattgaaaggcgaagagcagaagctgctgagaaacgccagaagatgccagaagatggcttgtcagatgacaagaaaccattcaagtgtttcactcctaaaggttcatctctcaagatagaagagcgagcagaatttttgaataagtctgtgcagaaaagcagtggtgtcaaatcgacccatcaagcagcaatagtctccaagattgacagcagactggagcagtataccagtgcaattgagggaacaaaaagcgcaaaacctacaaagccggcagcctcggatcttcctgttcctgctgaaggtgtacgcaacatcaagagtatgtgggagaaagggaatgtgttttcatcccccactgcagcaggcacaccaaataaggaaactgctggcttgaaggtaggggtttctagccgcatcaatgaatggctaactaaaaccccagatggaaacaagtcacctgctcccaaaccttctgacttgagaccaggagacgtatccagcaagcggaacctctgggaaaagcaatctgtggataaggtcacttcccccactaaggtttgagacagttccagaaagaacccaagctcaagacgcaggacgagctcagttgtagagggctaattcgctctgttttgtatttatgttgatttactaaattgggttcattatcttttatttttcaatatcccagtaaacccatgtatattatcactatatttaataatcacagtctagagatgttcatggtaaaagtactgcctttgcacaggagcctgtttctaaagaaacccatgctgtgaaatagagacttttctactgatcatcataactctgtatctgagcagtgataccaaccacatctgaagtcaacagaagatccaagtttaaaattgcctgcggaatgtgtgcagtatctagaaaaatgaaccgtagtttttgtttttttaaatacagaagtcatgttgtttctgcactttataataaagcatggaagaaattatcttagtaggcaattgtaacactttttgaaagtaacccatttcagatttgaaatactgcaataatggttgtcttt

SEQ ID NO: 696 - DNA, 2163 bp, Homo sapiens
  source 1..2163: mol_type = genomic DNA
gatttcctgagcatgcctagggaatgacaggcatctccacaggcaggctgcatccaccttggctggggtgtcgtcattggctgcctattagaaaaacgacaggacaatgcataccaccgcctcccgactgtaaacataggggatatgtgttcacttagcatggacttctgggaggggccaaggaagggcggtctggagttttattgaatagagcagtgtgtattcggctgcctgcctgcccgcctgcttgctctctggctgtgctcctgcttaaagaaatcagtccttcctttccgacttagtcctcgggaagaagtttcagactacaaggtatcattggaacatttcaagatcatcaaatcaaattccacagggattggtgaccaaccagaaggctcagacatctgattgctgacctgtccagacatcatctggtctccctgaacctgaaatcacaccatggatgattttgagcgtcgcagagaacttagaaggcaaaagagggaggagatgcgactcgaagcagaaagaatcgcctaccagaggaatgacgatgatgaagaggaggcagcccgggaacggcgccgccgagcccgacaggaacggctgcggcagaagcaggaggaagaatccttgggacaggtgaccgaccaggtggaggtgaatgcccagaacagtgtgcctgacgaggaggccaagacaaccaccacaaacactcaagtggaaggggatgatgaggccgcattcctggagcgcctggctcggcgtgaggaaagacgccaaaaacgccttcaggaggctctggagcggcagaaggagttcgacccaacaataacagatgcaagtctgtcgctcccaagcagaagaatgcaaaatgacacagcagaaaatgaaactaccgagaaggaagaaaaaagtgaaagtcgccaagaaagatacgagatagaggaaacagaaacagtcaccaagtcctaccagaagaatgattggagggatgctgaagaaaacaagaaagaagacaaggaaaaggaggaggaggaagaggagaagccaaagcgagggagcattggagaaaatcagggagaagagaagggaactaaagtgcaagctaaaagagaaaagctccaagaagacaagcctaccttcaaaaaagaagagatcaaagatgaaaagattaaaaaggacaaagaacccaaagaagaagttaagagcttcatggatcgaaagaagggatttacagaagttaagtcgcagaatggagaattcatgacccacaaacttaaacatactgagaatactttcagccgccctggagggagggccagcgtggacaccaaggaggctgagggcgccccccaggtggaagccggcaaaaggctggaggagcttcgtcgtcgtcgcggggagaccgagagcgaagagttcgagaagctcaaacagaagcagcaggaggcggctttggagctggaggaactcaagaaaaagagggaggagagaaggaaggtcctggaggaggaagagcagaggaggaagcaggaggaagccgatcgaaaactcagagaggaggaagagaagaggaggctaaaggaagagattgaaaggcgaagagcagaagctgctgagaaacgccagaagatgccagaagatggcttgtcagatgacaagaaaccattcaagtgtttcactcctaaaggttcatctctcaagatagaagagcgagcagaatttttgaataagtctgtgcagaaaagtggtgtcaaatcgacccatcaagcagcaatagtctccaagattgacagcagactggagcagtataccagtgcaattgagggaacaaaaagcgcaaaacctacaaagccggcagcctcggatcttcctgttcctgctgaaggtgtacgcaacatcaagagtatgtgggagaaagggaatgtgttttcatcccccactgcagcaggcacaccaaataaggaaactgctggcttgaaggtaggggtttctagccgcatcaatgaatggctaactaaaaccccagatggaaacaagtcacctgctcccaaaccttctctgaccttctgttcctcactctttggtctctggttgattggaaacctgcttctcctgccttcatttctccctcttcttccggagtgggtctttctctaa

SEQ ID NO: 697 - DNA, 458 bp, Homo sapiens
  source 1..458: mol_type = genomic DNA
aaccactgacagctctgtaaacaaagcaaggacaaaaagagcccgcttccccctttctggtagtcattttgggtttgggggctgcaggggaattctggaatacttgactccatggcacagaaacgcaggggaaacgggctcctcatttaaagagctggaaggggaaggtctttccggaattaaaaccatcacagaggaggtccagacatcatctggtctccctgaacctgaaatcacaccatggatgattttgagcgtcgcagagaacttagaaggcaaaagagggaggagatgcgactcgaagcagaaagaatcgcctaccagaggaatgacgatgatgaagaggaggcagcccgggaacggcgccgccgagcccgacaggaacggctgcggcagaagcaggaggaagaatccttgggacaggtgaccgaccaggtggaggtgaatgcccagaacag

SEQ ID NO: 698 - DNA, 1614 bp, Homo sapiens
  source 1..1614: mol_type = genomic DNA
aagaattctggattaaactccctcccttgcattgtattcaggggtgccttccttgaagaattgaaagcagaaagatttgggagctgagagttaagctgaacaaaaggtatcattggaacatttcaagatcatcaaatcaaattccacagggattggtgaccaaccagaaggctcagacatctgattgctgacctgtccagacatcatctggtctccctgaacctgaaatcacaccatggatgattttgagcgtcgcagagaacttagaaggcaaaagagggaggagatgcgactcgaagcagaaagaatcgcctaccagaggaatgacgatgatgaagaggaggcagcccgggaacggcgccgccgagcccgacaggaacggctgcggcagaagcaggaggaagaatccttgggacaggtgaccgaccaggtggaggtgaatgcccagaacagtgtgcctgacgaggaggccaagacaaccaccacaaacactcaagtggaaggggatgatgaggccgcattcctggagcgcctggctcggcgtgaggaaagacgccaaaaacgccttcaggaggctctggagcggcagaaggagttcgacccaacaataacagatgcaagtctgtcgctcccaagcagaagaatgcaaaatgacacagcagaaaatgaaactaccgagaaggaagaaaaaagtgaaagtcgccaagaaagatacgagatagaggaaacagaaacagtcaccaagtcctaccagaagaatgattggagggatgctgaagaaaacaagaaagaagacaaggaaaaggaggaggaggaagaggagaagccaaagcgagggagcattggagaaaatcagatcaaagatgaaaagattaaaaaggacaaagaacccaaagaagaagttaagagcttcatggatcgaaagaagggatttacagaagttaagtcgcagaatggagaattcatgacccacaaacttaaacatactgagaatactttcagccgccctggagggagggccagcgtggacaccaaggaggctgagggcgccccccaggtggaagccggcaaaaggctggaggagcttcgtcgtcgtcgcggggagaccgagagcgaagagttcgagaagctcaaacagaagcagcaggaggcggctttggagctggaggaactcaagaaaaagagggaggagagaaggaaggtcctggaggaggaagagcagaggaggaagcaggaggaagccgatcgaaaactcagagaggaggaagagaagaggaggctaaaggaagagattgaaaggcgaagagcagaagctgctgagaaacgccagaagatgccagaagatggcttgtcagatgacaagaaaccattcaagtgtttcactcctaaaggttcatctctcaagatagaagagcgagcagaatttttgaataagtctgtgcagaaaagcagtggtgtcaaatcgacccatcaagcagcaatagtctccaagattgacagcagactggagcagtataccagtgcaattgagggaacaaaaagcgcaaaacctacaaagccggcagcctcggatcttcctgttcctgctgaaggtgtacgcaacatcaagagtat

SEQ ID NO: 699 - DNA, 558 bp, Homo sapiens
  source 1..558: mol_type = genomic DNA
gaatagagcagtgtgtattcggctgcctgcctgcccgcctgcttgctctctggctgtgctcctgcttaaagaaatcagtccttcctttccgacttagtcctcgggaagaagtttcagactacaaggtatcattggaacatttcaagatcatcaaatcaaattccacagggattggtgaccaaccagaaggctcagacatctgattgctgaccttcctggatcaatcatgaagtcttcacttcctgtgaaaaatgctagtgacttgaatcaataaagacaacatgagtcagccttccaaggtccagacatcatctggtctccctgaacctgaaatcacaccatggatgattttgagcgtcgcagagaacttagaaggcaaaagagggaggagatgcgactcgaagcagaaagaatcgcctaccagaggaatgacgatgatgaagaggaggcagcccgggaacggcgccgccgagcccgacaggaacggctgcggcagaagcaggaggaagaatccttgggacaggtgaccgaccaggtggaggtgaatgcccagaacag

SEQ ID NO: 700 - DNA, 1978 bp, Homo sapiens
  source 1..1978: mol_type = genomic DNA
gaggctgtgagccccaggcattcttctttggggtgtggccttcatggggagtgtattgctgcagaaagctggggacagaatagtgttctggattgagtatctcagttaccagcctgaaatctccatcgaccaacactgccttctctcaaatgacttcttatatgaaagtggacagacagtggaatgcagaaattttagagctgatcttggggaccggtcaactgtctactggccaaatcgcctaccagaggaatgacgatgatgaagaggaggcagcccgggaacggcgccgccgagcccgacaggaacggctgcggcagaagcaggaggaagaatccttgggacaggtgaccgaccaggtggaggtgaatgcccagaacagtgtgcctgacgaggaggccaagacaaccaccacaaacactcaagtggaaggggatgatgaggccgcattcctggagcgcctggctcggcgtgaggaaagacgccaaaaacgccttcaggaggctctggagcggcagaaggagttcgacccaacaataacagatgcaagtctgtcgctcccaagcagaagaatgcaaaatgacacagcagaaaatgaaactaccgagaaggaagaaaaaagtgaaagtcgccaagaaagatacgagatagaggaaacagaaacagtcaccaagtcctaccagaagaatgattggagggatgctgaagaaaacaagaaagaagacaaggaaaaggaggaggaggaagaggagaagccaaagcgagggagcattggagaaaatcagatcaaagatgaaaagattaaaaaggacaaagaacccaaagaagaagttaagagcttcatggatcgaaagaagggatttacagaagttaagtcgcagaatggagaattcatgacccacaaacttaaacatactgagaatactttcagccgccctggagggagggccagcgtggacaccaaggaggctgagggcgccccccaggtggaagccggcaaaaggctggaggagcttcgtcgtcgtcgcggggagaccgagagcgaagagttcgagaagctcaaacagaagcagcaggaggcggctttggagctggaggaactcaagaaaaagagggaggagagaaggaaggtcctggaggaggaagagcagaggaggaagcaggaggaagccgatcgaaaactcagagaggaggaagagaagaggaggctaaaggaagagattgaaaggcgaagagcagaagctgctgagaaacgccagaagatgccagaagatggcttgtcagatgacaagaaaccattcaagtgtttcactcctaaaggttcatctctcaagatagaagagcgagcagaatttttgaataagtctgtgcagaaaagcagtggtgtcaaatcgacccatcaagcagcaatagtctccaagattgacagcagactggagcagtataccagtgcaattgagggaacaaaaagcgcaaaacctacaaagccggcagcctcggatcttcctgttcctgctgaaggtgtacgcaacatcaagagtatgtgggagaaagggaatgtgttttcatcccccactgcagcaggcacaccaaataaggaaactgctggcttgaaggtaggggtttctagccgcatcaatgaatggctaactaaaaccccagatggaaacaagtcacctgctcccaaaccttctgacttgagaccaggagacgtatccagcaagcggaacctctgggaaaagcaatctgtggataaggtcacttcccccactaaggtttgagacagttccagaaagaacccaagctcaagacgcaggacgagctcagttgtagagggctaattcgctctgttttgtatttatgttgatttactaaattgggttcattatcttttatttttcaatatcccagtaaacccatgtatattatcactatatttaataatcacagtctagagatgttcatggtaaaagtactg

SEQ ID NO: 701 - DNA, 6054 bp, Homo sapiens
  source 1..6054: mol_type = genomic DNA
gtcccggaaagggatctatgtgatggagagtgatgacacccccgtgacagagtccgacctcagtcgcgcacccataaaaatgagtgcccacatggcaatggtggatgccctgatgatggcctacactgtggagatgatcagcatcgagaaggtggtggccagtgtcaagcgcttctcaacgttcagtgcctcgaaagaacttccgtacgacctcgaggatgccatggtgttctggatcaacaaggtaaatcttaaaatgagagagataacagagaaagaagttaaattaaaacaacagttattggaaagtccagctcatcaaaagatatatgcttaaaggaggtaacgtcgatggccgacagtctgtataatattcggcttctgagagaattctccaatgaatatcttaataaatgtttttatctcaccttggaagatatgctgtatgcgccattagtgttgaagccgaatgttatggtttttattgcggagcttttttggtggttcgagaatgtcaagccagattttgttcagcccagggatgttcaggagctgaaagacgcgaaaacagtgttacaccagaagagcagccggcctcctgtaccgatctccaacgcgaccaaacgcagtttcctaggcagccctgctgcagggaccctggctgagctgcagccccccgtgcagctgccggcggaaggctgtcacaggcactacctgcacccggaagaacctgaatacctcgggaaaggaactgctgccttcagcccatcccatcctttattgccactgagacagaaacagcagaaatccatacagggagaggacatccctgatcagcgacatcgatcgaattctttgacccgagttgatggtcagcctcgaggagcagcaatagcctggccagaaaaaaaaaccaggcctgcgtcccagccaacaccttttgctctacatcacgctgcgagttgtgaagtggatcccagctctggcgacagcatcagcttggcccgctccatcagcaaagacagtttggcatccaacattgttaatctgaccccacagaaccagccacaccccacggccacgaagagccacgggaagagcctcctgagcaatgtcagtattgaggatgaggaagaggagcttgtggctattgttagagcagacgtggttccccagcaggctgacccggagttccccagggcctcaccccgggccttaggccttacagcaaatgcccggtctccccaaggacagctggacacctcggaaagtaagcctgacagttttttcttggagcctttgatgccagcagttcttaagccagcgaaagagaagcaggtgatcaccaaggaggatgaacggggggaagggagaccgaggagcatcgtgtctaggaggcccagcgagggcccccagcctttggtacgaaggaaaatgactggcagtcgcgacttgaataggacttttaccccgattccatgctcagaattccccatgggcatcgaccccaccgagacaggaccactgtcagtggaaaccgcaggagaggtctgtggtgggcctctggcccttggcggattcgatccgttcccccagggaccatccacggatggcttcttccttcatgtaggcagggccgatgaagacaccgagggaaggttatatgttagttgttcaaaaagccccaactcccacgattcagagccgtggactctcctcaggcaggattctgactcggatgtggtggacatagaggaagccgagcacgatttcatgggtgaggcccatcctgtggttttcagcagatacattggggaggaagagtcggccaaactgcaggaggacatgaaggtgaaggaacatgaagacaaagatgacgccagcggccgctcgagcccctgcctgagcacagcctctcagatgagcagtgtctccatggcgagtgggagcgtgaagatgaccagctttgcggagaggaagctccagagactcaacagctgtgagaccaagtccagcaccagcagctcccagaagaccacgccagatgcgtctgagagctgcccagcccctctgacgacgtggaggcagaagagggagcagagtccgagccagcatggcaaggatcccgccagcctcctggcatctgagctggtacagctgcacatgcagctggaggagaagcgcagggccatcgaggcccagaagaagaagatggaggcgctgtcggcaaggcagcgcctgaagctcggcaaggctgcattcctgcatgtggtgaagaagggcaaggccgaggctgccccacccctcaggccggagcactttgcaaaggagtactctcagcacaacggggaggactgtggggacgctgtttccaaaaccgaagactttctcgtgaaggaggagcagagagaggagctccttcacgagccacaggatgtggacaaagagagcctggcctttgctcagcaacataaagcaaaagaccctgtggctctgcacgagctggagagaaataaggtgatctccgctgccctcctggaggacactgttggggaggttgtcgacgtgaatgaatgtgacctttccatcgagaagcttaacgaaaccatcagtacgctgcagcaggccatcctgaaaatctctcagcagcaagagcagcttctgatgaagtcccccacagtcccagtgccaggctctaagaataactcgcaggaccacaaagtgaaggcaccagtccacttcgtggagccactctctcccacgggcgtggctggccaccgcaaagccccccggctgggtcaaggccggaattcccgttccggaaggccggcggagctgaaggtcccaaaagacaggccacagggctcctcccgaagtaaaaccccaacgcccagtgtagagacgctcccgcacttgagacccttccctgccagcagccaccctcggacgcccacggaccctggcctggacagtgccctggagcccagtggtgacccacatgggaagtgtctcttcgacagttacaggctccatgatgaaagcaatcagcggacacttactctgtcctcttccaaagatgccaacattctttcggagcagatgagcctcaaagaagttctggatgcgagtgtgaaggaggtggggtccagctcctcagatgtctcgggaaaagagagcgtccccgtggaggagcctctgaggagcagggccagcctcattgaagtggacctctccgacctgaaggcccccgacgaggatggggagctggtaagcctcgatggctcggcggaccttgtcagcgaaggcgaccagaagccgggggtcggcttcttcttcaaggatgaacagaaagcggaagatgagctcgccaagaagcgggcggccttcctcctgaagcagcagcgcaaggccgaggaggcccgcgtgcgcaagcagcagctggaagcggaggtggagctcaagcgtgacgaagcccggcgcaaagctgaggaagaccgggtgcggaaggaggaggagaaggcgcggcgcgagctcatcaagcaggagtacctgcggaggaagcagcagcagatcctagaggagcaggggctcggcaagcccaagtcaaagccgaagaagccgcggccgaagtcggtgcaccgggaagagtcgtgcagcgactccggcaccaagtgctcctccacccctgataacttgagccggactcagtcaggctccagcctgtccttggcctctgcggcgacgacagaacccgagagcgttcattccgggggcacaccctctcagcgagtggaatcgatggaagccctgcccatactgagccgtaacccaagcaggagcacagaccgagactgggagaccgcgtcggcggcatcttccctggcctcagtggccgagtacacaggtcccaagctctttaaggagcccagtagtaaatcaaacaagccgattattcacaatgccatatcccattgctgcctggctggaaaagtgaacgaaccccacaagaattccatattggaggagctggagaagtgtgatgccaatcactacatcatactgtttcgtgatgctggctgccagttcagggcgctttactgctactatcctgatactgaggaaatctacaaactcactggcacggggccaaagaacatcaccaagaaaatgatcgacaaactgtataaatacagctcagaccgaaaacagtttaacttgatcccagccaaaaccatgtctgtcagtgtggacgcactcacaatccacaaccacctgtggcagcccaagcggcctgcagtgccaaagaaggcccagactcgtaaatgaccccggtgcagctggcgtccaaagggtgacccagactcgtaaatgatgcccttgtggctggcatccagagggtgccacggggtccttatttattgttttcatctatttgggtacgaagtgtgcaaagtcacagaccttttgcaaagaggtttctagacagcagaagaaaacccctctctcagcgctcatctcacgcagaggatgccaggcagggtgaggatgggggagtagatgccgcttttgcagtggctcgcactgctgtggccactgctgaccactgaggctcccagcggagggtgttcacagccaggtcccgggccacggagctcccttacttgaagttctccttcagcatagattagacgtgatccactttgctttcttgcttctcacctcgcccccttgcacattgcctgacaccctcatattggccagctgtaatctcgtgactatgggactgaggctcaatcttggcttggggtgtttgaatgtctatagcaaaggaattcataatgggaaatctttttcatttgagaaattgtatgatatttattggttgtgtctactgccaacatttatatccaattctaagatttctgaaaaaaaattcttatcccttgctgctcagaaaaagtttacggaaaacaccagttcactaaaagcaccgaaatctgcaaagcctgtcttccgctagaacaacgtctacaaatgtgaagatgatgacttctggcacgcggtcatgagggtggggaatggcactaggagctgatgtttgcctcatttaaagtaggcaagccgagccaactgcagccatcattcattaagttttgggtagtgctctaatggtttgttcactttaataaagacagattttggtaaagtagaatatttttcattctgagcatgtttgtcccaaaaggtgatgcacttaagctgacagtcccttcagtggttttgttaggtcacggcttgtcctgtctggattctgcatctggaagcgctgcatgctctcagaggagcgtgccgtttcccctgtagatggatacttttgttttgttgcctatttaaaaacaattaagtggttatttgcagttatttcagaactccaagtaagtggatggctttgggttctttctgccttggtcccaatggtgttgatgcttctgtggagcgcggacattcccaggagcaggtgcgtgccagccatggctgccagacactgctgcaactgaccagctgccggaagattctggagccactaacattagttttgcacatattttcttgggagtgttacttgaatctatctcaaactgcagaaaaaatcaaaagatcaataattgggagaaaaagagacaaatttaactgttacataattttagatagacaaaaaacatgagtgagtcgtgtacataaggagggaacatggtacagaaggctagaaggaattataggtcttattcccctttcctcagtcctttgaagagaagtacagtctcttgcgattttgtatatatcgtgttcgacacagccgctctctgtcctgtaaatagggaactaaaggctgtatgatttctcaagtgctgagttacacagtcctgagtgagctttctgttaccatactttcacacgtgggctttatttctcactgtatgtttgatatgatattactgtatttattttaagaaagcactaagatgtaataaagtgatgaactaatttgcttta

SEQ ID NO: 702 - DNA, 7696 bp, Homo sapiens
  source 1..7696: mol_type = genomic DNA
ggcgcggcgaggggcggcggcgcctttgttgcggccgggccgccgcctcagccctttgtctgcagatggtggacgcgagcggccgcgccgccgccgagggctggaggaagatggaggccccgccggacggcgccgccgacctcgtgcccctggaccgctacgacgcggcgcgcgccaagatcgccgccaacctgcagtggatctgcgccaaggcctacggccgagataacatccctgaggacctcagagaccctttctacgttgaccagtatgagcaggagcacattaagccgcctgttatcaagcttctcctgtccagcgagctgtactgccgtgtctgcagcctcatcctgaaaggggaccaggtggccgccttacagggacaccagtctgtcatccaggccctgtcccggaaagggatctatgtgatggagagtgatgacacccccgtgacagagtccgacctcagtcgcgcacccataaaaatgagtgcccacatggcaatggtggatgccctgatgatggcctacactgtggagatgatcagcatcgagaaggtggtggccagtgtcaagcgcttctcaacgttcagtgcctcgaaagaacttccgtacgacctcgaggatgccatggtgttctggatcaacaaggtaaatcttaaaatgagagagataacagagaaagaagttaaattaaaacaacagttattggaaagtccagctcatcaaaaggtccgctatcgacgagagcacctttctgctaggcagtcaccctacttcccgttgttggaggatttgatgagagacggcagtgatggtgctgctctcttagctgtgattcactattattgcccagagcagatgaaactggatgatatatgcttaaaggaggtaacgtcgatggccgacagtctgtataatattcggcttctgagagaattctccaatgaatatcttaataaatgtttttatctcaccttggaagatatgctgtatgcgccattagtgttgaagccgaatgttatggtttttattgcggagcttttttggtggttcgagaatgtcaagccagattttgttcagcccagggatgttcaggagctgaaagacgcgaaaacagtgttacaccagaagagcagccggcctcctgtaccgatctccaacgcgaccaaacgcagtttcctaggcagccctgctgcagggaccctggctgagctgcagccccccgtgcagctgccggcggaaggctgtcacaggcactacctgcacccggaagaacctgaatacctcgggaaaggaactgctgccttcagcccatcccatcctttattgccactgagacagaaacagcagaaatccatacagggagaggacatccctgatcagcgacatcgatcgaattctttgacccgagttgatggtcagcctcgaggagcagcaatagcctggccagaaaaaaaaaccaggcctgcgtcccagccaacaccttttgctctacatcacgctgcgagttgtgaagtggatcccagctctggcgacagcatcagcttggcccgctccatcagcaaagacagtttggcatccaacattgttaatctgaccccacagaaccagccacaccccacggccacgaagagccacgggaagagcctcctgagcaatgtcagtattgaggatgaggaagaggagcttgtggctattgttagagcagacgtggttccccagcaggctgacccggagttccccagggcctcaccccgggccttaggccttacagcaaatgcccggtctccccaaggacagctggacacctcggaaagtaagcctgacagttttttcttggagcctttgatgccagcagttcttaagccagcgaaagagaagcaggtgatcaccaaggaggatgaacggggggaagggagaccgaggagcatcgtgtctaggaggcccagcgagggcccccagcctttggtacgaaggaaaatgactggcagtcgcgacttgaataggacttttaccccgattccatgctcagaattccccatgggcatcgaccccaccgagacaggaccactgtcagtggaaaccgcaggagaggtctgtggtgggcctctggcccttggcggattcgatccgttcccccagggaccatccacggatggcttcttccttcatgtaggcagggccgatgaagacaccgagggaaggttatatgttagttgttcaaaaagccccaactcccacgattcagagccgtggactctcctcaggcaggattctgactcggatgtggtggacatagaggaagccgagcacgatttcatgggtgaggcccatcctgtggttttcagcagatacattggggaggaagagtcggccaaactgcaggaggacatgaaggtgaaggaacatgaagacaaagatgacgccagcggccgctcgagcccctgcctgagcacagcctctcagatgagcagtgtctccatggcgagtgggagcgtgaagatgaccagctttgcggagaggaagctccagagactcaacagctgtgagaccaagtccagcaccagcagctcccagaagaccacgccagatgcgtctgagagctgcccagcccctctgacgacgtggaggcagaagagggagcagagtccgagccagcatggcaaggatcccgccagcctcctggcatctgagctggtacagctgcacatgcagctggaggagaagcgcagggccatcgaggcccagaagaagaagatggaggcgctgtcggcaaggcagcgcctgaagctcggcaaggctgcattcctgcatgtggtgaagaagggcaaggccgaggctgccccacccctcaggccggagcactttgcaaaggagtactctcagcacaacggggaggactgtggggacgctgtttccaaaaccgaagactttctcgtgaaggaggagcagagagaggagctccttcacgagccacaggatgtggacaaagagagcctggcctttgctcagcaacataaagcaaaagaccctgtggctctgcacgagctggagagaaataaggtgatctccgctgccctcctggaggacactgttggggaggttgtcgacgtgaatgaatgtgacctttccatcgagaagcttaacgaaaccatcagtacgctgcagcaggccatcctgaaaatctctcagcagcaagagcagcttctgatgaagtcccccacagtcccagtgccaggctctaagaataactcgcaggaccacaaagtgaaggcaccagtccacttcgtggagccactctctcccacgggcgtggctggccaccgcaaagccccccggctgggtcaaggccggaattcccgttccggaaggccggcggagctgaaggtcccaaaagacaggccacagggctcctcccgaagtaaaaccccaacgcccagtgtagagacgctcccgcacttgagacccttccctgccagcagccaccctcggacgcccacggaccctggcctggacagtgccctggagcccagtggtgacccacatgggaagtgtctcttcgacagttacaggctccatgatgaaagcaatcagcggacacttactctgtcctcttccaaagatgccaacattctttcggagcagatgagcctcaaagaagttctggatgcgagtgtgaaggaggtggggtccagctcctcagatgtctcgggaaaagagagcgtccccgtggaggagcctctgaggagcagggccagcctcattgaagtggacctctccgacctgaaggcccccgacgaggatggggagctggtaagcctcgatggctcggcggaccttgtcagcgaaggcgaccagaagccgggggtcggcttcttcttcaaggatgaacagaaagcggaagatgagctcgccaagaagcgggcggccttcctcctgaagcagcagcgcaaggccgaggaggcccgcgtgcgcaagcagcagctggaagcggaggtggagctcaagcgtgacgaagcccggcgcaaagctgaggaagaccgggtgcggaaggaggaggagaaggcgcggcgcgagctcatcaagcaggagtacctgcggaggaagcagcagcagatcctagaggagcaggggctcggcaagcccaagtcaaagccgaagaagccgcggccgaagtcggtgcaccgggaagagtcgtgcagcgactccggcaccaagtgctcctccacccctgataacttgagccggactcagtcaggctccagcctgtccttggcctctgcggcgacgacagaacccgagagcgttcattccgggggcacaccctctcagcgagtggaatcgatggaagccctgcccatactgagccgtaacccaagcaggagcacagaccgagactgggagaccgcgtcggcggcatcttccctggcctcagtggccgagtacacaggtcccaagctctttaaggagcccagtagtaaatcaaacaagccgattattcacaatgccatatcccattgctgcctggctggaaaagtgaacgaaccccacaagaattccatattggaggagctggagaagtgtgatgccaatcactacatcatactgtttcgtgatgctggctgccagttcagggcgctttactgctactatcctgatactgaggaaatctacaaactcactggcacggggccaaagaacatcaccaagaaaatgatcgacaaactgtataaatacagctcagaccgaaaacagtttaacttgatcccagccaaaaccatgtctgtcagtgtggacgcactcacaatccacaaccacctgtggcagcccaagcggcctgcagtgccaaagaaggcccagactcgtaaatgaccccggtgcagctggcgtccaaagggtgacccagactcgtaaatgatgcccttgtggctggcatccagagggtgccacggggtccttatttattgttttcatctatttgggtacgaagtgtgcaaagtcacagaccttttgcaaagaggtttctagacagcagaagaaaacccctctctcagcgctcatctcacgcagaggatgccaggcagggtgaggatgggggagtagatgccgcttttgcagtggctcgcactgctgtggccactgctgaccactgaggctcccagcggagggtgttcacagccaggtcccgggccacggagctcccttacttgaagttctccttcagcatagattagacgtgatccactttgctttcttgcttctcacctcgcccccttgcacattgcctgacaccctcatattggccagctgtaatctcgtgactatgggactgaggctcaatcttggcttggggtgtttgaatgtctatagcaaaggaattcataatgggaaatctttttcatttgagaaattgtatgatatttattggttgtgtctactgccaacatttatatccaattctaagatttctgaaaaaaaattcttatcccttgctgctcagaaaaagtttacggaaaacaccagttcactaaaagcaccgaaatctgcaaagcctgtcttccgctagaacaacgtctacaaatgtgaagatgatgacttctggcacgcggtcatgagggtggggaatggcactaggagctgatgtttgcctcatttaaagtaggcaagccgagccaactgcagccatcattcattaagttttgggtagtgctctaatggtttgttcactttaataaagacagattttggtaaagtagaatatttttcattctgagcatgtttgtcccaaaaggtgatgcacttaagctgacagtcccttcagtggttttgttaggtcacggcttgtcctgtctggattctgcatctggaagcgctgcatgctctcagaggagcgtgccgtttcccctgtagatggatacttttgttttgttgcctatttaaaaacaattaagtggttatttgcagttatttcagaactccaagtaagtggatggctttgggttctttctgccttggtcccaatggtgttgatgcttctgtggagcgcggacattcccaggagcaggtgcgtgccagccatggctgccagacactgctgcaactgaccagctgccggaagattctggagccactaacattagttttgcacatattttcttgggagtgttacttgaatctatctcaaactgcagaaaaaatcaaaagatcaataattgggagaaaaagagacaaatttaactgttacataattttagatagacaaaaaacatgagtgagtcgtgtacataaggagggaacatggtacagaaggctagaaggaattataggtcttattcccctttcctcagtcctttgaagagaagtacagtctcttgcgattttgtatatatcgtgttcgacacagccgctctctgtcctgtaaatagggaactaaaggctgtatgatttctcaagtgctgagttacacagtcctgagtgagctttctgttaccatactttcacacgtgggctttatttctcactgtatgtttgatatgatattactgtatttattttaagaaagcactaagatgtaataaagtgatgaactaatttgctttacattgaatcgtatgtgtgaggttgctgtggctcatttcgctgaccaggcgacaccaactccttgctttataggagtttcacattgttctttaccatggccctatcgaagtcagtggaattggattctttttaatgaagagctagaaaatatctggcatagagctggaaaattgcattcccatgggacgtctgaatcaattctggattttctccatggaatgagtcagtgtgtggaacatcctgaaacttgtccttaagcgtgtagttttcactgttcgttgcgagtaagcactaatgtggcatggacattcctgatgtcccaagtccccaggccagtgttcgcctaatgattgacagaagcgtccctgcgttcttcatgcttggacacagcaacccttttaattagtcttgaaaagtttcagacacaggattaattttcgtggtggtgcttttgggcctttctggcttgggtggtggtaaagtcatgattttgcagttgataacactgacttataactctgtttatcaatgtctcctatattcaaagcccctgcagtggtatttgtgtctcgttgcaaatttctttcagcggaaagcttgcacaactttcgttgtgtctcagaattctaaccttgttatttaagacaagctgctctacccatttaggatataactttgtaaagaaagtgtaaaccaaatgattcaatgtatgatgaagtttatgtgtaaatccttggtaatgctagaattctgggagcccagaagggttgaaagagaaatgaaacttgcgtgagtcccattattttacgcatgtatgtgcagatacgttctacccacacgtgtgcgtgcacatggctgtgtgcgtgcaccaaagatggactgctttccatgtgtccttttgactttctgcacgtgtcactgcggtgcagtctcttagcagacttcaggcccaaactgtattcttcactcaggcaaaattgaaaagtggaataattctaaattacttctaggttatacttttacctccctgaaattgtagttgtcacttggagggcaaaatatttattgaaataaaattttctgttaaaaattca

SEQ ID NO: 703 - DNA, 5730 bp, Homo sapiens
  source 1..5730: mol_type = genomic DNA
gcccggcgcggcgaggggcggcggcgcctttgttgcggccgggccgccgcctcagccctttgtctgcagatggtggacgcgagcggccgcgccgccgccgagggctggaggaagatggaggccccgccggacggcgccgccgacctcgtgcccctggaccgctacgacgcggcgcgcgccaagatcgccgccaacctgcagtggatctgcgccaaggcctacggccgagataacatccctgaggacctcagagaccctttctacgttgaccagtatgagcaggagcacattaagccgcctgttatcaagcttctcctgtccagcgagctgtactgccgtgtctgcagcctcatcctgaaaggggaccaggtggccgccttacagggacaccagtctgtcatccaggccctgtcccggaaagggatctatgtgatggagagtgatgacacccccgtgacagagtccgacctcagtcgcgcacccataaaaatgagtgcccacatggcaatggtggatgccctgatgatggcctacactgtggagatgatcagcatcgagaaggtggtggccagtgtcaagcgcttctcaacgttcagtgcctcgaaagaacttccgtacgacctcgaggatgccatggtgttctggatcaacaaggtaaatcttaaaatgagagagataacagagaaagaagttaaattaaaacaacagttattggaaagtccagctcatcaaaagtctccctccaagtggtattggaagttagtgcctgtccgctatcgacgagagcacctttctgctaggcagtcaccctacttcccgttgttggaggatttgatgagagacggcagtgatggtgctgctctcttagctgtgattcactattattgcccagagcagatgaaactggatgatatatgcttaaaggaggtaacgtcgatggccgacagtctgtataatattcggcttctgagagaattctccaatgaatatcttaataaatgtttttatctcaccttggaagatatgctgtatgcgccattagtgttgaagccgaatgttatggtttttattgcggagcttttttggtggttcgagaatgtcaagccagattttgttcagcccagggatgttcaggagctgaaagacgcgaaaacagtgttacaccagaagagcagccggcctcctgtaccgatctccaacgcgaccaaacgcagtttcctaggcagccctgctgcagggaccctggctgagctgcagccccccgtgcagctgccggcggaaggctgtcacaggcactacctgcacccggaagaacctgaatacctcgggaaaggaactgctgccttcagcccatcccatcctttattgccactgagacagaaacagcagaaatccatacagggagaggacatccctgatcagcgacatcgatcgaattctttgacccgagttgatggtcagcctcgaggagcagcaatagcctggccagaaaaaaaaaccaggcctgcgtcccagccaacaccttttgctctacatcacgctgcgagttgtgaagtggatcccagctctggcgacagcatcagcttggcccgctccatcagcaaagacagtttggcatccaacattgttaatctgaccccacagaaccagccacaccccacggccacgaagagccacgggaagagcctcctgagcaatgtcagtattgaggatgaggaagaggagcttgtggctattgttagagcagacgtggttccccagcaggctgacccggagttccccagggcctcaccccgggccttaggccttacagcaaatgcccggtctccccaaggacagctggacacctcggaaagtaagcctgacagttttttcttggagcctttgatgccagcagttcttaagccagcgaaagagaagcaggtgatcaccaaggaggatgaacggggggaagggagaccgaggagcatcgtgtctaggaggcccagcgagggcccccagcctttggtacgaaggaaaatgactggcagtcgcgacttgaataggacttttaccccgattccatgctcagaattccccatgggcatcgaccccaccgagacaggaccactgtcagtggaaaccgcaggagaggtctgtggtgggcctctggcccttggcggattcgatccgttcccccagggaccatccacggatggcttcttccttcatgtaggcagggccgatgaagacaccgagggaaggttatatgttagttgttcaaaaagccccaactcccacgattcagagccgtggactctcctcaggcaggattctgactcggatgtggtggacatagaggaagccgagcacgatttcatgggtgaggcccatcctgtggttttcagcagatacattggggaggaagagtcggccaaactgcaggaggacatgaaggtgaaggaacatgaagacaaagatgacgccagcggccgctcgagcccctgcctgagcacagcctctcagatgagcagtgtctccatggcgagtgggagcgtgaagatgaccagctttgcggagaggaagctccagagactcaacagctgtgagaccaagtccagcaccagcagctcccagaagaccacgccagatgcgtctgagagctgcccagcccctctgacgacgtggaggcagaagagggagcagagtccgagccagcatggcaaggatcccgccagcctcctggcatctgagctggtacagctgcacatgcagctggaggagaagcgcagggccatcgaggcccagaagaagaagatggaggcgctgtcggcaaggcagcgcctgaagctcggcaaggctgcattcctgcatgtggtgaagaagggcaaggccgaggctgccccacccctcaggccggagcactttgcaaaggagtactctcagcacaacggggaggactgtggggacgctgtttccaaaaccgaagactttctcgtgaaggaggagcagagagaggagctccttcacgagccacaggatgtggacaaagagagcctggcctttgctcagcaacataaagcaaaagaccctgtggctctgcacgagctggagagaaataaggtgatctccgctgccctcctggaggacactgttggggaggttgtcgacgtgaatgaatgtgacctttccatcgagaagcttaacgaaaccatcagtacgctgcagcaggccatcctgaaaatctctcagcagcaagagcagcttctgatgaagtcccccacagtcccagtgccaggctctaagaataactcgcaggaccacaaagtgaaggcaccagtccacttcgtggagccactctctcccacgggcgtggctggccaccgcaaagccccccggctgggtcaaggccggaattcccgttccggaaggccggcggagctgaaggtcccaaaagacaggccacagggctcctcccgaagtaaaaccccaacgcccagtgtagagacgctcccgcacttgagacccttccctgccagcagccaccctcggacgcccacggaccctggcctggacagtgccctggagcccagtggtgacccacatgggaagtgtctcttcgacagttacaggctccatgatgaaagcaatcagcggacacttactctgtcctcttccaaagatgccaacattctttcggagcagatgagcctcaaagaagttctggatgcgagtgtgaaggaggtggggtccagctcctcagatgtctcgggaaaagagagcgtccccgtggaggagcctctgaggagcagggccagcctcattgaagtggacctctccgacctgaaggcccccgacgaggatggggagctggtaagcctcgatggctcggcggaccttgtcagcgaaggcgaccagaagccgggggtcggcttcttcttcaaggatgaacagaaagcggaagatgagctcgccaagaagcgggcggccttcctcctgaagcagcagcgcaaggccgaggaggcccgcgtgcgcaagcagcagctggaagcggaggtggagctcaagcgtgacgaagcccggcgcaaagctgaggaagaccgggtgcggaaggaggaggagaaggcgcggcgcgagctcatcaagcaggagtacctgcggaggaagcagcagcagatcctagaggagcaggggctcggcaagcccaagtcaaagccgaagaagccgcggccgaagtcggtgcaccgggaagagtcgtgcagcgactccggcaccaagtgctcctccacccctgataacttgagccggactcagtcaggctccagcctgtccttggcctctgcggcgacgacagaacccgagagcgttcattccgggggcacaccctctcagcgagtggaatcgatggaagccctgcccatactgagccgtaacccaagcaggagcacagaccgagactgggagaccgcgtcggcggcatcttccctggcctcagtggccgagtacacaggtcccaagctctttaaggagcccagtagtaaatcaaacaagccgattattcacaatgccatatcccattgctgcctggctggaaaagtgaacgaaccccacaagaattccatattggaggagctggagaagtgtgatgccaatcactacatcatactgtttcgtgatgctggctgccagttcagggcgctttactgctactatcctgatactgaggaaatctacaaactcactggcacggggccaaagaacatcaccaagaaaatgatcgacaaactgtataaatacagctcagaccgaaaacagtttaacttgatcccagccaaaaccatgtctgtcagtgtggacgcactcacaatccacaaccacctgtggcagcccaagcggcctgcagtgccaaagaaggcccagactcgtaaatgaccccggtgcagctggcgtccaaagggtgacccagactcgtaaatgatgcccttgtggctggcatccagagggtgccacggggtccttatttattgttttcatctatttgggtacgaagtgtgcaaagtcacagaccttttgcaaagaggtttctagacagcagaagaaaacccctctctcagcgctcatctcacgcagaggatgccaggcagggtgaggatgggggagtagatgccgcttttgcagtggctcgcactgctgtggccactgctgaccactgaggctcccagcggagggtgttcacagccaggtcccgggccacggagctcccttacttgaagttctccttcagcatagattagacgtgatccactttgctttcttgcttctcacctcgcccccttgcacattgcctgacaccctcatattggccagctgtaatctcgtgactatgggactgaggctcaatcttggcttggggtgtttgaatgtctatagcaaaggaattcataatgggaaatctttttcatttgagaaattgtatgatatttattggttgtgtctactgccaacatttatatccaattctaagatttctgaaaaaaaattcttatcccttgctgctcagaaaaagtttacggaaaacaccagttcactaaaagcaccgaaatctgcaaagcctgtcttccgctagaacaacgtctacaaatgtgaagatgatgacttctggcacgcggtcatgagggtggggaatggcactaggagctgatgtttgcctcatttaaagtaggcaagccgagccaactgcagccatcattc

SEQ ID NO: 704 - DNA, 2390 bp, Homo sapiens
  source 1..2390: mol_type = genomic DNA
tgggccctgccctgagctgccaccgggaagccagcctcagggactgcagcgacccccaaacacccctcccccaggatgtcggaggagatcatcacgccggtgtactgcactggggtgtcagcccaagtgcagaagcagcgggccagggagctgggcctgggccgccatgagaatgccatcaagtacctgggccaggattatgagcagctgcgggtgcgatgcctgcagagtgggaccctcttccgtgatgaggccttccccccggtaccccagagcctgggttacaaggacctgggtcccaattcctccaagacctatggcatcaagtggaagcgtcccacgggactgctggctcttggcggccatcgcctccctcactctcaacgacaccctcctgcaccgagtggttccgcacggccagagcttccagaatggctatgccggcatcttccatttccagctgtggcaatttggggagtgggtggacgtggtcgtggatgacctgctgcccatcaaggacgggaagctagtgttcgtgcactctgccgaaggcaacgagttctggagcgccctgcttgagaaggcctatgccaaggtaaatggcagctacgaggccctgtcagggggcagcacctcagagggctttgaggacttcacaggcggggttaccgagtggtacgagttgcgcaaggctcccagtgacctctaccagatcatcctcaaggcgctggagcggggctccctgctgggctgctccatagacatctccagcgttctagacatggaggccatcactttcaagaagttggtgaagggccatgcctactctgtgaccggggccaagcaggtgaactaccgaggccaggtggtgagcctgatccggatgcggaacccctggggcgaggtggagtggacgggagcctggagcgacagctcctcagagtggaacaacgtggacccatatgaacgggaccagctccgggtcaagatggaggacggggagttctggatgtcattccgagacttcatgcgggagttcacccgcctggagatctgcaacctcacacccgacgccctcaagagccggaccatccgcaaatggaacaccacactctacgaaggcacctggcggcgggggagcaccgcggggggctgccgaaactacccagccaccttctgggtgaaccctcagttcaagatccggctggatgagacggatgacccggacgactacggggaccgcgagtcaggctgcagcttcgtgctcgcccttatgcagaagcaccgtcgccgcgagcgccgcttcggccgcgacatggagactattggcttcgcggtctacgaggtccctccggagctggtgggccagccggccgtacacttgaagcgtgacttcttcctggccaatgcgtctcgggcgcgctcagagcagttcatcaacctgcgagaggtcagcacccgcttccgcctgccacccggggagtatgtggtggtgccctccaccttcgagcccaacaaggagggcgacttcgtgctgcgcttcttctcagagaagagtgctgggactgtggagctggatgaccagatccaggccaatctccccgatgagcaagtgctctcagaagaggagattgacgagaacttcaaggccctcttcaggcagctggcaggggaggacatggagatcagcgtgaaggagttgcggacaatcctcaataggatcatcagcaaacacaaagacctgcggaccaagggcttcagcctagagtcgtgccgcagcatggtgaacctcatggatcgtgatggcaatgggaagctgggcctggtggagttcaacatcctgtggaaccgcatccggaattacctgtccatcttccggaagtttgacctggacaagtcgggcagcatgagtgcctacgagatgcggatggccattgagtcggcaggcttcaagctcaacaagaagctgtacgagctcatcatcacccgctactcggagcccgacctggcggtcgactttgacaatttcgtttgctgcctggtgcggctagagaccatgttccgatttttcaaaactctggacacagatctggatggagttgtgacctttgacttgtttaagtggttgcagctgaccatgtttgcatgaggcagggactcggtcccccttgccgtgctcccctccctcctcgtctgccaagcctcgcctcctaccacaccacaccaggccaccccagctgcaagtgccttccttggagcagagaggcagcctcgtcctcctgtcccctctcctcccagccaccatcgttcatctgctccgggcagaactgtgtggcccctgcctgtgccagccatgggctcgggatggactccctgggccccacccattg

SEQ ID NO: 705 - DNA, 3007 bp, Homo sapiens
  source 1..3007: mol_type = genomic DNA
aaggagagagggagggcggagggcggaggggcggcgggaggagggcggggaggagcgctcttcctggttgggccctgccctgagctgccaccgggaagccagcctcagggactgcagcgacccccaaacacccctcccccaggatgtcggaggagatcatcacgccggtgtactgcactggggtgtcagcccaagtgcagaagcagcgggccagggagctgggcctgggccgccatgagaatgccatcaagtacctgggccaggattatgagcagctgcgggtgcgatgcctgcagagtgggaccctcttccgtgatgaggccttccccccggtaccccagagcctgggttacaaggacctgggtcccaattcctccaagacctatggcatcaagtggaagcgtcccacggaactgctgtcaaacccccagttcattgtggatggagctacccgcacagacatctgccagggagcactgggggactgctggctcttggcggccatcgcctccctcactctcaacgacaccctcctgcaccgagtggttccgcacggccagagcttccagaatggctatgccggcatcttccatttccagctgtggcaatttggggagtgggtggacgtggtcgtggatgacctgctgcccatcaaggacgggaagctagtgttcgtgcactctgccgaaggcaacgagttctggagcgccctgcttgagaaggcctatgccaaggtaaatggcagctacgaggccctgtcagggggcagcacctcagagggctttgaggacttcacaggcggggttaccgagtggtacgagttgcgcaaggctcccagtgacctctaccagatcatcctcaaggcgctggagcggggctccctgctgggctgctccatagacatctccagcgttctagacatggaggccatcactttcaagaagttggtgaagggccatgcctactctgtgaccggggccaagcaggtgaactaccgaggccaggtggtgagcctgatccggatgcggaacccctggggcgaggtggagtggacgggagcctggagcgacagctcctcagagtggaacaacgtggacccatatgaacgggaccagctccgggtcaagatggaggacggggagttctggatgtcattccgagacttcatgcgggagttcacccgcctggagatctgcaacctcacacccgacgccctcaagagccggaccatccgcaaatggaacaccacactctacgaaggcacctggcggcgggggagcaccgcggggggctgccgaaactacccagccaccttctgggtgaaccctcagttcaagatccggctggatgagacggatgacccggacgactacggggaccgcgagtcaggctgcagcttcgtgctcgcccttatgcagaagcaccgtcgccgcgagcgccgcttcggccgcgacatggagactattggcttcgcggtctacgaggtccctccggagctggtgggccagccggccgtacacttgaagcgtgacttcttcctggccaatgcgtctcgggcgcgctcagagcagttcatcaacctgcgagaggtcagcacccgcttccgcctgccacccggggagtatgtggtggtgccctccaccttcgagcccaacaaggagggcgacttcgtgctgcgcttcttctcagagaagagtgctgggactgtggagctggatgaccagatccaggccaatctccccgatgagcaagtgctctcagaagaggagattgacgagaacttcaaggccctcttcaggcagctggcaggggaggacatggagatcagcgtgaaggagttgcggacaatcctcaataggatcatcagcaaacacaaagacctgcggaccaagggcttcagcctagagtcgtgccgcagcatggtgaacctcatggatcgtgatggcaatgggaagctgggcctggtggagttcaacatcctgtggaaccgcatccggaattacctgtccatcttccggaagtttgacctggacaagtcgggcagcatgagtgcctacgagatgcggatggccattgagtcggcaggcttcaagctcaacaagaagctgtacgagctcatcatcacccgctactcggagcccgacctggcggtcgactttgacaatttcgtttgctgcctggtgcggctagagaccatgttccgatttttcaaaactctggacacagatctggatggagttgtgacctttgacttgtttaagtggttgcagctgaccatgtttgcatgaggcagggactcggtcccccttgccgtgctcccctccctcctcgtctgccaagcctcgcctcctaccacaccacaccaggccaccccagctgcaagtgccttccttggagcagagaggcagcctcgtcctcctgtcccctctcctcccagccaccatcgttcatctgctccgggcagaactgtgtggcccctgcctgtgccagccatgggctcgggatggactccctgggccccacccattgccaagccaggaaggcagctttcgcttgttcctgcctcgggacagccccgggtttccccagcatcctgatgtgtcccctctccccacttcagaggccacccactcagcaccaccggcctggccttgcctgcagactataaactataaccactagctcgacacagtctgcagtccaggcgtgtggagccgcctcccggctcggggaggccccggggctgggaacgcctgtgccttcctgcgccgaagccaacgccccctctgtccttccctggccctgctgccgaccaggagctgcccagcctgtgggcggtcggccttccctccttcgctccttttttatattagtgattttaaaggggactcttcagggacttgtgtactggttatgggggtgccagaggcactaggcttggggtggggaggtcccgtgttccatatagaggaaccccaaataataaaaggccccacatctgtctgtg

SEQ ID NO: 706 - DNA, 2960 bp, Homo sapiens
  source 1..2960: mol_type = genomic DNA
tggcccccggcctgcggagggaggggcggggagacaccgtgagtaagagatagtcagagaccgtgccggagagataagggagagccgagaggaagcggggatgtcggaggagatcatcacgccggtgtactgcactggggtgtcagcccaagtgcagaagcagcgggccagggagctgggcctgggccgccatgagaatgccatcaagtacctgggccaggattatgagcagctgcgggtgcgatgcctgcagagtgggaccctcttccgtgatgaggccttccccccggtaccccagagcctgggttacaaggacctgggtcccaattcctccaagacctatggcatcaagtggaagcgtcccacggaactgctgtcaaacccccagttcattgtggatggagctacccgcacagacatctgccagggagcactgggggactgctggctcttggcggccatcgcctccctcactctcaacgacaccctcctgcaccgagtggttccgcacggccagagcttccagaatggctatgccggcatcttccatttccagctgtggcaatttggggagtgggtggacgtggtcgtggatgacctgctgcccatcaaggacgggaagctagtgttcgtgcactctgccgaaggcaacgagttctggagcgccctgcttgagaaggcctatgccaaggtaaatggcagctacgaggccctgtcagggggcagcacctcagagggctttgaggacttcacaggcggggttaccgagtggtacgagttgcgcaaggctcccagtgacctctaccagatcatcctcaaggcgctggagcggggctccctgctgggctgctccatagacatctccagcgttctagacatggaggccatcactttcaagaagttggtgaagggccatgcctactctgtgaccggggccaagcaggtgaactaccgaggccaggtggtgagcctgatccggatgcggaacccctggggcgaggtggagtggacgggagcctggagcgacagctcctcagagtggaacaacgtggacccatatgaacgggaccagctccgggtcaagatggaggacggggagttctggatgtcattccgagacttcatgcgggagttcacccgcctggagatctgcaacctcacacccgacgccctcaagagccggaccatccgcaaatggaacaccacactctacgaaggcacctggcggcgggggagcaccgcggggggctgccgaaactacccagccaccttctgggtgaaccctcagttcaagatccggctggatgagacggatgacccggacgactacggggaccgcgagtcaggctgcagcttcgtgctcgcccttatgcagaagcaccgtcgccgcgagcgccgcttcggccgcgacatggagactattggcttcgcggtctacgaggtccctccggagctggtgggccagccggccgtacacttgaagcgtgacttcttcctggccaatgcgtctcgggcgcgctcagagcagttcatcaacctgcgagaggtcagcacccgcttccgcctgccacccggggagtatgtggtggtgccctccaccttcgagcccaacaaggagggcgacttcgtgctgcgcttcttctcagagaagagtgctgggactgtggagctggatgaccagatccaggccaatctccccgatgagcaagtgctctcagaagaggagattgacgagaacttcaaggccctcttcaggcagctggcaggggaggacatggagatcagcgtgaaggagttgcggacaatcctcaataggatcatcagcaaacacaaagacctgcggaccaagggcttcagcctagagtcgtgccgcagcatggtgaacctcatggatcgtgatggcaatgggaagctgggcctggtggagttcaacatcctgtggaaccgcatccggaattacctgtccatcttccggaagtttgacctggacaagtcgggcagcatgagtgcctacgagatgcggatggccattgagtcggcaggcttcaagctcaacaagaagctgtacgagctcatcatcacccgctactcggagcccgacctggcggtcgactttgacaatttcgtttgctgcctggtgcggctagagaccatgttccgatttttcaaaactctggacacagatctggatggagttgtgacctttgacttgtttaagtggttgcagctgaccatgtttgcatgaggcagggactcggtcccccttgccgtgctcccctccctcctcgtctgccaagcctcgcctcctaccacaccacaccaggccaccccagctgcaagtgccttccttggagcagagaggcagcctcgtcctcctgtcccctctcctcccagccaccatcgttcatctgctccgggcagaactgtgtggcccctgcctgtgccagccatgggctcgggatggactccctgggccccacccattgccaagccaggaaggcagctttcgcttgttcctgcctcgggacagccccgggtttccccagcatcctgatgtgtcccctctccccacttcagaggccacccactcagcaccaccggcctggccttgcctgcagactataaactataaccactagctcgacacagtctgcagtccaggcgtgtggagccgcctcccggctcggggaggccccggggctgggaacgcctgtgccttcctgcgccgaagccaacgccccctctgtccttccctggccctgctgccgaccaggagctgcccagcctgtgggcggtcggccttccctccttcgctccttttttatattagtgattttaaaggggactcttcagggacttgtgtactggttatgggggtgccagaggcactaggcttggggtggggaggtcccgtgttccatatagaggaaccccaaataataaaaggccccacatctgtc

SEQ ID NO: 707 - DNA, 550 bp, Homo sapiens
  source 1..550: mol_type = genomic DNA
ctaatttgtcctctcgcggaattggcccccggcctgcggagggaggggcggggagacaccgtgagatgtcggaggagatcatcacgccggtgtactgcactggggtgtcagcccaagtgcagaagcagcgggccagggagctgggcctgggccgccatgagaatgccatcaagtacctgggccaggattatgagcagctgcgggtgcgatgcctgcagagtgggaccctcttccgtgatgaggccttccccccggtaccccagagcctgggttacaaggacctgggtcccaattcctccaagacctatggcatcaagtggaagcgtcccacggaactgctgtcaaacccccagttcattgtggatggagctacccgcacagacatctgccagggagcactgggggactgctggctcttggcggccatcgcctccctcactctcaacgacaccctcctgcaccgagtggttccgcacggccagagcttccagaatggctatgccggcatcttccatttccagctgtggcaatttggggagtgggtggacgt

SEQ ID NO: 708 - DNA, 3086 bp, Homo sapiens
  source 1..3086: mol_type = genomic DNA
gggatccgggaaaggagaggtggccggcacgcctgggaactgggaaatccctttcctggattcactgggagcaccgggaggtggctgagaaccctacttctgtgaggggagcagtgaggcagggaaaccctaggtttggggatggataagcaggggcaggagagcagagcttgcaggcaggagcccaggttctagtcttgggaaggcctgggttctgagcaggcccatctgtccggcaggatgtcggaggagatcatcacgccggtgtactgcactggggtgtcagcccaagtgcagaagcagcgggccagggagctgggcctgggccgccatgagaatgccatcaagtacctgggccaggattatgagcagctgcgggtgcgatgcctgcagagtgggaccctcttccgtgatgaggccttccccccggtaccccagagcctgggttacaaggacctgggtcccaattcctccaagacctatggcatcaagtggaagcgtcccacggaactgctgtcaaacccccagttcattgtggatggagctacccgcacagacatctgccagggagcactgggggactgctggctcttggcggccatcgcctccctcactctcaacgacaccctcctgcaccgagtggttccgcacggccagagcttccagaatggctatgccggcatcttccatttccagctgtggcaatttggggagtgggtggacgtggtcgtggatgacctgctgcccatcaaggacgggaagctagtgttcgtgcactctgccgaaggcaacgagttctggagcgccctgcttgagaaggcctatgccaaggtaaatggcagctacgaggccctgtcagggggcagcacctcagagggctttgaggacttcacaggcggggttaccgagtggtacgagttgcgcaaggctcccagtgacctctaccagatcatcctcaaggcgctggagcggggctccctgctgggctgctccatagacatctccagcgttctagacatggaggccatcactttcaagaagttggtgaagggccatgcctactctgtgaccggggccaagcaggtgaactaccgaggccaggtggtgagcctgatccggatgcggaacccctggggcgaggtggagtggacgggagcctggagcgacagctcctcagagtggaacaacgtggacccatatgaacgggaccagctccgggtcaagatggaggacggggagttctggatgtcattccgagacttcatgcgggagttcacccgcctggagatctgcaacctcacacccgacgccctcaagagccggaccatccgcaaatggaacaccacactctacgaaggcacctggcggcgggggagcaccgcggggggctgccgaaactacccagccaccttctgggtgaaccctcagttcaagatccggctggatgagacggatgacccggacgactacggggaccgcgagtcaggctgcagcttcgtgctcgcccttatgcagaagcaccgtcgccgcgagcgccgcttcggccgcgacatggagactattggcttcgcggtctacgaggtccctccggagctggtgggccagccggccgtacacttgaagcgtgacttcttcctggccaatgcgtctcgggcgcgctcagagcagttcatcaacctgcgagaggtcagcacccgcttccgcctgccacccggggagtatgtggtggtgccctccaccttcgagcccaacaaggagggcgacttcgtgctgcgcttcttctcagagaagagtgctgggactgtggagctggatgaccagatccaggccaatctccccgatgagcaagtgctctcagaagaggagattgacgagaacttcaaggccctcttcaggcagctggcaggggaggacatggagatcagcgtgaaggagttgcggacaatcctcaataggatcatcagcaaacacaaagacctgcggaccaagggcttcagcctagagtcgtgccgcagcatggtgaacctcatggatcgtgatggcaatgggaagctgggcctggtggagttcaacatcctgtggaaccgcatccggaattacctgtccatcttccggaagtttgacctggacaagtcgggcagcatgagtgcctacgagatgcggatggccattgagtcggcaggcttcaagctcaacaagaagctgtacgagctcatcatcacccgctactcggagcccgacctggcggtcgactttgacaatttcgtttgctgcctggtgcggctagagaccatgttccgatttttcaaaactctggacacagatctggatggagttgtgacctttgacttgtttaagtggttgcagctgaccatgtttgcatgaggcagggactcggtcccccttgccgtgctcccctccctcctcgtctgccaagcctcgcctcctaccacaccacaccaggccaccccagctgcaagtgccttccttggagcagagaggcagcctcgtcctcctgtcccctctcctcccagccaccatcgttcatctgctccgggcagaactgtgtggcccctgcctgtgccagccatgggctcgggatggactccctgggccccacccattgccaagccaggaaggcagctttcgcttgttcctgcctcgggacagccccgggtttccccagcatcctgatgtgtcccctctccccacttcagaggccacccactcagcaccaccggcctggccttgcctgcagactataaactataaccactagctcgacacagtctgcagtccaggcgtgtggagccgcctcccggctcggggaggccccggggctgggaacgcctgtgccttcctgcgccgaagccaacgccccctctgtccttccctggccctgctgccgaccaggagctgcccagcctgtgggcggtcggccttccctccttcgctccttttttatattagtgattttaaaggggactcttcagggacttgtgtactggttatgggggtgccagaggcactaggcttggggtggggaggtcccgtgttccatatagaggaaccccaaataataaaag

SEQ ID NO: 709 - DNA, 564 bp, Homo sapiens
  source 1..564: mol_type = genomic DNA
actacagagctgcaagcccctgacaatgggatccgggaaaggagaggtggccggcacgcctgggaactgggaaatccctttcctggattcactgggagcaccgggaggatgtcggaggagatcatcacgccggtgtactgcactggggtgtcagcccaagtgcagaagcagcgggccagggagctgggcctgggccgccatgagaatgccatcaagtacctgggccaggattatgagcagctgcgggtgcgatgcctgcagagtgggaccctcttccgtgatgaggccttccccccggtaccccagagcctgggttacaaggacctgggtcccaattcctccaagacctatggcatcaagtggaagcgtcccacggaactgctgtcaaacccccagttcattgtggatggagctacccgcacagacatctgccagggagcactgggggactgctggctcttggcggccatcgcctccctcactctcaacgacaccctcctgcaccgagtggttccgcacggccagagcttccagaatggctatgccggcatcttccatttccag

SEQ ID NO: 710 - DNA, 582 bp, Homo sapiens
  source 1..582: mol_type = genomic DNA
gcgctggcccctccccggggactgctctgccttttactaatttgtcctctcgcggaattggcccccggcctgcggagggaggggcggggagacaccgatgtcggaggagatcatcacgccggtgtactgcactggggtgtcagcccaagtgcagaagcagcgggccagggagctgggcctgggccgccatgagaatgccatcaagtacctgggccaggattatgagcagctgcgggtgcgatgcctgcagagtgggaccctcttccgtgatgaggccttccccccggtaccccagagcctgggttacaaggacctgggtcccaattcctccaagacctatggcatcaagtggaagcgtcccacggaactgctgtcaaacccccagttcattgtggatggagctacccgcacagacatctgccagggagcactgggggactgctggctcttggcggccatcgcctccctcactctcaacgacaccctcctgcaccgagtggttccgcacggccagagcttccagaatggctatgccggcatcttccatttccagctgtggcaatttggggagtgggtggacgt

SEQ ID NO: 711 - DNA, 571 bp, Homo sapiens
  source 1..571: mol_type = genomic DNA
acccttctctgtccctggacacctgcgcagaaagcctaggagctggttccacccatcactcaccaggttaggtatttcaggatgtcggaggagatcatcacgccggtgtactgcactggggtgtcagcccaagtgcagaagcagcgggccagggagctgggcctgggccgccatgagaatgccatcaagtacctgggccaggattatgagcagctgcgggtgcgatgcctgcagagtgggaccctcttccgtgatgaggccttccccccggtaccccagagcctgggttacaaggacctgggtcccaattcctccaagacctatggcatcaagtggaagcgtcccacggaactgctgtcaaacccccagttcattgtggatggagctacccgcacagacatctgccagggagcactgggggactgctggctcttggcggccatcgcctccctcactctcaacgacaccctcctgcaccgagtggttccgcacggccagagcttccagaatggctatgccggcatcttccatttccagctgtggcaatttggggagtgggtggacgtggtcg

SEQ ID NO: 712 - DNA, 593 bp, Homo sapiens
  source 1..593: mol_type = genomic DNA
gacacatgggcgcttccaggatgtcggaggagatcatcacgccggtgtactgcactggggtgtcagcccaagtgcagaagcagcgggccagggagctgggcctgggccgccatgagaatgccatcaagtacctgggccaggattatgagcagctgcgggtgcgatgcctgcagagtgggaccctcttccgtgatgaggccttccccccggtaccccagagcctgggttacaaggacctgggtcccaattcctccaagacctatggcatcaagtggaagcgtcccacggaactgctgtcaaacccccagttcattgtggatggagctacccgcacagacatctgccagggagcactgggggactgctggctcttggcggccatcgcctccctcactctcaacgacaccctcctgcaccgagtggttccgcacggccagagcttccagaatggctatgccggcatcttccatttccagctgtggcaatttggggagtgggtggacgtggtcgtggatgacctgctgcccatcaaggacgggaagctagtgttcgtgcactctgccgaaggcaacgagttctggagcgccctgctt

SEQ ID NO: 713 - DNA, 576 bp, Homo sapiens
  source 1..576: mol_type = genomic DNA
aatctcggccccgcgccggggctggctgggaacggcgggagcagctgcggtcgcgcggagcgaggatgtcggaggagatcatcacgccggtgtactgcactggggtgtcagcccaagtgcagaagcagcgggccagggagctgggcctgggccgccatgagaatgccatcaagtacctgggccaggattatgagcagctgcgggtgcgatgcctgcagagtgggaccctcttccgtgatgaggccttccccccggtaccccagagcctgggttacaaggacctgggtcccaattcctccaagacctatggcatcaagtggaagcgtcccacggaactgctgtcaaacccccagttcattgtggatggagctacccgcacagacatctgccagggagcactgggggactgctggctcttggcggccatcgcctccctcactctcaacgacaccctcctgcaccgagtggttccgcacggccagagcttccagaatggctatgccggcatcttccatttccagctgtggcaatttggggagtgggtggacgtggtcgtggatgacctgctgcccatca

SEQ ID NO: 714 - DNA, 496 bp, Homo sapiens
  source 1..496: mol_type = genomic DNA
actacagagctgcaagcccctgacaatgggatccgggaaaggagaggtggccggcacgcctgggaactgggaaatccctttcctggattcactgggagcaccgggaggtggctgagaaccctacttctgatgtcggaggagatcatcacgccggtgtactgcactggggtgtcagcccaagtgcagaagcagcgggccagggagctgggcctgggccgccatgagaatgccatcaagtacctgggccaggattatgagcagctgcgggtgcgatgcctgcagagtgggaccctcttccgtgatgaggccttccccccggtaccccagagcctgggttacaaggacctgggtcccaattcctccaagacctatggcatcaagtggaagcgtcccacggaactgctgtcaaacccccagttcattgtggatggagctacccgcacagacatctgccagggagcactgggggactgctggctcttggcggccatcgcct

SEQ ID NO: 715 - DNA, 568 bp, Homo sapiens
  source 1..568: mol_type = genomic DNA
cttcctggttgggccctgccctgagctgccaccgggaagccagcctcagggactgcagcgacccccaaacacccctcccccaggtaagaagctgggtagccgagccgggattccttgaccctggccactgctcctgggctgaggggctgccccagcacggtcccttctcgggggcctctgcgttcctggagcaggggtgggggctggcggagcggcacagcccaggcgcctgtcccagcctggctcaccgctgtccccaggggctgggctagggcccaccagctctgatatcgagcctgctgcgggggcctgaggagggggaccccgaccgtctggggttttcagcccacggcaaggggccggtgcaccaggagcttggatgtcggaggagatcatcacgccggtgtactgcactggggtgtcagcccaagtgcagaagcagcgggccagggagctgggcctgggccgccatgagaatgccatcaagtacctgggccaggattatgagcagctgcgggtgcgatgcctgcagagtgggaccctcttccgtgatgaggccttccccccg

SEQ ID NO: 716 - DNA, 2792 bp, Homo sapiens
  source 1..2792: mol_type = genomic DNA
ctctcgcggaattggcccccggcctgcggagggaggggcggggagacaccgtgagtaagagatagtcagagaccgatgtcggaggagatcatcacgccggtgtactgcactggggtgtcagcccaagtgcagaagcagcgggccagggagctgggcctgggccgccatgagaatgccatcaagtacctgggccaggattatgagcagctgcgggtgcgatgcctgcagagtgggaccctcttccgtgatgaggccttccccccggtaccccagagcctgggttacaaggacctgggtcccaattcctccaagacctatggcatcaagtggaagcgtcccacggaactgctgtcaaacccccagttcattgtggatggagctacccgcacagacatctgccagggagcactgggggactgctggctcttggcggccatcgcctccctcactctcaacgacaccctcctgcaccgagtggttccgcacggccagagcttccagaatggctatgccggcatcttccatttccagctgtggcaatttggggagtgggtggacgtggtcgtggatgacctgctgcccatcaaggacgggaagctagtgttcgtgcactctgccgaaggcaacgagttctggagcgccctgcttgagaaggcctatgccaaggtaaatggcagctacgaggccctgtcagggggcagcacctcagagggctttgaggacttcacaggcggggttaccgagtggtacgagttgcgcaaggctcccagtgacctctaccagatcatcctcaaggcgctggagcggggctccctgctgggctgctccatagacatctccagcgttctagacatggaggccatcactttcaagaagttggtgaagggccatgcctactctgtgaccggggccaagcaggtgaactaccgaggccaggtggtgagcctgatccggatgcggaacccctggggcgaggtggagtggacgggagcctggagcgacagctcctcagagtggaacaacgtggacccatatgaacgggaccagctccgggtcaagatggaggacggggagttctggatgtcattccgagacttcatgcgggagttcacccgcctggagatctgcaacctcacacccgacgccctcaagagccggaccatccgcaaatggaacaccacactctacgaaggcacctggcggcgggggagcaccgcggggggctgccgaaactacccagccaccttctgggtgaaccctcagttcaagatccggctggatgagacggatgacccggacgactacggggaccgcgagtcaggctgcagcttcgtgctcgcccttatgcagaagcaccgtcgccgcgagcgccgcttcggccgcgacatggagactattggcttcgcggtctacgaggtccctccggagctggtgggccagccggccgtacacttgaagcgtgacttcttcctggccaatgcgtctcgggcgcgctcagagcagttcatcaacctgcgagaggtcagcacccgcttccgcctgccacccggggagtatgtggtggtgccctccaccttcgagcccaacaaggagggcgacttcgtgctgcgcttcttctcagagaagagtgctgggactgtggagctggatgaccagatccaggccaatctccccgatgagcaagtgctctcagaagaggagattgacgagaacttcaaggccctcttcaggcagctggcaggggaggacatggagatcagcgtgaaggagttgcggacaatcctcaataggatcatcagcaaacacaaagacctgcggaccaagggcttcagcctagagtcgtgccgcagcatggtgaacctcatggatcgtgatggcaatgggaagctgggcctggtggagttcaacatcctgtggaaccgcatccggaattacctgtccatcttccggaagtttgacctggacaagtcgggcagcatgagtgcctacgagatgcggatggccattgagtcggcaggcttcaagctcaacaagaagctgtacgagctcatcatcacccgctactcggagcccgacctggcggtcgactttgacaatttcgtttgctgcctggtgcggctagagaccatgttccgatttttcaaaactctggacacagatctggatggagttgtgacctttgacttgtttaagtggttgcagctgaccatgtttgcatgaggcagggactcggtcccccttgccgtgctcccctccctcctcgtctgccaagcctcgcctcctaccacaccacaccaggccaccccagctgcaagtgccttccttggagcagagaggcagcctcgtcctcctgtcccctctcctcccagccaccatcgttcatctgctccgggcagaactgtgtggcccctgcctgtgccagccatgggctcgggatggactccctgggccccacccattgccaagccaggaaggcagctttcgcttgttcctgcctcgggacagccccgggtttccccagcatcctgatgtgtcccctctccccacttcagaggccacccactcagcaccaccggcctggccttgcctgcagactataaactataaccactagctcgacacagtctgcagtccaggcgtgtggagccgcctcccggctcggggaggccccggggctgggaacgcctgtgccttcctgcgccgaagccaacgccccctctgtccttccctggccctgctgccgaccaggagctgcccagcctgtgggcggtcggccttccctccttcgctcc

SEQ ID NO: 717 - DNA, 3083 bp, Homo sapiens
  source 1..3083: mol_type = genomic DNA
gaaagtcgggccgaacggggcagggacttacccaaggtcacgcagcgagcccggtccccctgcgttccccggggagcgctgagccgggacgcggcggtggggtggggaaggggagtggcgcggccctgcggggtgaggctgccgtttgctgagtgtccggcaggggtctgctcgctgccagcccggcccctcctcagagcagctgccgcagcccgaggatgtcggaggagatcatcacgccggtgtactgcactggggtgtcagcccaagtgcagaagcagcgggccagggagctgggcctgggccgccatgagaatgccatcaagtacctgggccaggattatgagcagctgcgggtgcgatgcctgcagagtgggaccctcttccgtgatgaggccttccccccggtaccccagagcctgggttacaaggacctgggtcccaattcctccaagacctatggcatcaagtggaagcgtcccacggaactgctgtcaaacccccagttcattgtggatggagctacccgcacagacatctgccagggagcactgggggactgctggctcttggcggccatcgcctccctcactctcaacgacaccctcctgcaccgagtggttccgcacggccagagcttccagaatggctatgccggcatcttccatttccagctgtggcaatttggggagtgggtggacgtggtcgtggatgacctgctgcccatcaaggacgggaagctagtgttcgtgcactctgccgaaggcaacgagttctggagcgccctgcttgagaaggcctatgccaaggtaaatggcagctacgaggccctgtcagggggcagcacctcagagggctttgaggacttcacaggcggggttaccgagtggtacgagttgcgcaaggctcccagtgacctctaccagatcatcctcaaggcgctggagcggggctccctgctgggctgctccatagacatctccagcgttctagacatggaggccatcactttcaagaagttggtgaagggccatgcctactctgtgaccggggccaagcaggtgaactaccgaggccaggtggtgagcctgatccggatgcggaacccctggggcgaggtggagtggacgggagcctggagcgacagctcctcagagtggaacaacgtggacccatatgaacgggaccagctccgggtcaagatggaggacggggagttctggatgtcattccgagacttcatgcgggagttcacccgcctggagatctgcaacctcacacccgacgccctcaagagccggaccatccgcaaatggaacaccacactctacgaaggcacctggcggcgggggagcaccgcggggggctgccgaaactacccagccaccttctgggtgaaccctcagttcaagatccggctggatgagacggatgacccggacgactacggggaccgcgagtcaggctgcagcttcgtgctcgcccttatgcagaagcaccgtcgccgcgagcgccgcttcggccgcgacatggagactattggcttcgcggtctacgaggtccctccggagctggtgggccagccggccgtacacttgaagcgtgacttcttcctggccaatgcgtctcgggcgcgctcagagcagttcatcaacctgcgagaggtcagcacccgcttccgcctgccacccggggagtatgtggtggtgccctccaccttcgagcccaacaaggagggcgacttcgtgctgcgcttcttctcagagaagagtgctgggactgtggagctggatgaccagatccaggccaatctccccgatgagcaagtgctctcagaagaggagattgacgagaacttcaaggccctcttcaggcagctggcaggggaggacatggagatcagcgtgaaggagttgcggacaatcctcaataggatcatcagcaaacacaaagacctgcggaccaagggcttcagcctagagtcgtgccgcagcatggtgaacctcatggatcgtgatggcaatgggaagctgggcctggtggagttcaacatcctgtggaaccgcatccggaattacctgtccatcttccggaagtttgacctggacaagtcgggcagcatgagtgcctacgagatgcggatggccattgagtcggcaggcttcaagctcaacaagaagctgtacgagctcatcatcacccgctactcggagcccgacctggcggtcgactttgacaatttcgtttgctgcctggtgcggctagagaccatgttccgatttttcaaaactctggacacagatctggatggagttgtgacctttgacttgtttaagtggttgcagctgaccatgtttgcatgaggcagggactcggtcccccttgccgtgctcccctccctcctcgtctgccaagcctcgcctcctaccacaccacaccaggccaccccagctgcaagtgccttccttggagcagagaggcagcctcgtcctcctgtcccctctcctcccagccaccatcgttcatctgctccgggcagaactgtgtggcccctgcctgtgccagccatgggctcgggatggactccctgggccccacccattgccaagccaggaaggcagctttcgcttgttcctgcctcgggacagccccgggtttccccagcatcctgatgtgtcccctctccccacttcagaggccacccactcagcaccaccggcctggccttgcctgcagactataaactataaccactagctcgacacagtctgcagtccaggcgtgtggagccgcctcccggctcggggaggccccggggctgggaacgcctgtgccttcctgcgccgaagccaacgccccctctgtccttccctggccctgctgccgaccaggagctgcccagcctgtgggcggtcggccttccctccttcgctccttttttatattagtgattttaaaggggactcttcagggacttgtgtactggttatgggggtgccagaggcactaggcttggggtggggaggtcccgtgttccatatagaggaaccccaaataataaaaggccccacatctgtctgtga

SEQ ID NO: 718 - DNA, 573 bp, Homo sapiens
  source 1..573: mol_type = genomic DNA
cctgacaatgggatccgggaaaggagaggtggccggcacgcctgggaactgggaaatccctttcctggattcactgggagcaccgggaggtggctgagaaccctacttctgtgaggggagcagtgaggatgtcggaggagatcatcacgccggtgtactgcactggggtgtcagcccaagtgcagaagcagcgggccagggagctgggcctgggccgccatgagaatgccatcaagtacctgggccaggattatgagcagctgcgggtgcgatgcctgcagagtgggaccctcttccgtgatgaggccttccccccggtaccccagagcctgggttacaaggacctgggtcccaattcctccaagacctatggcatcaagtggaagcgtcccacggaactgctgtcaaacccccagttcattgtggatggagctacccgcacagacatctgccagggagcactgggggactgctggctcttggcggccatcgcctccctcactctcaacgacaccctcctgcaccgagtggttccgcacggccagagcttccagaatggctatgccggcatct

SEQ ID NO: 719 - DNA, 581 bp, Homo sapiens
  source 1..581: mol_type = genomic DNA
gttgggccctgccctgagctgccaccgggaagccagcctcagggactgcagcgacccccaaacacccctcccccagttccttgtgctgtctggaggctccgccctgccccacctgacctgctggctcactacagagctgcaagcccctgacaatgggatccgggaaaggagaggatgtcggaggagatcatcacgccggtgtactgcactggggtgtcagcccaagtgcagaagcagcgggccagggagctgggcctgggccgccatgagaatgccatcaagtacctgggccaggattatgagcagctgcgggtgcgatgcctgcagagtgggaccctcttccgtgatgaggccttccccccggtaccccagagcctgggttacaaggacctgggtcccaattcctccaagacctatggcatcaagtggaagcgtcccacggaactgctgtcaaacccccagttcattgtggatggagctacccgcacagacatctgccagggagcactgggggactgctggctcttggcggccatcgcctccctcactctcaacgacaccctcctgcaccgagtggttcc

SEQ ID NO: 720 - DNA, 3573 bp, Homo sapiens
  source 1..3573: mol_type = genomic DNA
cctccccggcgccgggccgcgccatcccgggagctgtccgcagatggcagcaccggccccgggtcgcggcgttcccggcgctcggcaggccgcaggatggcctggtcccgggccgggagcccagcaggccgggagcggctgaggccacaccccgcgggccgggccgcttccctccggtgaatcatcgctcgcagcggcggcgcccgcagtggccgcagcagcgcgccgggccctggccgcgccccagccgagcgcagcgcggagtcgccccgacctttctctgcgcagtacggccgccgggaccgcagcatggcgggcatcgcggccaagctggcgaaggaccgggaggcggccgaggggctgggctcccacgacagggccatcaagtacctcaaccaggactacgaggcgctgcggaacgagtgcctggaggccgggacgctcttccaggacccgtccttcccggccatcccctcggccctgggcttcaaggagttggggccctactccagcaaaacccggggcatcgagtggaagcgccccacggagatctgcgctgacccccagtttatcattggaggagccacccgcacagacatctgccaaggagccctgggtgactgctggctgctggcagccattgcctccctcaccttgaatgaagaaatcctggctcgagtcgtccccctaaaccagagcttccaggaaaactatgcagggatctttcacttccagttctggcaatacggcgagtgggtggaggtggtggtggatgacaggctgcccaccaaggacggggagctgctctttgtgcattcagccgaagggagcgagttctggagcgccctgctggagaaggcatacgccaagatcaacggatgctatgaagcgctatcagggggtgccaccactgagggcttcgaagacttcaccggaggcattgctgagtggtatgagttgaagaagccccctcccaacctgttcaagatcatccagaaagctctgcaaaaaggctctctccttggctgctccatcgacatcaccagcgccgcggactcggaggccatcacgtttcagaagctggtgaaggggcacgcgtactcggtcaccggagccgaggaggttgaaagtaacggaagcctacagaaactgatccgcatccgaaatccctggggagaagtggagtggacagggcggtggaatgacaactgcccaagctggaacactatagacccagaggagagggaaaggctgaccagacggcatgaagatggagaattctggatgtctttcagtgacttcctgaggcactattcccgcctggagatctgtaacctgaccccagacactctcaccagcgatacctacaagaagtggaaactcaccaaaatggatgggaactggaggcggggctccaccgcgggaggttgcaggaactacccgaacacattctggatgaaccctcagtacctgatcaagctggaggaggaggatgaggacgaggaggatggggagagcggctgcaccttcctggtggggctcattcagaagcaccgacggcggcagaggaagatgggcgaggacatgcacaccatcggctttggcatctatgaggttccagaggagttaagtgggcagaccaacatccacctcagcaaaaacttcttcctgacgaatcgcgccagggagcgctcagacaccttcatcaacctccgggaggtgctcaaccgcttcaagctgccgccaggagagtacattctcgtgccttccaccttcgaacccaacaaggatggggatttctgcatccgggtcttttctgaaaagaaagctgactaccaagctgtcgatgatgaaatcgaggccaatcttgaagagttcgacatcagcgaggatgacattgatgatggattcaggagactgtttgcccagttggcaggagaggatgcggagatctctgcctttgagctgcagaccatcctgagaagggttctagcaaagcgccaagatatcaagtcagatggcttcagcatcgagacatgcaaaattatggttgacatgctagattcggacgggagtggcaagctggggctgaaggagttctacattctctggacgaagattcaaaaataccaaaaaatttaccgagaaatcgacgttgacaggtctggtaccatgaattcctatgaaatgcggaaggcattagaagaagcaggtttcaagatgccctgtcaactccaccaagtcatcgttgctcggtttgcagatgaccagctcatcatcgattttgataattttgttcggtgtttggttcggctggaaacgctattcaagatatttaagcagctggatcccgagaatactggaacaatagagctcgaccttatctcttggctctgtttctcagtactttgaagttataactaatctgcctgaagacttctcatgatggaaaatcagccaaggactaagcttccatagaaatacactttgtatctggacctcaaaattatgggaacatttacttaaacggatgatcatagctgaaaataatgatactgtcaatttgagatagcagaagtttcacacatcaaagtaaaagatttgcatatcattatactaaatgcaaatgagtcgcttaacccttgacaaggtcaaagaaagctttaaatctgtaaatagtatacactttttacttttacacactttcctgttcatagcaatattaaatcaggaaaaaaaaatgcagggaggtatttaacagctgagcaaaaacattgagtcgctctcaaaggacacgaggcccttggcagggaatatttaaagcaacttcaagtttaaaatgcagctgttgattctaccaaacaacagtccaagattaccatttcccatgagccaactgggaaacatggtatatcatgaagtaatcttgtcaaggcatctggagagtccaggagagaagactcacctctgtcgcttgggttaaacaagagacaggttttgtagaatattgattggtaatagtaaatcgttctccttacaatcaagttcttgaccctattcggccttatacatctggtcttacaaagaccaaagggatcctgcgcttgatcaactgaaccagtatgccaaaaccaggcatccaatttgtaaaccaattatgataaaggacaaaataagctgtttgccacctcaaaactttatgaacttcaccaccactagtgtctgtccatggagttagaggggacatcacttagaagttcttatagaaaggacacaagtttgtttcctggctttaccttgggaaaatgctagcaacattatagaaattttgccttgttgccttatcttcttccaaatgtactgttaaataaaaataaagggttaccccatgcaatcacaccatgccatgttttccttcctggagggcagccccacaggacggtttatgagcacacaattatagcttgtttctactttaacaaggtatgctgcctctgtaaattcatgtattcaaaggaaaagacaccttgcctataattaaaatgtggaactataaaattttttaaaatccaa

SEQ ID NO: 721 - DNA, 3178 bp, Homo sapiens
  source 1..3178: mol_type = genomic DNA
gcgcgccgggccctggccgcgccccagccgagcgcagcgcggagtcgccccgacctttctctgcgcagtacggccgccgggaccgcagcatggcgggcatcgcggccaagctggcgaaggaccgggaggcggccgaggggctgggctcccacgacagggccatcaagtacctcaaccaggactacgaggcgctgcggaacgagtgcctggaggccgggacgctcttccaggacccgtccttcccggccatcccctcggccctgggcttcaaggagttggggccctactccagcaaaacccggggcatcgagtggaagcgccccacggagatctgcgctgacccccagtttatcattggaggagccacccgcacagacatctgccaaggagccctgggtgactgctggctgctggcagccattgcctccctcaccttgaatgaagaaatcctggctcgagtcgtccccctaaaccagagcttccaggaaaactatgcagggatctttcacttccagttctggcaatacggcgagtgggtggaggtggtggtggatgacaggctgcccaccaaggacggggagctgctctttgtgcattcagccgaagggagcgagttctggagcgccctgctggagaaggcatacgccaagatcaacggatgctatgaagcgctatcagggggtgccaccactgagggcttcgaagacttcaccggaggcattgctgagtggtatgagttgaagaagccccctcccaacctgttcaagatcatccagaaagctctgcaaaaaggctctctccttggctgctccatcgacatcaccagcgccgcggactcggaggccatcacgtttcagaagctggtgaaggggcacgcgtactcggtcaccggagccgaggaggttgaaagtaacggaagcctacagaaactgatccgcatccgaaatccctggggagaagtggagtggacagggcggtggaatgacaactgcccaagctggaacactatagacccagaggagagggaaaggctgaccagacggcatgaagatggagaattctggatgtctttcagtgacttcctgaggcactattcccgcctggagatctgtaacctgaccccagacactctcaccagcgatacctacaagaagtggaaactcaccaaaatggatgggaactggaggcggggctccaccgcgggaggttgcaggaactacccgaacacattctggatgaaccctcagtacctgatcaagctggaggaggaggatgaggacgaggaggatggggagagcggctgcaccttcctggtggggctcattcagaagcaccgacggcggcagaggaagatgggcgaggacatgcacaccatcggctttggcatctatgaggtgcatcctcagttaagtgggcagaccaacatccacctcagcaaaaacttcttcctgacgaatcgcgccagggagcgctcagacaccttcatcaacctccgggaggtgctcaaccgcttcaagctgccgccaggagagtacattctcgtgccttccaccttcgaacccaacaaggatggggatttctgcatccgggtcttttctgaaaagaaagctgactaccaagctgtcgatgatgaaatcgaggccaatcttgaagagttcgacatcagcgaggatgacattgatgatggattcaggagactgtttgcccagttggcaggagaggatgcggagatctctgcctttgagctgcagaccatcctgagaagggttctagcaaagcgccaagatatcaagtcagatggcttcagcatcgagacatgcaaaattatggttgacatgctagattcggacgggagtggcaagctggggctgaaggagttctacattctctggacgaagattcaaaaataccaaaaaatttaccgagaaatcgacgttgacaggtctggtaccatgaattcctatgaaatgcggaaggcattagaagaagcaggtttcaagatgccctgtcaactccaccaagtcatcgttgctcggtttgcagatgaccagctcatcatcgattttgataattttgttcggtgtttggttcggctggaaacgctattcaagatatttaagcagctggatcccgagaatactggaacaatagagctcgaccttatctcttggctctgtttctcagtactttgaagttataactaatctgcctgaagacttctcatgatggaaaatcagccaaggactaagcttccatagaaatacactttgtatctggacctcaaaattatgggaacatttacttaaacggatgatcatagctgaaaataatgatactgtcaatttgagatagcagaagtttcacacatcaaagtaaaagatttgcatatcattatactaaatgcaaatgagtcgcttaacccttgacaaggtcaaagaaagctttaaatctgtaaatagtatacactttttacttttacacactttcctgttcatagcaatattaaatcaggaaaaaaaaatgcagggaggtatttaacagctgagcaaaaacattgagtcgctctcaaaggacacgaggcccttggcagggaatatttaaagcaacttcaagtttaaaatgcagctgttgattctaccaaacaacagtccaagattaccatttcccatgagccaactgggaaacatggtatatcatgaagtaatcttgtcaaggcatctggagagtccaggagagaagactcacctctgtcgcttgggttaaacaagagacaggttttgtagaatattgattggtaatagtaaatcgttctccttacaatcaagttcttgaccctattcggccttatacatctggtcttacaaagaccaaagggatcctgcgcttgatcaactgaaccagtatgccaaaaccaggcatccaatttgtaaaccaattatgataaaggacaaaataagctgtttgccacctcaaaactttatgaacttcaccaccactagtgtctgtccatggagttagaggggacatcacttagaagttcttatagaaaggacacaagtttgtttcctggctttaccttgggaaaatgctagcaacattatagaaattttgccttgttgccttatcttcttccaaatgtactgttaaataaaaataaagggttaccccatgcaatcac

SEQ ID NO: 722 - DNA, 3264 bp, Homo sapiens
  source 1..3264: mol_type = genomic DNA
actcagactctgatggctctgtagctaactggcccatcctcagagactaacgcaaaggaacgaatttccaggatgttcgactatgtggagaaaacaaaaaaaaagcaaagaaaaaaatatttttaaagaaagaaagaaggccaggtgcagtggttcacgcctgtaatcccaacactttgggaggccgaggcagacagatcacctgaggtcaggagttcaagaccagcctggccaacatggagatctgcgctgacccccagtttatcattggaggagccacccgcacagacatctgccaaggagccctgggtgactgctggctgctggcagccattgcctccctcaccttgaatgaagaaatcctggctcgagtcgtccccctaaaccagagcttccaggaaaactatgcagggatctttcacttccagttctggcaatacggcgagtgggtggaggtggtggtggatgacaggctgcccaccaaggacggggagctgctctttgtgcattcagccgaagggagcgagttctggagcgccctgctggagaaggcatacgccaagatcaacggatgctatgaagcgctatcagggggtgccaccactgagggcttcgaagacttcaccggaggcattgctgagtggtatgagttgaagaagccccctcccaacctgttcaagatcatccagaaagctctgcaaaaaggctctctccttggctgctccatcgacatcaccagcgccgcggactcggaggccatcacgtttcagaagctggtgaaggggcacgcgtactcggtcaccggagccgaggaggttgaaagtaacggaagcctacagaaactgatccgcatccgaaatccctggggagaagtggagtggacagggcggtggaatgacaactgcccaagctggaacactatagacccagaggagagggaaaggctgaccagacggcatgaagatggagaattctggatgtctttcagtgacttcctgaggcactattcccgcctggagatctgtaacctgaccccagacactctcaccagcgatacctacaagaagtggaaactcaccaaaatggatgggaactggaggcggggctccaccgcgggaggttgcaggaactacccgaacacattctggatgaaccctcagtacctgatcaagctggaggaggaggatgaggacgaggaggatggggagagcggctgcaccttcctggtggggctcattcagaagcaccgacggcggcagaggaagatgggcgaggacatgcacaccatcggctttggcatctatgaggttccagaggagttaagtgggcagaccaacatccacctcagcaaaaacttcttcctgacgaatcgcgccagggagcgctcagacaccttcatcaacctccgggaggtgctcaaccgcttcaagctgccgccaggagagtacattctcgtgccttccaccttcgaacccaacaaggatggggatttctgcatccgggtcttttctgaaaagaaagctgactaccaagctgtcgatgatgaaatcgaggccaatcttgaagagttcgacatcagcgaggatgacattgatgatggattcaggagactgtttgcccagttggcaggagaggatgcggagatctctgcctttgagctgcagaccatcctgagaagggttctagcaaagcgccaagatatcaagtcagatggcttcagcatcgagacatgcaaaattatggttgacatgctagattcggacgggagtggcaagctggggctgaaggagttctacattctctggacgaagattcaaaaataccaaaaaatttaccgagaaatcgacgttgacaggtctggtaccatgaattcctatgaaatgcggaaggcattagaagaagcaggtttcaagatgccctgtcaactccaccaagtcatcgttgctcggtttgcagatgaccagctcatcatcgattttgataattttgttcggtgtttggttcggctggaaacgctattcaagatatttaagcagctggatcccgagaatactggaacaatagagctcgaccttatctcttggctctgtttctcagtactttgaagttataactaatctgcctgaagacttctcatgatggaaaatcagccaaggactaagcttccatagaaatacactttgtatctggacctcaaaattatgggaacatttacttaaacggatgatcatagctgaaaataatgatactgtcaatttgagatagcagaagtttcacacatcaaagtaaaagatttgcatatcattatactaaatgcaaatgagtcgcttaacccttgacaaggtcaaagaaagctttaaatctgtaaatagtatacactttttacttttacacactttcctgttcatagcaatattaaatcaggaaaaaaaaatgcagggaggtatttaacagctgagcaaaaacattgagtcgctctcaaaggacacgaggcccttggcagggaatatttaaagcaacttcaagtttaaaatgcagctgttgattctaccaaacaacagtccaagattaccatttcccatgagccaactgggaaacatggtatatcatgaagtaatcttgtcaaggcatctggagagtccaggagagaagactcacctctgtcgcttgggttaaacaagagacaggttttgtagaatattgattggtaatagtaaatcgttctccttacaatcaagttcttgaccctattcggccttatacatctggtcttacaaagaccaaagggatcctgcgcttgatcaactgaaccagtatgccaaaaccaggcatccaatttgtaaaccaattatgataaaggacaaaataagctgtttgccacctcaaaactttatgaacttcaccaccactagtgtctgtccatggagttagaggggacatcacttagaagttcttatagaaaggacacaagtttgtttcctggctttaccttgggaaaatgctagcaacattatagaaattttgccttgttgccttatcttcttccaaatgtactgttaaataaaaataaagggttaccccatgcaatcacaccatgccatgttttccttcctggagggcagccccacaggacggtttatgagcacacaattatagcttgtttctactttaacaaggtatgctgcctctgtaaattcatgtattcaaaggaaaagacaccttgcctataattaaaatgtggaactataaaattttttaaaatcc

SEQ ID NO: 723 - DNA, 577 bp, Homo sapiens
  source 1..577: mol_type = genomic DNA
caaaggaacgaatttccaggatgttcgactatgtggagaaaacaaaaaaaaagcaaagaaaaaaatatttttaaagaaagaaagaaggccaggtgcagtggttcacgcctgtaatcccaacactttgggaggccgaggcagacagatcacctgaggtcaggagttcaagaccagcctggccaacatggagatctgcgctgacccccagtttatcattggaggagccacccgcacagacatctgccaaggagccctgggtgactgctggctgctggcagccattgcctccctcaccttgaatgaagaaatcctggctcgagtcgtccccctaaaccagagcttccaggaaaactatgcagggatctttcacttccagttctggcaatacggcgagtgggtggaggtggtggtggatgacaggctgcccaccaaggacggggagctgctctttgtgcattcagccgaagggagcgagttctggagcgccctgctggagaaggcatacgccaagatcaacggatgctatgaagcgctatcagggggtgccaccactgagggcttcgaagacttcaccgga

SEQ ID NO: 724 - DNA, 1172 bp, Homo sapiens
  source 1..1172: mol_type = genomic DNA
agaccactcctcccggcgccgggctcagcccgccttcgccttccctctccccgcggtgtgttacgtgggggagagaataaaactccagcgagatccgggccgtgaacgaaagcagtgacggaggagcttgtaccaccggtaactaaatgaccatggaatctggagccgagaaccagcagagtggagatgcagctgtaacagaagctgaaaaccaacaaatgacagttcaagcccagccacagattgccacattagcccaggtatctatgccagcagctcatgcaacatcatctgctcccaccgtaactctagtacagctgcccaatgggcagacagttcaagtccatggagtcattcaggcggcccagccatcagttattcagtctccacaagtccaaacagttcagtcttcctgtaaggacttaaaaagacttttctccggaacacagatttcaactattgcagaaagtgaagattcacaggagtcagtggatagtgtaactgattcccaaaagcgaagggaaattctttcaaggaggccttcctacaggaaaattttgaatgacttatcttctgatgcaccaggagtgccaaggattgaagaagagaagtctgaagaggagacttcagcacctgccatcaccactgtaacggtgccaactccaatttaccaaactagcagtggacagtatattgccattacccagggaggagcaatacagctggctaacaatggtaccgatggggtacagggcctgcaaacattaaccatgaccaatgcagcagccactcagccgggtactaccattctacagtatgcacagaccactgatggacagcagatcttagtgcccagcaaccaagttgttgttcaagctgcctctggagacgtacaaacataccagattcgcacagcacccactagcactattgcccctggagttgttatggcatcctccccagcacttcctacacagcctgctgaagaagcagcacgaaagagagaggtccgtctaatgaagaacagggaagcagctcgagagtgtcgtagaaagaagaaagaatatgtgaaatgtttagaaaacagagtggcagtgcttgaaaatcaaaacaagacattgattgaggagctaaaagcacttaaggacctttactgccacaaatcagattaa

SEQ ID NO: 725 - DNA, 7588 bp, Homo sapiens
  source 1..7588: mol_type = genomic DNA
gcgcactcggcactgggcggcgctggctggctccctggctgcggctcctcagtcggcggcggctgctgctgcctgtggcccgggcggctgggagaagcggagtgttggtgagtgacgcggcggaggtgtagtttgacgcggtgtgttacgtgggggagagaataaaactccagcgagatccgggccgtgaacgaaagcagtgacggaggagcttgtaccaccggtaactaaatgaccatggaatctggagccgagaaccagcagagtggagatgcagctgtaacagaagctgaaaaccaacaaatgacagttcaagcccagccacagattgccacattagcccaggtatctatgccagcagctcatgcaacatcatctgctcccaccgtaactctagtacagctgcccaatgggcagacagttcaagtccatggagtcattcaggcggcccagccatcagttattcagtctccacaagtccaaacagttcagatttcaactattgcagaaagtgaagattcacaggagtcagtggatagtgtaactgattcccaaaagcgaagggaaattctttcaaggaggccttcctacaggaaaattttgaatgacttatcttctgatgcaccaggagtgccaaggattgaagaagagaagtctgaagaggagacttcagcacctgccatcaccactgtaacggtgccaactccaatttaccaaactagcagtggacagtatattgccattacccagggaggagcaatacagctggctaacaatggtaccgatggggtacagggcctgcaaacattaaccatgaccaatgcagcagccactcagccgggtactaccattctacagtatgcacagaccactgatggacagcagatcttagtgcccagcaaccaagttgttgttcaagctgcctctggagacgtacaaacataccagattcgcacagcacccactagcactattgcccctggagttgttatggcatcctccccagcacttcctacacagcctgctgaagaagcagcacgaaagagagaggtccgtctaatgaagaacagggaagcagctcgagagtgtcgtagaaagaagaaagaatatgtgaaatgtttagaaaacagagtggcagtgcttgaaaatcaaaacaagacattgattgaggagctaaaagcacttaaggacctttactgccacaaatcagattaatttgggatttaaattttcacctgttaaggtggaaaatggactggcttggccacaacctgaaagacaaaataaacattttattttctaaacatttctttttttctatgcgcaaaactgcctgaaagcaactacagaatttcattcatttgtgcttttgcattaaactgtgaatgttccaacacctgcctccacttctcccctcaagaaattttcaacgccaggaatcatgaagagacttctgcttttcaacccccaccctcctcaagaagtaataatttgtttacttgtaaattgatgggagaaatgaggaaaagaaaatctttttaaaaatgatttcaaggtttgtgctgagctccttgattgccttagggacagaattaccccagcctcttgagctgaagtaatgtgtgggccgcatgcataaagtaagtaaggtgcaatgaagaagtgttgattgccaaattgacatgttgtcacattctcattgtgaattatgtaaagttgttaagagacataccctctaaaaaagaactttagcatggtattgaaggaattagaaatgaatttggagtgctttttatgtatgttgtcttcttcaatactgaaaatttgtccttggttcttaaaagcattctgtactaatacagctcttccatagggcagttgttgcttcttaattcagttctgtatgtgttcaacatttttgaatacattaaaagaagtaaccaactgaacgacaaagcatggtatttgaattttaaattaaagcaaagtaaataaaagtacaaagcatattttagttagtactaaattcttagtaaaatgctgatcagtaaaccaatcccttgagttatataacaagatttttaaataaatgttattgtcctcaccttcaaaaatatttatattgtcactcatttacgtaaaaagatatttctaatttactgttgcccattgcacttacataccaccaccaagaaagccttcaagatgtcaaataaagcaaagtgatatatatttgtttatgaaatgttacatgtagaaaaatactgattttaaatattttccatattaacaatttaacagagaatctctagtgaattttttaaatgaaagaagttgtaaggatataaaaagtacagtgttagatgtgcacaaggaaagttattttcagacatatttgaatgactgctgtactgcaatatttggattgtcattcttacaaaacatttttttgttctcttgtaaaaagagtagttattagttctgctttagctttccaatatgctgtatagcctttgtcattttataattttaattcctgattaaaacagtctgtatttgtgtatatcatacattgttttcaataccacttttaattgttactcattttattcactaagctcgataaatctaacagttactcttaaaaaaaaaaaaaaaagactaaggtggattttaaaaattggaaactgacataatgttaggttataatttctcatttggagccgggcgcagtggctcacgcctgtaatcccagcactttgggaggccaaggtgggtggatcacctgtggtcaagagttcaagaccagcctggccatcatggtgaaaccccatctctactaaaaatacaaaaattagccaggcgtggtggctggcgcctgtaatcccagctactcaggaggttgaggcagcagaattgcttgaacccaggaggcagagggttgcagtgagccgagatagcaccattgcactccagcctgggcgactccatctcaaaaaataaaaataaaaaaaatgtctcatttgggaaggaaattccttttaaaaaagagttgagacacttagaaaactaatgttttatatttagtcaagagttatttaagaaagtcaagcttgtttaacaacaaaatatgaagatttaagtgttaattgctggatccattttaaaataagattttaattaacatttgtaaatggtatattttcgtttgtaacaaaccattgtcttttttcaaggatgaacagagtttatgaaggagcatcattctaagaattaagtgatgtagtctttatgtttggacagttcaccagattctcaagaaggctttcaaacaactataaagtttgatgtttgtcctgctgagctaatggggaaagttatagcataaaaattgtgtaaccgcatagatatgtcatttttaaaaactggtttaacagaaatcaagcaaagtcacaaatatgttcacaagttggaattatttattgagtcaaaatgtcgaatcgaacattttgaatgaagtaagtgttataaatgaaaaattgcctgatgtttagcagtttgtattctctaaagctttttttcaaaagttcaggctttctacttactgggaagttggtggtcctcttagtccctgataaatcaaggcaatcacattcatgtgagctggatgaatttataagttataaagaccttatccttcataccttgaggatgattgcactggttttgaagtcagttgcttaatgatgaggtgagaaatgtatcctgttgctaaatctgtcttagacccttggtgaaacttgaagatttcagtttataaagataaaatcaagcatcttttgtgcagttttctttttttaatgcaagaatggtggggaggtttgtttgtaagcatgaaactttgagaatctttattaagaaaatgacataatttttaaaaaccttgtagccaagaacatatgtggccacattaccagtaataaatgtttttctctttatattggccaaaagggaataaaaatgtcatcataggaatttgtacatatgctactgatttgcctagaaaatagcaagtttgatattgctcactttgcaaatatagggccatgtggcacttttatctataggacagattaataaaaatgaagtggggaggggtttatttttgatatattactcttatgagttttcaagctttgataatgtttaactgaaaagtggcttagaaagggctagatccaatgtgttcattattaaataattgctatcagatacaattttaagttcattctttttcaaactcaagtaccatattggcaaccataatattgtcataggtgctctcttcatttagatattcttggggggggtggcatttgtataatatatgtgtacatatatatatatatatatatatatacatacagtatataatctaaagctctgagagctcttaagtcaggaatgctgagtattatagtatattgaggtcagatgaaattttacatttttgtgtgttctgttgcattccttctggtagtttctatgactgcattactccagcactcatgattgattttatcttctaattttcttccaagtattttattttttattagttttctttggcttgatacttttaaatatgttactagtcacttgaaagcctctcccccaaaagtatttggtttgtatgctttgtctgtggcagctataacagtggtaagaacattttgaagatagctttttaaaggaaccactgattttttcaaaaatcatcctgggggaggaattttggcatttcatttgagcagggattttgtcagaaaatgtgttttgatggtaggtcagcagcagtgctagtctctgaaagcacaataccagtcaggcagcctatcccatcagatgtcatctggctgaagtttatctctgtctctcaggataaatccctgtaggacaaatccctactatcatttctaccttttggggtgacatgtggaatcatacaaaggcttaggaagaaatacgtttgtttaaaccaggatgctttacttacttgaagtgacttcaatctagatttcttttaatatttaacaaatttttaattctatgatcagccacagtcagctattaccataaattggtctctgtttattttgaagatcacggctgcttcattttgcaggattaagtagggctaatgtatcttaaagttaagatcttgaattaaagtgagttttagaaatagtgttacataccttttcagttgttttcaagaggctttatttttgttgcctttgtagccctgaaagctgttggtatattttttccctcatggacccaatagaaaagttgtatatttatttggattatatttacattctgtcctttgtaaatgtttggtgtaacttgcacttttttaaatgacccagtttgggtattagcaacttaagaaattccctcatcaagtaattctcaactttttagtctttctcctctcttcaaatcatgtgactttttaaatggaagtttttcattgattaaaatattttagcacctaaaagctagccttaaaaacagctgtaaaagaaaaacatcaggaaattagatatgactagcccagttaattaaaagacgggctcaaaccttgttttattctttttcatcttggatgaagattgaagggaaaataactcaagtgcataatatttattttcaatttttaatgagactttatcctcatcacaacattaatactgtacatagtatgccaaaatatccattaatttgtctagaatagtacaagactttttaaagcaattgtcctcacagagaccacatgtaatatactgaaatatgttcatttttaatggctttgttaacatcaaagaaatgctgcctaaatttgatttcagatgaggaaggagaaagtaaagtgtgcatagtaaggctgtaggtgaagagttgtgagataaatagttcactcagttgtacaaagcacaactagaactttttgttgggaggcttacatacatcttgaatattcttaatgtaataatgttgactattaagttggctacacagtcactgtatgtactaggaactggtttccttgacattctagaatcaatggctaggagaggcattaatctttgaggggctgaacatatcatgaagctgagtcagtatggaaaattttcaaataaacagggtgctgaagttccatctgtctcatctgcttatgataagttcttattgattagtgaatgtagcttaagcctttgtatgtgtcctcagggggcagaccgactttaagagggaccagataacgtttgaatggagggattatatttcaggtgttttagcttgaaatttattttttaaaaaaagaaaaatttaaaaaatatataaataaaatagaacaaagccggtgatgcaagttgatattataaacaggcagttttagcacagaaagaaaatactgacctgtctgcattctggtacggtgggtgcaggtcccagctgggtatgacatgatacatttttaattattctcaccagcaagtaaaaggaaaatgaacaatcttttggaattgtctttgaaaaggatcaaagagtaggaaattcacatttgacctaacattacttgcctatagaagtatggcatttccaagcttttgtctgaggagcatctcagagaagtgagagtaaatctgagttagcttaaaaattggtagggaggaagaaaatctctgcaaataatgattttatgtttgttggccaagtgaaatgatctatcattgtgtttgggaggttttattttcttatgtttttaaaattggtaaatgctttatagatgtatttttatccaagtgccactccaatttgtgtatgtaataaaattatttatattaaaagtgggaaataattgtcaacattttttttgagtatagatttattaggggtggcaaagaagagtgctagttagcagttttccatgtaaagttgtccttgactgatttgtccacatgtcagttgtaactcccccactccctgcaaaaggaattatttctaacccagatgtatcacttgaaactttttagaagcaaaataatcagggaagttcctagaaaggtgtttggctttttggtttttgagggttggggtaaagaagacttcccccacaactgtcagcacaaaacagggtattgatttttaactctgatgtttctattggagttgaatactaaataaataactataatgagggaaatacatttctaataaaattccctacattctagaaacatccctgttttaatttttttatctaaatctttttgtgctttatgtgtaaagaaaaaaatgtactgagttacaatgcattttattaacactatgtacataatagctgctttgtgttcagaatagtagcagttgctttgtatattaaagtgatccttgtgaatttgtgaaatattgtcataaagtgctttttcttactgtaatctttgtggtatcaactgtcataatgctctttttacacaaacatttatgtgcagtcacataaacatgcttttaaaaactc

SEQ ID NO: 726 - DNA, 1629 bp, Homo sapiens
  source 1..1629: mol_type = genomic DNA
gaacgaaagcagtgacggaggagcttgtaccaccggtaactaaatgaccatggaatctggagccgagaaccagcagagtggagatgcagctgtaacagaagctgaaaaccaacaaatgacagttcaagcccagccacagattgccacattagcccaggtatctatgccagcagctcatgcaacatcatctgctcccaccgtaactctagtacagctgcccaatgggcagacagttcaagtccatggagtcattcaggcggcccagccatcagttattcagtctccacaagtccaaacagttcagtcttcctgtaaggacttaaaaagacttttctccggaacacagatttcaactattgcagaaagtgaagattcacaggagtcagtggatagtgtaactgattcccaaaagcgaagggaaattctttcaaggaggccttcctacaggaaaattttgaatgacttatcttctgatgcaccaggagtgccaaggattgaagaagagaagtctgaagaggagacttcagcacttcctacacagcctgctgaagaagcagcacgaaagagagaggtccgtctaatgaagaacagggaagcagctcgagagtgtcgtagaaagaagaaagaatatgtgaaatgtttagaaaacagagtggcagtgcttgaaaatcaaaacaagacattgattgaggagctaaaagcacttaaggacctttactgccacaaatcagattaatttgggatttaaattttcacctgttaaggtggaaaatggactggcttggccacaacctgaaagacaaaataaacattttattttctaaacatttctttttttctatgcgcaaaactgcctgaaagcaactacagaatttcattcatttgtgcttttgcattaaactgtgaatgttccaacacctgcctccacttctcccctcaagaaattttcaacgccaggaatcatgaagagacttctgcttttcaacccccaccctcctcaagaagtaataatttgtttacttgtaaattgatgggagaaatgaggaaaagaaaatctttttaaaaatgatttcaaggtttgtgctgagctccttgattgccttagggacagaattaccccagcctcttgagctgaagtaatgtgtgggccgcatgcataaagtaagtaaggtgcaatgaagaagtgttgattgccaaattgacatgttgtcacattctcattgtgaattatgtaaagttgttaagagacataccctctaaaaaagaactttagcatggtattgaaggaattagaaatgaatttggagtgctttttatgtatgttgtcttcttcaatactgaaaatttgtccttggttcttaaaagcattctgtactaatacagctcttccatagggcagttgttgcttcttaattcagttctgtatgtgttcaacatttttgaatacattaaaagaagtaaccaactgaacgacaaagcatggtatttgaattttaaattaaagcaaagtaaataaaagtacaaagcatattttagttagtactaaattcttagtaaaatgctgatcagtaaaccaatcccttgagttatataacaagatttttaaataaatgttattgtcctcacctt

SEQ ID NO: 727 - DNA, 580 bp, Homo sapiens
  source 1..580: mol_type = genomic DNA
gaattcaggaggagttgcccacttgttagtgtgcagggaaatgtgtttttctcatttctagttgaggtcattctttttttttttttttttttaaaccatagcatgtgttccattagttatgaatgtattatttctttagagtcaaaattcacaactcatttctttgaatattatctctgatcctagatgggatcaaaattgccctagatttaggagttttaaaagtttactaggttgtggggaagatgggtttatttttcataaacttgaactagaatgttgacgattataaggactgggacacttcctaaaggtcaaaatattttaaggcgaaagtaactaaatgaccatggaatctggagccgagaaccagcagagtggagatgcagctgtaacagaagctgaaaaccaacaaatgacagttcaagcccagccacagattgccacattagcccaggtatctatgccagcagctcatgcaacatcatctgctcccaccgtaactctagtacagctgcccaatgggcagacagttcaagtccatggagtcattcaggcggcccagccatcagttattcag

SEQ ID NO: 728 - DNA, 2005 bp, Homo sapiens
  source 1..2005: mol_type = genomic DNA
agaccactcctcccggcgccgggctcagcccgccttcgccttccctctccccgcggaaccccttctcgtcgcccgaagaaacccgaaggtcttcggcaagttccgtccccagcgcgggggcggggccgctcgagctgctccgggcctagctcggctgtttccgtgcgcggccgctgcgcactcggcactgggcggcgctggctggctccctggctgcggctcctcagtcggcggcggctgctgctgcctgtggcccgggcggctgggagaagcggagtgttggtaactaaatgaccatggaatctggagccgagaaccagcagagtggagatgcagctgtaacagaagctgaaaaccaacaaatgacagttcaagcccagccacagattgccacattagcccaggtatctatgccagcagctcatgcaacatcatctgctcccaccgtaactctagtacagctgcccaatgggcagacagttcaagtccatggagtcattcaggcggcccagccatcagttattcagtctccacaagtccaaacagttcagatttcaactattgcagaaagtgaagattcacaggagtcagtggatagtgtaactgattcccaaaagcgaagggaaattctttcaaggaggccttcctacaggaaaattttgaatgacttatcttctgatgcaccaggagtgccaaggattgaagaagagaagtctgaagaggagacttcagcacctgccatcaccactgtaacggtgccaactccaatttaccaaactagcagtggacagtatattgccattacccagggaggagcaatacagctggctaacaatggtaccgatggggtacagggcctgcaaacattaaccatgaccaatgcagcagccactcagccgggtactaccattctacagtatgcacagaccactgatggacagcagatcttagtgcccagcaaccaagttgttgttcaagctgcctctggagacgtacaaacataccagattcgcacagcacccactagcactattgcccctggagttgttatggcatcctccccagcacttcctacacagcctgctgaagaagcagcacgaaagagagaggtccgtctaatgaagaacagggaagcagctcgagagtgtcgtagaaagaagaaagaatatgtgaaatgtttagaaaacagagtggcagtgcttgaaaatcaaaacaagacattgattgaggagctaaaagcacttaaggacctttactgccacaaatcagattaatttgggatttaaattttcacctgttaaggtggaaaatggactggcttggccacaacctgaaagacaaaataaacattttattttctaaacatttctttttttctatgcgcaaaactgcctgaaagcaactacagaatttcattcatttgtgcttttgcattaaactgtgaatgttccaacacctgcctccacttctcccctcaagaaattttcaacgccaggaatcatgaagagacttctgcttttcaacccccaccctcctcaagaagtaataatttgtttacttgtaaattgatgggagaaatgaggaaaagaaaatctttttaaaaatgatttcaaggtttgtgctgagctccttgattgccttagggacagaattaccccagcctcttgagctgaagtaatgtgtgggccgcatgcataaagtaagtaaggtgcaatgaagaagtgttgattgccaaattgacatgttgtcacattctcattgtgaattatgtaaagttgttaagagacataccctctaaaaaagaactttagcatggtattgaaggaattagaaatgaatttggagtgctttttatgtatgttgtcttcttcaatactgaaaatttgtccttggttcttaaaagcattctgtactaatacagctcttccatagggcagttgttgcttcttaattcagttctgtatgtgttcaacatttttgaatacattaaaagaagtaaccaact

SEQ ID NO: 729 - DNA, 7650 bp, Homo sapiens
  source 1..7650: mol_type = genomic DNA
tgtttccgtgcgcggccgctgcgcactcggcactgggcggcgctggctggctccctggctgcggctcctcagtcggcggcggctgctgctgcctgtggcccgggcggctgggagaagcggagtgttggtgagtgacgcggcggaggtgtagtttgacgcggtgtgttacgtgggggagagaataaaactccagcgagatccgggccgtgaacgaaagcagtgacggaggagcttgtaccaccggtaactaaatgaccatggaatctggagccgagaaccagcagagtggagatgcagctgtaacagaagctgaaaaccaacaaatgacagttcaagcccagccacagattgccacattagcccaggtatctatgccagcagctcatgcaacatcatctgctcccaccgtaactctagtacagctgcccaatgggcagacagttcaagtccatggagtcattcaggcggcccagccatcagttattcagtctccacaagtccaaacagttcagtcttcctgtaaggacttaaaaagacttttctccggaacacagatttcaactattgcagaaagtgaagattcacaggagtcagtggatagtgtaactgattcccaaaagcgaagggaaattctttcaaggaggccttcctacaggaaaattttgaatgacttatcttctgatgcaccaggagtgccaaggattgaagaagagaagtctgaagaggagacttcagcacctgccatcaccactgtaacggtgccaactccaatttaccaaactagcagtggacagtatattgccattacccagggaggagcaatacagctggctaacaatggtaccgatggggtacagggcctgcaaacattaaccatgaccaatgcagcagccactcagccgggtactaccattctacagtatgcacagaccactgatggacagcagatcttagtgcccagcaaccaagttgttgttcaagctgcctctggagacgtacaaacataccagattcgcacagcacccactagcactattgcccctggagttgttatggcatcctccccagcacttcctacacagcctgctgaagaagcagcacgaaagagagaggtccgtctaatgaagaacagggaagcagctcgagagtgtcgtagaaagaagaaagaatatgtgaaatgtttagaaaacagagtggcagtgcttgaaaatcaaaacaagacattgattgaggagctaaaagcacttaaggacctttactgccacaaatcagattaatttgggatttaaattttcacctgttaaggtggaaaatggactggcttggccacaacctgaaagacaaaataaacattttattttctaaacatttctttttttctatgcgcaaaactgcctgaaagcaactacagaatttcattcatttgtgcttttgcattaaactgtgaatgttccaacacctgcctccacttctcccctcaagaaattttcaacgccaggaatcatgaagagacttctgcttttcaacccccaccctcctcaagaagtaataatttgtttacttgtaaattgatgggagaaatgaggaaaagaaaatctttttaaaaatgatttcaaggtttgtgctgagctccttgattgccttagggacagaattaccccagcctcttgagctgaagtaatgtgtgggccgcatgcataaagtaagtaaggtgcaatgaagaagtgttgattgccaaattgacatgttgtcacattctcattgtgaattatgtaaagttgttaagagacataccctctaaaaaagaactttagcatggtattgaaggaattagaaatgaatttggagtgctttttatgtatgttgtcttcttcaatactgaaaatttgtccttggttcttaaaagcattctgtactaatacagctcttccatagggcagttgttgcttcttaattcagttctgtatgtgttcaacatttttgaatacattaaaagaagtaaccaactgaacgacaaagcatggtatttgaattttaaattaaagcaaagtaaataaaagtacaaagcatattttagttagtactaaattcttagtaaaatgctgatcagtaaaccaatcccttgagttatataacaagatttttaaataaatgttattgtcctcaccttcaaaaatatttatattgtcactcatttacgtaaaaagatatttctaatttactgttgcccattgcacttacataccaccaccaagaaagccttcaagatgtcaaataaagcaaagtgatatatatttgtttatgaaatgttacatgtagaaaaatactgattttaaatattttccatattaacaatttaacagagaatctctagtgaattttttaaatgaaagaagttgtaaggatataaaaagtacagtgttagatgtgcacaaggaaagttattttcagacatatttgaatgactgctgtactgcaatatttggattgtcattcttacaaaacatttttttgttctcttgtaaaaagagtagttattagttctgctttagctttccaatatgctgtatagcctttgtcattttataattttaattcctgattaaaacagtctgtatttgtgtatatcatacattgttttcaataccacttttaattgttactcattttattcactaagctcgataaatctaacagttactcttaaaaaaaaaaaaaaaagactaaggtggattttaaaaattggaaactgacataatgttaggttataatttctcatttggagccgggcgcagtggctcacgcctgtaatcccagcactttgggaggccaaggtgggtggatcacctgtggtcaagagttcaagaccagcctggccatcatggtgaaaccccatctctactaaaaatacaaaaattagccaggcgtggtggctggcgcctgtaatcccagctactcaggaggttgaggcagcagaattgcttgaacccaggaggcagagggttgcagtgagccgagatagcaccattgcactccagcctgggcgactccatctcaaaaaataaaaataaaaaaaatgtctcatttgggaaggaaattccttttaaaaaagagttgagacacttagaaaactaatgttttatatttagtcaagagttatttaagaaagtcaagcttgtttaacaacaaaatatgaagatttaagtgttaattgctggatccattttaaaataagattttaattaacatttgtaaatggtatattttcgtttgtaacaaaccattgtcttttttcaaggatgaacagagtttatgaaggagcatcattctaagaattaagtgatgtagtctttatgtttggacagttcaccagattctcaagaaggctttcaaacaactataaagtttgatgtttgtcctgctgagctaatggggaaagttatagcataaaaattgtgtaaccgcatagatatgtcatttttaaaaactggtttaacagaaatcaagcaaagtcacaaatatgttcacaagttggaattatttattgagtcaaaatgtcgaatcgaacattttgaatgaagtaagtgttataaatgaaaaattgcctgatgtttagcagtttgtattctctaaagctttttttcaaaagttcaggctttctacttactgggaagttggtggtcctcttagtccctgataaatcaaggcaatcacattcatgtgagctggatgaatttataagttataaagaccttatccttcataccttgaggatgattgcactggttttgaagtcagttgcttaatgatgaggtgagaaatgtatcctgttgctaaatctgtcttagacccttggtgaaacttgaagatttcagtttataaagataaaatcaagcatcttttgtgcagttttctttttttaatgcaagaatggtggggaggtttgtttgtaagcatgaaactttgagaatctttattaagaaaatgacataatttttaaaaaccttgtagccaagaacatatgtggccacattaccagtaataaatgtttttctctttatattggccaaaagggaataaaaatgtcatcataggaatttgtacatatgctactgatttgcctagaaaatagcaagtttgatattgctcactttgcaaatatagggccatgtggcacttttatctataggacagattaataaaaatgaagtggggaggggtttatttttgatatattactcttatgagttttcaagctttgataatgtttaactgaaaagtggcttagaaagggctagatccaatgtgttcattattaaataattgctatcagatacaattttaagttcattctttttcaaactcaagtaccatattggcaaccataatattgtcataggtgctctcttcatttagatattcttggggggggtggcatttgtataatatatgtgtacatatatatatatatatatatatatacatacagtatataatctaaagctctgagagctcttaagtcaggaatgctgagtattatagtatattgaggtcagatgaaattttacatttttgtgtgttctgttgcattccttctggtagtttctatgactgcattactccagcactcatgattgattttatcttctaattttcttccaagtattttattttttattagttttctttggcttgatacttttaaatatgttactagtcacttgaaagcctctcccccaaaagtatttggtttgtatgctttgtctgtggcagctataacagtggtaagaacattttgaagatagctttttaaaggaaccactgattttttcaaaaatcatcctgggggaggaattttggcatttcatttgagcagggattttgtcagaaaatgtgttttgatggtaggtcagcagcagtgctagtctctgaaagcacaataccagtcaggcagcctatcccatcagatgtcatctggctgaagtttatctctgtctctcaggataaatccctgtaggacaaatccctactatcatttctaccttttggggtgacatgtggaatcatacaaaggcttaggaagaaatacgtttgtttaaaccaggatgctttacttacttgaagtgacttcaatctagatttcttttaatatttaacaaatttttaattctatgatcagccacagtcagctattaccataaattggtctctgtttattttgaagatcacggctgcttcattttgcaggattaagtagggctaatgtatcttaaagttaagatcttgaattaaagtgagttttagaaatagtgttacataccttttcagttgttttcaagaggctttatttttgttgcctttgtagccctgaaagctgttggtatattttttccctcatggacccaatagaaaagttgtatatttatttggattatatttacattctgtcctttgtaaatgtttggtgtaacttgcacttttttaaatgacccagtttgggtattagcaacttaagaaattccctcatcaagtaattctcaactttttagtctttctcctctcttcaaatcatgtgactttttaaatggaagtttttcattgattaaaatattttagcacctaaaagctagccttaaaaacagctgtaaaagaaaaacatcaggaaattagatatgactagcccagttaattaaaagacgggctcaaaccttgttttattctttttcatcttggatgaagattgaagggaaaataactcaagtgcataatatttattttcaatttttaatgagactttatcctcatcacaacattaatactgtacatagtatgccaaaatatccattaatttgtctagaatagtacaagactttttaaagcaattgtcctcacagagaccacatgtaatatactgaaatatgttcatttttaatggctttgttaacatcaaagaaatgctgcctaaatttgatttcagatgaggaaggagaaagtaaagtgtgcatagtaaggctgtaggtgaagagttgtgagataaatagttcactcagttgtacaaagcacaactagaactttttgttgggaggcttacatacatcttgaatattcttaatgtaataatgttgactattaagttggctacacagtcactgtatgtactaggaactggtttccttgacattctagaatcaatggctaggagaggcattaatctttgaggggctgaacatatcatgaagctgagtcagtatggaaaattttcaaataaacagggtgctgaagttccatctgtctcatctgcttatgataagttcttattgattagtgaatgtagcttaagcctttgtatgtgtcctcagggggcagaccgactttaagagggaccagataacgtttgaatggagggattatatttcaggtgttttagcttgaaatttattttttaaaaaaagaaaaatttaaaaaatatataaataaaatagaacaaagccggtgatgcaagttgatattataaacaggcagttttagcacagaaagaaaatactgacctgtctgcattctggtacggtgggtgcaggtcccagctgggtatgacatgatacatttttaattattctcaccagcaagtaaaaggaaaatgaacaatcttttggaattgtctttgaaaaggatcaaagagtaggaaattcacatttgacctaacattacttgcctatagaagtatggcatttccaagcttttgtctgaggagcatctcagagaagtgagagtaaatctgagttagcttaaaaattggtagggaggaagaaaatctctgcaaataatgattttatgtttgttggccaagtgaaatgatctatcattgtgtttgggaggttttattttcttatgtttttaaaattggtaaatgctttatagatgtatttttatccaagtgccactccaatttgtgtatgtaataaaattatttatattaaaagtgggaaataattgtcaacattttttttgagtatagatttattaggggtggcaaagaagagtgctagttagcagttttccatgtaaagttgtccttgactgatttgtccacatgtcagttgtaactcccccactccctgcaaaaggaattatttctaacccagatgtatcacttgaaactttttagaagcaaaataatcagggaagttcctagaaaggtgtttggctttttggtttttgagggttggggtaaagaagacttcccccacaactgtcagcacaaaacagggtattgatttttaactctgatgtttctattggagttgaatactaaataaataactataatgagggaaatacatttctaataaaattccctacattctagaaacatccctgttttaatttttttatctaaatctttttgtgctttatgtgtaaagaaaaaaatgtactgagttacaatgcattttattaacactatgtacataatagctgctttgtgttcagaatagtagcagttgctttgtatattaaagtgatccttgtgaatttgtgaaatattgtcataaagtgctttttcttactgtaatctttgtggtatcaactgtcataatgctctttttacacaaacatttatgtgcagtcacataaacatgcttttaaaaactc

SEQ ID NO: 730 - DNA, 651 bp, Homo sapiens
  source 1..651: mol_type = genomic DNA
actgggcggcgctggctggctccctggctgcggctcctcagtcggcggcggctgctgctgcctgtggcccgggcggctgggagaagcggagtgttggtaactaaatgaccatggaatctggagccgagaaccagcagagtggagatgcagctgtaacagaagctgaaaaccaacaaatgacagttcaagcccagccacagattgccacattagcccaggtatctatgccagcagctcatgcaacatcatctgctcccaccgtaactctagtacagctgcccaatgggcagacagttcaagtccatggagtcattcaggcggcccagccatcagttattcagtctccacaagtccaaacagttcagtcttcctgtaaggacttaaaaagacttttctccggaacacagatttcaactattgcagaaagtgaagattcacaggagtcagtggatagtgtaactgattcccaaaagcgaagggaaattctttcaaggaggccttcctacaggaaaattttgaatgacttatcttctgatgcaccaggagtgccaaggattgaagaagagaagtctgaagaggagacttcagcacctgccatcaccactgtaacggtgccaactccaatttaccaaactagcagtggacagtata

SEQ ID NO: 731 - DNA, 518 bp, Homo sapiens
  source 1..518: mol_type = genomic DNA
gaaagcagtgacggaggagcttgtaccaccggaactgttggggacacagtgactaaggcaaaatatgtgtcaaaagaaagcagtcaaaggaaaaagggatcacctttggtgaagtaactaaatgaccatggaatctggagccgagaaccagcagagtggagatgcagctgtaacagaagctgaaaaccaacaaatgacagttcaagcccagccacagattgccacattagcccaggtatctatgccagcagctcatgcaacatcatctgctcccaccgtaactctagtacagctgcccaatgggcagacagttcaagtccatggagtcattcaggcggcccagccatcagttattcagtctccacaagtccaaacagttcagtcttcctgtaaggacttaaaaagacttttctccggaacacagatttcaactattgcagaaagtgaagattcacaggagtcagtggatagtgtaactgattcccaaaagcgaagggaaattctttcaaggaggcctt

SEQ ID NO: 732 - DNA, 1056 bp, Homo sapiens
  source 1..1056: mol_type = genomic DNA
agaataaaactccagcgagatccgggccgtgaacgaaagcagtgacggaggagcttgtaccaccggtaactaaatgaccatggaatctggagccgagaaccagcagagtggagatgcagctgtaacagaagctgaaaaccaacaaatgacagttcaagcccagccacagattgccacattagcccaggtatctatgccagcagctcatgcaacatcatctgctcccaccgtaactctagtacagctgcccaatgggcagacagttcaagtccatggagtcattcaggcggcccagccatcagttattcagtctccacaagtccaaacagttcagatttcaactattgcagaaagtgaagattcacaggagtcagtggatagtgtaactgattcccaaaagcgaagggaaattctttcaaggaggccttcctacaggaaaattttgaatgacttatcttctgatgcaccaggagtgccaaggattgaagaagagaagtctgaagaggagacttcagcacctgccatcaccactgtaacggtgccaactccaatttaccaaactagcagtggacagtatattgccattacccagggaggagcaatacagctggctaacaatggtaccgatggggtacagggcctgcaaacattaaccatgaccaatgcagcagccactcagccgggtactaccattctacagtatgcacagaccactgatggacagcagatcttagtgcccagcaaccaagttgttgttcaaggtactcaaaaattgtaaagcaggatgtcagtgaatttgaattctgaacgtcagtttgaagatggtaacatgtttagtatataaatcttttccactcaaaccatacattttaattgatattaataattaatatgaataattttataaagaccttcaaatttttttaagtaacattaggttccttattaggagagcatattattacgctgtttttagaagcagtttgacaaatagtgattgtgtttgtttttacaaatggtgaatcagttagaaaaataaaacttcagtttatttag

SEQ ID NO: 733 - DNA, 1029 bp, Homo sapiens
  source 1..1029: mol_type = genomic DNA
atacatcatacagtaacacacttatgtgcaccattggtgctgagctgctggttatcccactctgccatgtgtgctgtttctctttgcttttgccactactccactctgtgcttgaaattctgtgactcttccctgtatctatgccagcagctcatgcaacatcatctgctcccaccgtaactctagtacagctgcccaatgggcagacagttcaagtccatggagtcattcaggcggcccagccatcagttattcagtctccacaagtccaaacagttcagtcttcctgtaaggacttaaaaagacttttctccggaacacagatttcaactattgcagaaagtgaagattcacaggagtcagtggatagtgtaactgattcccaaaagcgaagggaaattctttcaaggaggccttcctacaggaaaattttgaatgacttatcttctgatgcaccaggagtgccaaggattgaagaagagaagtctgaagaggagacttcagcacctgccatcaccactgtaacggtgccaactccaatttaccaaactagcagtggacagtatacatacctgagggatacaacatactcctgtcagtaacagattcactgttacagagattctcacttgaactaggaagcatgctctttaggaaagaggcctatcagaatctaaaaaggggaaatgaagttgccattacccagggaggagcaatacagctggctaacaatggtaccgatggggtacagggcctgcaaacattaaccatgaccaatgcagcagccactcagccgggtactaccattctacagtatgcacagaccactgatggacagcagatcttagtgcccagcaaccaagttgttgttcaaggtactcaaaaattgtaaagcaggatgtcagtgaatttgaattctgaacgtcagtttgaagatgagtctacttgaaattttttaatatgaatttaccaatatcaaaggaagacactgaggactatactctatctaggaagatcatccaagctgtg

SEQ ID NO: 734 - DNA, 3754 bp, Homo sapiens
  source 1..3754: mol_type = genomic DNA
cagagcgtctgtaaacacccagagactgtcatggagggggaggaggaggcggcggcggcgaagggaggcgtttggggccgcctccagggtccgctctgccattcctgaactggtccctcgtccccgtgactctggcatcagggaagcgaactgttaggcgagaggaggaggcagccagaaccatatccccttcttcctcggggcgggggccgggccaggccggctgagccgggggagggctccgggagggagtgcctggccaggccggcctgtctgccgcgatggatgacagtaaggtggttggaggcaaagtaaagaagcccggtaaacgtggtcggaagccagccaaaattgacttgaaagcaaaacttgagaggagccggcagagtgcaagagaatgccgagcccgaaaaaagctgagatatcagtatttggaagagttggtatccagtcgagaaagagctatatgtgccctcagagaggaactggaaatgtacaagcagtggtgcatggcaatggaccaaggaaaaatcccttctgaaataaaggccctactcactggagaagagcagaacaaatctcagcagaactcaagcaggcataccaaggctgggaagacagatgctaatagcaattcctggtgaagattatataaagatgagtcagtgattgaagccaatattctgattcccatggaagatggatgggcaagagtgtacttcttggctccatttactacctactgctcagtagtcatctctgtaaatctgcaatttctaccaaaatgtgtgatcgtagatctcaaaggatcttgctttaactttcaacacttagaaaatctacaaacattcagacctgtctgggttggtattgccacccatgacatttaacatgttgtgatgcttgaaaacacaggagtagagaaaatcgatgaagattgtatttttgcaccttaactccacattgctttattggttaatttatattctttccatgtaattcatgtaattgtatgtctgtgtgtgttttatgtgtcaccacctttcatgtttttgattgccctacaaagagaaaccaaatgagctgattactgactataagttctcagcctttatggacctaatcttatttttatttacttgagtaatgtttattctctgcatgaaccatgatttctcctgtgagccattccagcataagctgtgaatatgtattaacaaatatatacatttctatttttataatccataaggatatgcctgttttaaataacatacatattaacaatatctatcaggaaaaccctcaagacagcttctagttaaaacctttgttgctgtcctctcaaactatatttataaaaatttgctagggccaaatccatacttgcagaataattcatcaaattttatttttaagtgaaaagtaacctttcaggcatttcagcagcatacattgacaatctagggtatatatgtatgtatgtttcttattgtatgtctatatatgtatgtggggaggacaggagtgaatgttcacacacttttcttgcgtactcaactaaattggagaatgtttctgaagaaaattggatgaaattagctgctgagattgagtttctgccttaaaatctgaaacaaaaaaagggacaaattgctggtagatctactgactgtagccatcaccagaacacttagtttcttcccagacatgaatttcctgacaggctctgagccagaaacacactgtgggcgtgcatctggttcagccctggatatgcctccactgtggagggaagcattggaactggagttgtgcacagcaccgcagctagtgggcctggctgggggtgcagaagggcagggtagttctttccatttccccttgcagctacacttactttctccctgactaccaaatggagtgacggttgaagaatcaagctcataatatgatacacccagacagacccagaaatcttttgatttccccagcgagatacttaccactctctcttctctttcccatggttaaaacaggagttgtgttctctgtcgctgctaaattattcttcacttgagtgaagcaaatatttagcttccaaataaagtatattttgttctgaactggcagtttaagaggagataccgtagtctagattgtctttgaggtagaatatatgatggaccacatagtttaagattacaaggtactttccctcttctctcaggccatgcatttgaataaagtgcctcccttagcctgagctcctaaagacctcttgtacttggttgcaaactcagatctctagtctagtctagtctagtctagtctagtcatgtgtgactgtgtactgagataccactagcccagtttgctgggtctctatgttttggaagttgggggtttaataatatttaatgtctttttaggatcataaacataaataggtttgttgatattcaggccttcagaatttaagggttttaaatatagcattcagattgtaattggtatgtttttgccatctggtccactcaattgtatatttttattttgcaaaacaacccaaaacttactttatgttgctttgttcagtaccttttgaattcccccagaagagttgttttcaaaacaaacattccagaatgaatgtcgctcttcaatggaacgtctttattgtgcttgaagtatttcttctctggttgtaattctaaattacagagtcatttgagctttctcccctcccgctagtatctttacaggagcagggaagagcagtagaggatgtataattttgggcgaagttaaattacaatttatttgaggttattcctaaacctatttatttggtgttttggaggagatcacacactaagagaacgttgattgcctcggctattgtgctggctggacactttggtcacttttgaagcatgttaataaatgtcactgattaaaacagctggagcatttccttccctttccagtgaaggagcagcatagtgaaatcctggcacccctcacctttttgtgatgacaagatggctgacagtcacggagtccaggagaaggtgctgctctccttgctttctgagtaaacagagtaatgttttttttcttattttcccaaagaaagaaaagggggaaaatatatttgtatgtttagaccagccaaattctgtcattattttagtatcaacctgctgtatattagagcaactgaatataatatggaataagtttgaccaggtcaagttttaggatatagttgaatttctttaaaaagttttctattttatctaaaatctttccattatatctaaattagaatgatcatcctgcgcaaattcagattactgtttgctggctaattgacagtatttctcagcatcactatgtagcattctgttttagcatctttgaattatgatcatttgatttggctaattacaaaaagtacaggtttaaactggacttagcttgagttaaaggcaaagaaaatctaaaaacataaatgttatatttcacaagaaatcagttgcatattatccattacatatttagttttaaaaggaggagtcaccttgaattattttctgagtcaccttgagttatttgatctctcagcctgctttctcatctgtaaaaaaggggggaggataactttcacagggtaattggtaggctaaataggagttacagaaaactgttaaatagggaagaactacattaaatttaaatattcacatta

SEQ ID NO: 735 - DNA, 1150 bp, Homo sapiens
  source 1..1150: mol_type = genomic DNA
cgctataaaacccaggccggcaggatcgctgcacccgcggcggcctcctcggtgcgcgacccccggctcagaggactctttgctgtcccgcaagatgcggatgctgctggcgctcctggccctctccgcggcgcggccatcggccagtgcagagtcacactggtgctacgaggttcaagccgagtcctccaactacccctgcttggtgccagtcaagtggggtggaaactgccagaaggaccgccagtcccccatcaacatcgtcaccaccaaggcaaaggtggacaaaaaactgggacgcttcttcttctctggctacgataagaagcaaacgtggactgtccaaaataacgggcactcagtgatgatgttgctggagaacaaggccagcatttctggaggaggactgcctgccccataccaggccaaacagttgcacctgcactggtccgacttgccatataagggctcggagcacagcctcgatggggagcactttgccatggagatgcacatagtacatgagaaagagaaggggacatcgaggaatgtgaaagaggcccaggaccctgaagacgaaattgcggtgctggcctttctggtggaggctggaacccaggtgaacgagggcttccagccactggtggaggcactgtctaatatccccaaacctgagatgagcactacgatggcagagagcagcctgttggacctgctccccaaggaggagaaactgaggcactacttccgctacctgggctcactcaccacaccgacctgcgatgagaaggtcgtctggactgtgttccgggagcccattcagcttcacagagaacagatcctggcattctctcagaagctgtactacgacaaggaacagacagtgagcatgaaggacaatgtcaggcccctgcagcagctggggcagcgcacggtgataaagtccggggccccgggtcggccgctgccctgggccctgcctgccctgctgggccccatgctggcctgcctgctggccggcttcctgcgatgatggctcacttctgcacgcagcctctctgttgcctcagctctccaagttccaggcttccggtccttagccttcccaggtgggactttaggcatgattaaaatatggacatatttttgg

SEQ ID NO: 736 - DNA, 1618 bp, Homo sapiens
  source 1..1618: mol_type = genomic DNA
cagcctgctcccctccaggcttgctcctcccccacccagctctcgtttccaatgcacgtacagcccgtacacaccgtgtgctgggacaccccacagtcagccgcatggctcccctgtgccccagcccctggctccctctgttgatcccggcccctgctccaggcctcactgtgcaactgctgctgtcactgctgcttctggtgcctgtccatccccagaggttgccccggatgcaggaggattcccccttgggaggaggctcttctggggaagatgacccactgggcgaggaggatctgcccagtgaagaggattcacccagagaggaggatccacccggagaggaggatctacctggagaggaggatctacctggagaggaggatctacctgaagttaagcctaaatcagaagaagagggctccctgaagttagaggatctacctactgttgaggctcctggagatcctcaagaaccccagaataatgcccacagggacaaagaaggggatgaccagagtcattggcgctatggaggcgacccgccctggccccgggtgtccccagcctgcgcgggccgcttccagtccccggtggatatccgcccccagctcgccgccttctgcccggccctgcgccccctggaactcctgggcttccagctcccgccgctcccagaactgcgcctgcgcaacaatggccacagtgtgcaactgaccctgcctcctgggctagagatggctctgggtcccgggcgggagtaccgggctctgcagctgcatctgcactggggggctgcaggtcgtccgggctcggagcacactgtggaaggccaccgtttccctgccgagatccacgtggttcacctcagcaccgcctttgccagagttgacgaggccttggggcgcccgggaggcctggccgtgttggccgcctttctggaggagggcccggaagaaaacagtgcctatgagcagttgctgtctcgcttggaagaaatcgctgaggaaggctcagagactcaggtcccaggactggacatatctgcactcctgccctctgacttcagccgctacttccaatatgaggggtctctgactacaccgccctgtgcccagggtgtcatctggactgtgtttaaccagacagtgatgctgagtgctaagcagctccacaccctctctgacaccctgtggggacctggtgactctcggctacagctgaacttccgagcgacgcagcctttgaatgggcgagtgattgaggcctccttccctgctggagtggacagcagtcctcgggctgctgagccagtccagctgaattcctgcctggctgctggtgacatcctagccctggtttttggcctcctttttgctgtcaccagcgtcgcgttccttgtgcagatgagaaggcagcacagaaggggaaccaaagggggtgtgagctaccgcccagcagaggtagccgagactggagcctagaggctggatcttggagaatgtgagaagccagccagaggcatctgagggggagccggtaactgtcctgtcctgctcattatgccacttccttttaactgccaagaaattttttaaaataaatatttataataaaa

SEQ ID NO: 737 - DNA, 1374 bp, Homo sapiens
  source 1..1374: mol_type = genomic DNA
gcccgtacacaccgtgtgctgggacaccccacagtcagccgcatggctcccctgtgccccagcccctggctccctctgttgatcccggcccctgctccaggcctcactgtgcaactgctgctgtcactgctgcttctggtgcctgtccatccccagaggttgccccggatgcaggaggattcccccttgggaggaggctcttctggggaagatgacccactgggcgaggaggatctgcccagtgaagaggattcacccagagaggaggatccacccggagaggaggatctacctggagaggaggatctacctggagaggaggatctacctgaagttaagcctaaatcagaagaagagggctccctgaagttagaggatctacctactgttgaggctcctggagatcctcaagaaccccagaataatgcccacagggacaaagaaggggatgaccagagtcattggcgctatggaggcgacccgccctggccccgggtgtccccagcctgcgcgggccgcttccagtccccggtggatatccgcccccagctcgccgccttctgcccggccctgcgccccctggaactcctgggcttccagctcccgccgctcccagaactgcgcctgcgcaacaatggccacagtgtgcaactgaccctgcctcctgggctagagatggctctgggtcccgggcgggagtaccgggctctgcagctgcatctgcactggggggctgcaggtcgtccgggctcggagcacactgtggaaggccaccgtttccctgccgagatccacgtggttcacctcagcaccgcctttgccagagttgacgaggccttggggcgcccgggaggcctggccgtgttggccgcctttctggaggagggcccggaagaaaacagtgcctatgagcagttgctgtctcgcttggaagaaatcgctgaggaaggctcagagactcaggtcccaggactggacatatctgcactcctgccctctgacttcagccgctacttccaatatgaggggtctctgactacaccgccctgtgcccagggtgtcatctggactgtgtttaaccagacagtgatgctgagtgctaagcagtcctagccctggtttttggcctcctttttgctgtcaccagcgtcgcgttccttgtgcagatgagaaggcagcacagaaggggaaccaaagggggtgtgagctaccgcccagcagaggtagccgagactggagcctagaggctggatcttggagaatgtgagaagccagccagaggcatctgagggggagccggtaactgtcctgtcctgctcattatgccacttccttttaactgccaagaaattttttaaaataaatatttataat

SEQ ID NO: 738 - DNA, 2907 bp, Homo sapiens
  source 1..2907: mol_type = genomic DNA
gatgctgagaagtactcctgccctaggaagagactcagggcagagggaggaaggacagcagaccagacagtcacagcagccttgacaaaacgttcctggaactcaagctcttctccacagaggaggacagagcagacagcagagaccatggagtctccctcggcccctccccacagatggtgcatcccctggcagaggctcctgctcacagcctcacttctaaccttctggaacccgcccaccactgccaagctcactattgaatccacgccgttcaatgtcgcagaggggaaggaggtgcttctacttgtccacaatctgccccagcatctttttggctacagctggtacaaaggtgaaagagtggatggcaaccgtcaaattataggatatgtaataggaactcaacaagctaccccagggcccgcatacagtggtcgagagataatataccccaatgcatccctgctgatccagaacatcatccagaatgacacaggattctacaccctacacgtcataaagtcagatcttgtgaatgaagaagcaactggccagttccgggtatacccggagctgcccaagccctccatctccagcaacaactccaaacccgtggaggacaaggatgctgtggccttcacctgtgaacctgagactcaggacgcaacctacctgtggtgggtaaacaatcagagcctcccggtcagtcccaggctgcagctgtccaatggcaacaggaccctcactctattcaatgtcacaagaaatgacacagcaagctacaaatgtgaaacccagaacccagtgagtgccaggcgcagtgattcagtcatcctgaatgtcctctatggcccggatgcccccaccatttcccctctaaacacatcttacagatcaggggaaaatctgaacctctcctgccacgcagcctctaacccacctgcacagtactcttggtttgtcaatgggactttccagcaatccacccaagagctctttatccccaacatcactgtgaataatagtggatcctatacgtgccaagcccataactcagacactggcctcaataggaccacagtcacgacgatcacagtctatgcagagccacccaaacccttcatcaccagcaacaactccaaccccgtggaggatgaggatgctgtagccttaacctgtgaacctgagattcagaacacaacctacctgtggtgggtaaataatcagagcctcccggtcagtcccaggctgcagctgtccaatgacaacaggaccctcactctactcagtgtcacaaggaatgatgtaggaccctatgagtgtggaatccagaacaaattaagtgttgaccacagcgacccagtcatcctgaatgtcctctatggcccagacgaccccaccatttccccctcatacacctattaccgtccaggggtgaacctcagcctctcctgccatgcagcctctaacccacctgcacagtattcttggctgattgatgggaacatccagcaacacacacaagagctctttatctccaacatcactgagaagaacagcggactctatacctgccaggccaataactcagccagtggccacagcaggactacagtcaagacaatcacagtctctgcggagctgcccaagccctccatctccagcaacaactccaaacccgtggaggacaaggatgctgtggccttcacctgtgaacctgaggctcagaacacaacctacctgtggtgggtaaatggtcagagcctcccagtcagtcccaggctgcagctgtccaatggcaacaggaccctcactctattcaatgtcacaagaaatgacgcaagagcctatgtatgtggaatccagaactcagtgagtgcaaaccgcagtgacccagtcaccctggatgtcctctatgggccggacacccccatcatttcccccccagactcgtcttacctttcgggagcgaacctcaacctctcctgccactcggcctctaacccatccccgcagtattcttggcgtatcaatgggataccgcagcaacacacacaagttctctttatcgccaaaatcacgccaaataataacgggacctatgcctgttttgtctctaacttggctactggccgcaataattccatagtcaagagcatcacagtctctgcatctggaacttctcctggtctctcagctggggccactgtcggcatcatgattggagtgctggttggggttgctctgatatagcagccctggtgtagtttcttcatttcaggaagactgacagttgttttgcttcttccttaaagcatttgcaacagctacagtctaaaattgcttctttaccaaggatatttacagaaaagactctgaccagagatcgagaccatcctagccaacatcgtgaaaccccatctctactaaaaatacaaaaatgagctgggcttggtggcgcgcacctgtagtcccagttactcgggaggctgaggcaggagaatcgcttgaacccgggaggtggagattgcagtgagcccagatcgcaccactgcactccagtctggcaacagagcaagactccatctcaaaaagaaaagaaaagaagactctgacctgtactcttgaatacaagtttctgataccactgcactgtctgagaatttccaaaactttaatgaactaactgacagcttcatgaaactgtccaccaagatcaagcagagaaaataattaatttcatgggactaaatgaactaatgaggataatattttcataattttttatttgaaattttgctgattctttaaatgtcttgtttcccagatttcaggaaactttttttcttttaagctatccacagcttacagcaatttgataaaatatacttttgtgaacaaaaa

SEQ ID NO: 739 - DNA, 2569 bp, Homo sapiens
  source 1..2569: mol_type = genomic DNA
tccacagaggaggacagagcagacagcagagaccatggagtctccctcggcccctccccacagatggtgcatcccctggcagaggctcctgctcacagcctcacttctaaccttctggaacccgcccaccactgccaagctcactattgaatccacgccgttcaatgtcgcagaggggaaggaggtgcttctacttgtccacaatctgccccagcatctttttggctacagctggtacaaaggtgaaagagtggatggcaaccgtcaaattataggatatgtaataggaactcaacaagctaccccagggcccgcatacagtggtcgagagataatataccccaatgcatccctgctgatccagaacatcatccagaacaaattaagtgttgaccacagcgacccagtcatcctgaatgtcctctatggcccagacgaccccaccatttccccctcatacacctattaccgtccaggggtgaacctcagcctctcctgccatgcagcctctaacccacctgcacagtattcttggctgattgatgggaacatccagcaacacacacaagagctctttatctccaacatcactgagaagaacagcggactctatacctgccaggccaataactcagccagtggccacagcaggactacagtcaagacaatcacagtctctgcggagctgcccaagccctccatctccagcaacaactccaaacccgtggaggacaaggatgctgtggccttcacctgtgaacctgaggctcagaacacaacctacctgtggtgggtaaatggtcagagcctcccagtcagtcccaggctgcagctgtccaatggcaacaggaccctcactctattcaatgtcacaagaaatgacgcaagagcctatgtatgtggaatccagaactcagtgagtgcaaaccgcagtgacccagtcaccctggatgtcctctatgggccggacacccccatcatttcccccccagactcgtcttacctttcgggagcgaacctcaacctctcctgccactcggcctctaacccatccccgcagtattcttggcgtatcaatgggataccgcagcaacacacacaagttctctttatcgccaaaatcacgccaaataataacgggacctatgcctgttttgtctctaacttggctactggccgcaataattccatagtcaagagcatcacagtctctgcatctggaacttctcctggtctctcagctggggccactgtcggcatcatgattggagtgctggttggggttgctctgatatagcagccctggtgtagtttcttcatttcaggaagactgacagttgttttgcttcttccttaaagcatttgcaacagctacagtctaaaattgcttctttaccaaggatatttacagaaaagactctgaccagagatcgagaccatcctagccaacatcgtgaaaccccatctctactaaaaatacaaaaatgagctgggcttggtggcgcgcacctgtagtcccagttactcgggaggctgaggcaggagaatcgcttgaacccgggaggtggagattgcagtgagcccagatcgcaccactgcactccagtctggcaacagagcaagactccatctcaaaaagaaaagaaaagaagactctgacctgtactcttgaatacaagtttctgataccactgcactgtctgagaatttccaaaactttaatgaactaactgacagcttcatgaaactgtccaccaagatcaagcagagaaaataattaatttcatgggactaaatgaactaatgaggataatattttcataattttttatttgaaattttgctgattctttaaatgtcttgtttcccagatttcaggaaactttttttcttttaagctatccacagcttacagcaatttgataaaatatacttttgtgaacaaaaattgagacatttacattttctccctatgtggtcgctccagacttgggaaactattcatgaatatttatattgtatggtaatatagttattgcacaagttcaataaaaatctgctctttgtatgacagaatacatttgaaaacattggttatattaccaagactttgactagaatgtcgtatttgaggatataaacccataggtaataaacccacaggtactacaaacaaagtctgaagtcagccttggtttggcttcctagtgtcaattaaacttctaaaagtttaatctgagattccttataaaaacttccagcaaagcaactttaaaaaagtctgtgtgggccgggcgcggtggctcacgcctgtaatcccagcactttgatccgccgaggcgggcggatcacgaggtcaggagatccagaccatcctggctaacacagtgaaaccccgtctctactaaaaatacaaaaaaagttagccgggcgtggtggtgggggcctgtagtcccagctactcaggaggctgaggcaggagaacggcatgaacccgggaggcagggcttgcagtgagccaagatcatgccgctgcactccagcctgggagacaaagtgagactccgtc

SEQ ID NO: 740 - DNA, 2354 bp, Homo sapiens
  source 1..2354: mol_type = genomic DNA
agacagtcacagcagccttgacaaaacgttcctggaactcaagctcttctccacagaggaggacagagcagacagcagagaccatggagtctccctcggcccctccccacagatggtgcatcccctggcagaggctcctgctcacagcctcacttctaaccttctggaacccgcccaccactgccaagctcactattgaatccacgccgttcaatgtcgcagaggggaaggaggtgcttctacttgtccacaatctgccccagcatctttttggctacagctggtacaaaggtgaaagagtggatggcaaccgtcaaattataggatatgtaataggaactcaacaagctaccccagggcccgcatacagtggtcgagagataatataccccaatgcatccctgctgatccagaacatcatccagaatgacacaggattctacaccctacacgtcataaagtcagatcttgtgaatgaagaagcaactggccagttccgggtatacccggagctgcccaagccctccatctccagcaacaactccaaacccgtggaggacaaggatgctgtggccttcacctgtgaacctgagactcaggacgcaacctacctgtggtgggtaaacaatcagagcctcccggtcagtcccaggctgcagctgtccaatggcaacaggaccctcactctattcaatgtcacaagaaatgacacagcaagctacaaatgtgaaacccagaacccagtgagtgccaggcgcagtgattcagtcatcctgaatgtcctctatggcccggatgcccccaccatttcccctctaaacacatcttacagatcaggggaaaatctgaacctctcctgccacgcagcctctaacccacctgcacagtactcttggtttgtcaatgggactttccagcaatccacccaagagctctttatccccaacatcactgtgaataatagtggatcctatacgtgccaagcccataactcagacactggcctcaataggaccacagtcacgacgatcacagtctatgcagagccacccaaacccttcatcaccagcaacaactccaaccccgtggaggatgaggatgctgtagccttaacctgtgaacctgagattcagaacacaacctacctgtggtgggtaaataatcagagcctcccggtcagtcccaggctgcagctgtccaatgacaacaggaccctcactctactcagtgtcacaaggaatgatgtaggaccctatgagtgtggaatccagaacaaattaagtgttgaccacagcgacccagtcatcctgaatgtcctctatggcccagacgaccccaccatttccccctcatacacctattaccgtccaggggtgaacctcagcctctcctgccatgcagcctctaacccacctgcacagtattcttggctgattgatgggaacatccagcaacacacacaagagctctttatctccaacatcactgagaagaacagcggactctatacctgccaggccaataactcagccagtggccacagcaggactacagtcaagacaatcacagtctctgcggagctgcccaagccctccatctccagcaacaactccaaacccgtggaggacaaggatgctgtggccttcacctgtgaacctgaggctcagaacacaacctacctgtggtgggtaaatggtcagagcctcccagtcagtcccaggctgcagctgtccaatggcaacaggaccctcactctattcaatgtcacaagaaatgacgcaagagcctatgtatgtggaatccagaactcagtgagtgcaaaccgcagtgacccagtcaccctggatgtcctctatgggccggacacccccatcatttcccccccagactcgtcttacctttcgggagcgaacctcaacctctcctgccactcggcctctaacccatccccgcagtattcttggcgtatcaatgggataccgcagcaacacacacaagttctctttatcgccaaaatcacgccaaataataacgggacctatgcctgttttgtctctaacttggctactggccgcaataattccatagtcaagagcatcacagtctctgcatctggaacttctcctggtctctcagctggggccactgtcggcatcatgattggagtgctggttggggttgctctgatatagcagccctggtgtagtttcttcatttcaggaagactgcatttgcaacagctacagtctaaaattgcttctttaccaaggatatttacagaaaagactctgaccagagatcgagaccatcctagccaacatcgtgaaaccccatctctactaaaaatacaaaaa

SEQ ID NO: 741 - DNA, 2700 bp, Homo sapiens
  source 1..2700: mol_type = genomic DNA
aaaagagacagaaatgagaggggaggggatagaggattcctgaacagagaccgcacccatgacccacgtgaccctgggaaatgcttctatccctgagaggaggctcagcacagaaggaggaaggacagcagggccaacagtcacagcagccctgaccagagcattcctggagctcaagctcctctacaaagaggtggacagagaagacagcagagaccatgggacccccctcagcccctccctgcagattgcatgtcccctggaaggaggtcctgctcacagcctcacttctaaccttctggaacccacccaccactgccaagctcactattgaatccacgccgttcaatgtcgcagaggggaaggaggttcttctactcgcccacaacctgccccagaatcgtattggttacagctggtacaaaggcgaaagagtggatggcaacagtctaattgtaggatatgtaataggaactcaacaagctaccccagggcccgcatacagtggtcgagagacaatataccccaatgcatccctgctgatccagaacgtcacccagaatgacacaggattctataccctacaagtcataaagtcagatcttgtgaatgaagaagcaaccggacagttccatgtatacccggagctgcccaagccctccatctccagcaacaactccaaccccgtggaggacaaggatgctgtggccttcacctgtgaacctgaggttcagaacacaacctacctgtggtgggtaaatggtcagagcctcccggtcagtcccaggctgcagctgtccaatggcaacatgaccctcactctactcagcgtcaaaaggaacgatgcaggatcctatgaatgtgaaatacagaacccagcgagtgccaaccgcagtgacccagtcaccctgaatgtcctctatggcccagatggccccaccatttccccctcaaaggccaattaccgtccaggggaaaatctgaacctctcctgccacgcagcctctaacccacctgcacagtactcttggtttatcaatgggacgttccagcaatccacacaagagctctttatccccaacatcactgtgaataatagcggatcctatatgtgccaagcccataactcagccactggcctcaataggaccacagtcacgatgatcacagtctctggaagtgctcctgtcctctcagctgtggccaccgtcggcatcacgattggagtgctggccagggtggctctgatatagcagccctggtgtattttcgatatttcaggaagactggcagattggaccagaccctgaattcttctagctcctccaatcccattttatcccatggaaccactaaaaacaaggtctgctctgctcctgaagccctatatgctggagatggacaactcaatgaaaatttaaagggaaaaccctcaggcctgaggtgtgtgccactcagagacttcacctaactagagacaggcaaactgcaaaccatggtgagaaattgacgacttcacactatggacagcttttcccaagatgtcaaaacaagactcctcatcatgataaggctcttacccccttttaatttgtccttgcttatgcctgcctctttcgcttggcaggatgatgctgtcattagtatttcacaagaagtagcttcagagggtaacttaacagagtatcagatctatcttgtcaatcccaacgttttacataaaataagagatcctttagtgcacccagtgactgacattagcagcatctttaacacagccgtgtgttcaaatgtacagtggtccttttcagagttggacttctagactcacctgttctcactccctgttttaattcaacccagccatgcaatgccaaataatagaattgctccctaccagctgaacagggaggagtctgtgcagtttctgacacttgttgttgaacatggctaaatacaatgggtatcgctgagactaagttgtagaaattaacaaatgtgctgcttggttaaaatggctacactcatctgactcattctttattctattttagttggtttgtatcttgcctaaggtgcgtagtccaactcttggtattaccctcctaatagtcatactagtagtcatactccctggtgtagtgtattctctaaaagctttaaatgtctgcatgcagccagccatcaaatagtgaatggtctctctttggctggaattacaaaactcagagaaatgtgtcatcaggagaacatcataacccatgaaggataaaagccccaaatggtggtaactgataatagcactaatgctttaagatttggtcacactctcacctaggtgagcgcattgagccagtggtgctaaatgctacatactccaactgaaatgttaaggaagaagatagatccaattaaaaaaaattaaaaccaatttaaaaaaaaaaagaacacaggagattccagtctacttgagttagcataatacagaagtcccctctactttaacttttacaaaaaagtaacctgaactaatctgatgttaaccaatgtatttatttctgtggttctgtttccttgttccaatttgacaaaacccactgttcttgtattgtattgcccagggggagctatcactgtacttgtagagtggtgctgctttaattcataaatcacaaataaaagccaattagctctataact

SEQ ID NO: 742 - DNA, 3094 bp, Homo sapiens
  source 1..3094: mol_type = genomic DNA
ctcatatctagaattttgggaggtactttgaatcattacgatctatctacttcttaggtgaggaaatagaggtttaaaatttagtccacagtctcgcaaggatggagcctggatcaaattttgggttatcagattccaatcacgtttcttagcttttcttttttttttccaactccagtttctgtcttgctccaaaaaaggggaaggagcggctgcggcgctcggtttcccgcctcctagggaagggaagggagacgagcagcgcggaggctggggcccccttccgggcggggcctactagtgggcggggcctgtcagtgagcggcccctgcccggaaggagccagtccggggcggagccgatggccttacaggggccggaagtggcctgcgggcggagaagtgcctcaggagtcctgacgcagtgtcttgggcgctaacggcggcggcggccttgtgtttagactccagaactccccacttgccgcgttctcgccgccgcaggctcccgggacgatggtgccccgcctgctgctgcgcgcctggccccggggccccgcggttggtccgggagcccccagtcggcccctcagcgccggctccgggcccggccagtacctgcagcgcagcatcgtgcccaccatgcactaccaggacagcctgcccaggctgcctattcccaaacttgaagacaccattaggagatacctcagtgcacagaagcctctcttgaatgatggccagttcaggaaaacagaacaattttgcaagagttttgaaaatgggattggaaaagaactgcatgagcagctggttgctctggacaaacagaataaacatacaagctacatttcgggaccctggtttgatatgtacctatctgctcgagactccgttgttctgaactttaatccatttatggctttcaatcctgacccaaaatctgagtataatgaccagctcacccgggcaaccaacatgactgtttctgccatccggtttctgaagacactccgggctggccttctggagccagaagtgttccacttgaaccctgcaaaaagtgacactatcaccttcaagagactcatacgctttgtgccttcctctctgtcctggtatggggcctacctggtcaatgcgtatcccctggatatgtcccagtattttcggcttttcaactcaactcgtttacccaaacccagtcgggatgaactcttcactgatgacaaggccagacacctcctggtcctaaggaaaggaaatttttatatctttgatgtcctggatcaagatgggaacattgtgagcccctcggaaatccaggcacatctgaagtacattctctcagacagcagccccgcccccgagtttcccctggcatacctgaccagtgagaaccgagacatctgggcagagctcaggcagaagctgatgagtagtggcaatgaggagagcctgaggaaagtggactcggcagtgttctgtctctgcctagatgacttccccattaaggaccttgtccacttgtcccacaatatgctgcatggggatggcacaaaccgctggtttgataaatcctttaacctcattatcgccaaggatggctctactgccgtccactttgagcactcttggggtgatggtgtggcagtgctcagattttttaatgaagtatttaaagacagcactcagacccctgccgtcactccacagagccagccagctaccactgactctactgtcacggtgcagaaactcaacttcgagctgactgatgccttaaagactggcatcacagctgctaaggaaaagtttgatgccaccatgaaaaccctcactattgactgcgtccagtttcagagaggaggcaaagaattcctgaagaagcaaaagctgagccctgacgcagttgcccagctggcattccagatggccttcctgcggcagtacgggcagacagtggccacctacgagtcctgtagcactgccgcattcaagcacggccgcactgagaccatccgcccggcctccgtctatacaaagaggtgctctgaggcctttgtcagggagccctccaggcacagtgctggtgagcttcagcagatgatggttgagtgctccaagtaccatggccagctgaccaaagaagcagcaatgggccagggctttgaccgacacttgtttgctctgcggcatctggcagcagccaaagggatcatcttgcctgagctctacctggaccctgcatacgggcagataaaccacaatgtcctgtccacgagcacactgagcagcccagcagtgaaccttgggggctttgcccctgtggtctctgatggctttggtgttgggtatgctgttcatgacaactggataggctgcaatgtctcttcctacccaggccgcaatgcccgggagtttctccaatgtgtggagaaggccttagaagacatgtttgatgccttagaaggcaaatccatcaaaagttaacttctgggcagatgaaaagctaccatcacttcctcatcatgaaaactgggaggccgggcatggtggctcatgcctgtaatcccagcattttgagaggctgaggcgggtggatcacttgaggtcaggagtttgagaccaacctggccaacatggtgaaaccttgtctctactaaaaatacaaaaattagctgggtgtggtggcatgtgcctataatcccagctacttgggaggttgaagcagaattgcttgaacccaggaggtggaggttgcagtgagctgagatcacaccactgcactccggcctgggcgacagagcgagactgtctcaaaaaaacaaaaaagaaaaaaaaactggggcctgtgtagccagtgggtgctattctgtgaaactaatcataagctgcctaggcagccagctacaggcttgagctttaaattcatggttttaaagctaaacgtaatttccacttgggactagatcacaactgaagataacaagagatttaagttttaagggcatttaatcaggaggaaaggtttggaaaactaactcaggtgtatttattgtttaagcagaaataaagtttaatttttgcttgaa

SEQ ID NO: 743 - DNA, 4416 bp, Homo sapiens
  source 1..4416: mol_type = genomic DNA
gggggtttccgcttccggcagcagcggctgcagcctcgctctggtccctgcggctggcggccgagccgtgtgtctcctcctccatcgccgccatattgtctgtgtgagcagaggggagagcggccgccgccgctgccgcttccaccacagctctatcaaggcttgtcaagcagtgtgctcatcacatggtaaatcatgcagcgtggaacctcataaaatctccaagaaacatcattcacccatactgactagtttcacatctctttgtttgaagaaaacaggtctgaaacaaggtcttacccccagctgcttctgaacacagtgactgccagatctccaaacatcaagtccagctttgtccgccaacctgtctgacatgtcgggacccgtgccaagcagggccagagtttacacagatgttaatacacacagacctcgagaatactgggattacgagtcacatgtggtggaatggggaaatcaagatgactaccagctggttcgaaaattaggccgaggtaaatacagtgaagtatttgaagccatcaacatcacaaataatgaaaaagttgttgttaaaattctcaagccagtaaaaaagaagaaaattaagcgtgaaataaagattttggagaatttgagaggaggtcccaacatcatcacactggcagacattgtaaaagaccctgtgtcacgaacccccgccttggtttttgaacacgtaaacaacacagacttcaagcaattgtaccagacgttaacagactatgatattcgattttacatgtatgagattctgaaggccctggattattgtcacagcatgggaattatgcacagagatgtcaagccccataatgtcatgattgatcatgagcacagaaagctacgactaatagactggggtttggctgagttttatcatcctggccaagaatataatgtccgagttgcttcccgatacttcaaaggtcctgagctacttgtagactatcagatgtacgattatagtttggatatgtggagtttgggttgtatgctggcaagtatgatctttcggaaggagccatttttccatggacatgacaattatgatcagttggtgaggatagccaaggttctggggacagaagatttatatgactatattgacaaatacaacattgaattagatccacgtttcaatgatatcttgggcagacactctcgaaagcgatgggaacgctttgtccacagtgaaaatcagcaccttgtcagccctgaggccttggatttcctggacaaactgctgcgatatgaccaccagtcacggcttactgcaagagaggcaatggagcacccctatttctacactgttgtgaaggaccaggctcgaatgggttcatctagcatgccagggggcagtacgcccgtcagcagcgccaatatgatgtcagggatttcttcagtgccaaccccttcaccccttggacctctggcaggctcaccagtgattgctgctgccaacccccttgggatgcctgttccagctgccgctggcgctcagcagtaacggccctatctgtctcctgatgcctgagcagaggtgggggagtccaccctctccttgatgcagcttgcgcctggcggggaggggtgaaacacttcagaagcaccgtgtctgaaccgttgcttgtggatttatagtagttcagtcataaaaaaaaaattataataggctgattttcttttttctttttttttttaactcgaacttttcataactcaggggattccctgaaaaattacctgcaggtggaatatttcatggacaaatttttttttctcccctcccaaatttagttcctcatcacaaaagaacaaagataaaccagcctcaatcccggctgctgcatttaggtggagacttcttcccattcccaccattgttcctccaccgtcccacactttagggggttggtatctcgtgctcttctccagagattacaaaaatgtagcttctcaggggaggcaggaagaaaggaaggaaggaaagaaggaagggaggacccaatctataggagcagtggactgcttgctggtcgcttacatcactttactccataagcgcttcagtggggttatcctagtggctcttgtggaagtgtgtcttagttacatcaagatgttgaaaatctacccaaaatgcagacagatactaaaaacttctgttcagtaagaatcatgtcttactgatctaaccctaaatccaactcatttatacttttatttttagttcagtttaaaatgttgataccttccctcccaggctccttaccttggtcttttccctgttcatctcccaacatgctgtgctccatagctggtaggagagggaaggcaaaatctttcttagttttctttgtcttggccattttgaattcatttagttactgggcataacttactgctttttacaaaagaaacaaacattgtctgtacaggtttcatgctagagctaatgggagatgtggccacactgacttccattttaagctttctaccttcttttcctccgaccgtccccttccctcacatgccatccagtgagaagacctgctcctcagtcttgtaaatgtatcttgagaggtaggagcagagccactatctccattgaagctgaaatggtagacctgtaattgtgggaaaactataaactctcttgttacagccccgccaccccttgctgtgtgtatatatataatactttgtccttcatatgtgaaagatccagtgttggaattctttggtgtaaataaacgtttggttttatttatcaaggttagatttaagttccctgtgtaaaggtcttgctgggtgggtgtctcatgttcacatctgaggggcctgcagccctgtaccgtggaggcttcccaaggcccccattttatacacccctcgttcgacccatggtaccgggcagagcagagaggccttaaaaaaaaagcaccacaagccaaagcgtctctggggattaaggatcctttgccataaaactcattttgtgtctcagcagtgcagggattggggatggaaaaagtcgccagtttttgtgtgtttgtgtgtgtgtgtaaagtggactttccactgtaatccaaccacctaagtttatcaggtgcttcactgaggaagcctagttttttaagcacaatagcaaaaccatcagctctgtattttctcctgttatttcattacagtagctgcttgtgggaactaggaaaaattcttccaacatattttaaggcctaaaatcttagttccccattctcctaccttatagattcacaggcctttctcgcctaggcatcatagataaacgtaattgtttggggagttgaatttaatgaacttatctaactttgtaacccatcttggctttagtaactttatcaaggtggtggctttagtgaatataatggtaaactttagaggacgctaaagcctccttttatagcgcttctcaacggtagggagagctgaagggaaaacattctgactgtgtggcagggtgattttcttccttatgaccacttacagtggatatttattgtacttgacccttttatgccctagaatgctgtgagggttaccatgttgaatttgtgcagaagctaaaagcaccagatgtgccagagatgcaatttgtgattatgtttgcactggattgtgatttgaacaggacacttataactaatgagttctttcttttgaggtggggagagggttgtaaatcaagacttcataccctatccttgtagctcggaaattgaggtgtagcttaggctgatgcggagagctgcagacagctggacctccttacacccatcagaccttggaataaaccgaaggtgaatgcagaggactctgaggtgccacccaagagccttttaaaataaatagaagtttttaaaaatgctacttaagagtcactgcagaagcatggagagagagaaaaaaaaaaaagacccaattgggtggggggtgggggggaggcaagggtttacagagtaacaacttacgtgttgttgtaaattacctcatctgtataccttgtattgggacactatttctcagcactacctgtgtctgcattgcttagatggcaggaaatggaatggccaacatgaaaggttatgttggcaattactctgaaagattttttaaagtatttttaaactttgtttgaagtggtccctcccctcttcctctgcttttttttaagtttgaagccagaaggccctccccaccttgctttattggttgtaattgtattgtaattggtatgactaaaccataactgtgctgggaagaagttgtgccatgaaggtctttaattttttttaataaaaacatttaaataaatgaaatgtccctgca

SEQ ID NO: 744 - DNA, 4299 bp, Homo sapiens
  source 1..4299: mol_type = genomic DNA
gggggtttccgcttccggcagcagcggctgcagcctcgctctggtccctgcggctggcggccgagccgtgtgtctcctcctccatcgccgccatattgtctgtgtgagcagaggggagagcggccgccgccgctgccgcttccaccacagtttgaagaaaacaggtctgaaacaaggtcttacccccagctgcttctgaacacagtgactgccagatctccaaacatcaagtccagctttgtccgccaacctgtctgacatgtcgggacccgtgccaagcagggccagagtttacacagatgttaatacacacagacctcgagaatactgggattacgagtcacatgtggtggaatggggaaatcaagatgactaccagctggttcgaaaattaggccgaggtaaatacagtgaagtatttgaagccatcaacatcacaaataatgaaaaagttgttgttaaaattctcaagccagtaaaaaagaagaaaattaagcgtgaaataaagattttggagaatttgagaggaggtcccaacatcatcacactggcagacattgtaaaagaccctgtgtcacgaacccccgccttggtttttgaacacgtaaacaacacagacttcaagcaattgtaccagacgttaacagactatgatattcgattttacatgtatgagattctgaaggccctggattattgtcacagcatgggaattatgcacagagatgtcaagccccataatgtcatgattgatcatgagcacagaaagctacgactaatagactggggtttggctgagttttatcatcctggccaagaatataatgtccgagttgcttcccgatacttcaaaggtcctgagctacttgtagactatcagatgtacgattatagtttggatatgtggagtttgggttgtatgctggcaagtatgatctttcggaaggagccatttttccatggacatgacaattatgatcagttggtgaggatagccaaggttctggggacagaagatttatatgactatattgacaaatacaacattgaattagatccacgtttcaatgatatcttgggcagacactctcgaaagcgatgggaacgctttgtccacagtgaaaatcagcaccttgtcagccctgaggccttggatttcctggacaaactgctgcgatatgaccaccagtcacggcttactgcaagagaggcaatggagcacccctatttctacactgttgtgaaggaccaggctcgaatgggttcatctagcatgccagggggcagtacgcccgtcagcagcgccaatatgatgtcagggatttcttcagtgccaaccccttcaccccttggacctctggcaggctcaccagtgattgctgctgccaacccccttgggatgcctgttccagctgccgctggcgctcagcagtaacggccctatctgtctcctgatgcctgagcagaggtgggggagtccaccctctccttgatgcagcttgcgcctggcggggaggggtgaaacacttcagaagcaccgtgtctgaaccgttgcttgtggatttatagtagttcagtcataaaaaaaaaattataataggctgattttcttttttctttttttttttaactcgaacttttcataactcaggggattccctgaaaaattacctgcaggtggaatatttcatggacaaatttttttttctcccctcccaaatttagttcctcatcacaaaagaacaaagataaaccagcctcaatcccggctgctgcatttaggtggagacttcttcccattcccaccattgttcctccaccgtcccacactttagggggttggtatctcgtgctcttctccagagattacaaaaatgtagcttctcaggggaggcaggaagaaaggaaggaaggaaagaaggaagggaggacccaatctataggagcagtggactgcttgctggtcgcttacatcactttactccataagcgcttcagtggggttatcctagtggctcttgtggaagtgtgtcttagttacatcaagatgttgaaaatctacccaaaatgcagacagatactaaaaacttctgttcagtaagaatcatgtcttactgatctaaccctaaatccaactcatttatacttttatttttagttcagtttaaaatgttgataccttccctcccaggctccttaccttggtcttttccctgttcatctcccaacatgctgtgctccatagctggtaggagagggaaggcaaaatctttcttagttttctttgtcttggccattttgaattcatttagttactgggcataacttactgctttttacaaaagaaacaaacattgtctgtacaggtttcatgctagagctaatgggagatgtggccacactgacttccattttaagctttctaccttcttttcctccgaccgtccccttccctcacatgccatccagtgagaagacctgctcctcagtcttgtaaatgtatcttgagaggtaggagcagagccactatctccattgaagctgaaatggtagacctgtaattgtgggaaaactataaactctcttgttacagccccgccaccccttgctgtgtgtatatatataatactttgtccttcatatgtgaaagatccagtgttggaattctttggtgtaaataaacgtttggttttatttatcaaggttagatttaagttccctgtgtaaaggtcttgctgggtgggtgtctcatgttcacatctgaggggcctgcagccctgtaccgtggaggcttcccaaggcccccattttatacacccctcgttcgacccatggtaccgggcagagcagagaggccttaaaaaaaaagcaccacaagccaaagcgtctctggggattaaggatcctttgccataaaactcattttgtgtctcagcagtgcagggattggggatggaaaaagtcgccagtttttgtgtgtttgtgtgtgtgtgtaaagtggactttccactgtaatccaaccacctaagtttatcaggtgcttcactgaggaagcctagttttttaagcacaatagcaaaaccatcagctctgtattttctcctgttatttcattacagtagctgcttgtgggaactaggaaaaattcttccaacatattttaaggcctaaaatcttagttccccattctcctaccttatagattcacaggcctttctcgcctaggcatcatagataaacgtaattgtttggggagttgaatttaatgaacttatctaactttgtaacccatcttggctttagtaactttatcaaggtggtggctttagtgaatataatggtaaactttagaggacgctaaagcctccttttatagcgcttctcaacggtagggagagctgaagggaaaacattctgactgtgtggcagggtgattttcttccttatgaccacttacagtggatatttattgtacttgacccttttatgccctagaatgctgtgagggttaccatgttgaatttgtgcagaagctaaaagcaccagatgtgccagagatgcaatttgtgattatgtttgcactggattgtgatttgaacaggacacttataactaatgagttctttcttttgaggtggggagagggttgtaaatcaagacttcataccctatccttgtagctcggaaattgaggtgtagcttaggctgatgcggagagctgcagacagctggacctccttacacccatcagaccttggaataaaccgaaggtgaatgcagaggactctgaggtgccacccaagagccttttaaaataaatagaagtttttaaaaatgctacttaagagtcactgcagaagcatggagagagagaaaaaaaaaaaagacccaattgggtggggggtgggggggaggcaagggtttacagagtaacaacttacgtgttgttgtaaattacctcatctgtataccttgtattgggacactatttctcagcactacctgtgtctgcattgcttagatggcaggaaatggaatggccaacatgaaaggttatgttggcaattactctgaaagattttttaaagtatttttaaactttgtttgaagtggtccctcccctcttcctctgcttttttttaagtttgaagccagaaggccctccccaccttgctttattggttgtaattgtattgtaattggtatgactaaaccataactgtgctgggaagaagttgtgccatgaaggtctttaattttttttaataaaaacatttaaataaatgaaatgtccctgca

SEQ ID NO: 745 - DNA, 2606 bp, Homo sapiens
  source 1..2606: mol_type = genomic DNA
atattgtctgtgtgagcagaggggagagcggccgccgccgctgccgcttccaccacagtttgaagaaaacaggtctgaaacaaggtcttacccccagctgcttctgaacacagtgactgccagatctccaaacatcaagtccagctttgtccgccaacctgtctgacatgtcgggacccgtgccaagcagggccagagtttacacagatgttaatacacacagacctcgagaatactgggattacgagtcacatgtggtggaatggggaaatcaagatgactaccagctggttcgaaaattaggccgaggtaaatacagtgaagtatttgaagccatcaacatcacaaataatgaaaaagttgttgttaaaattctcaagccagtaaaaaagaagaaaattaagcgtgaaataaagattttggagaatttgagaggaggtcccaacatcatcacactggcagacattgtaaaagaccctgtgtcacgaacccccgccttggtttttgaacacgtaaacaacacagacttcaagcaattgtaccagacgttaacagactatgatattcgattttacatgtatgagattctgaaggccctggattattgtcacagcatgggaattatgcacagagatgtcaagccccataatgtcatgattgatcatgagcacagaaagctacgactaatagactggggtttggctgagttttatcatcctggccaagaatataatgtccgagttgcttcccgatacttcaaaggtcctgagctacttgtagactatcagatgtacgattatagtttggatatgtggagtttgggttgtatgctggcaagtatgatctttcggaaggagccatttttccatggacatgacaattatgatcagttggtgaggatagccaaggttctggggacagaagatttatatgactatattgacaaatacaacattgaattagatccacgtttcaatgatatcttgggcagacactctcgaaagcgatgggaacgctttgtccacagtgaaaatcagcaccttgtcagccctgaggccttggatttcctggacaaactgctgcgatatgaccaccagtcacggcttactgcaagagaggcaatggagcacccctatttctacactgttgtgaaggaccaggctcgaatgggttcatctagcatgccagggggcagtacgcccgtcagcagcgccaatatgatgtcagggatttcttcagtgccaaccccttcaccccttggacctctggcaggctcaccagtgattgctgctgccaacccccttggatgcctgttccagctgccgctgcgctcagcagtaacggccctatctgtctcctgatgcctgagcagaggtgggggagtccaccctctccttgatgcagcttgcgcctggcggggaggggtgaaacacttcagaagcaccgtgtctgaaccgttgcttgtggatttatagtagttcagtcataaaaaaaaaattataataggctgattttcttttttctttttttttttaactcgaacttttcataactcaggggattccctgaaaaattacctgcaggtggaatatttcatggacaaatttttttttctcccctcccaaatttagttcctcatcacaaaagaacaaagataaaccagcctcaatcccggctgctgcatttaggtggagacttcttcccattcccaccattgttcctccaccgtcccacactttagggggttggtatctcgtgctcttctccagagattacaaaaatgtagcttctcaggggaggcaggaagaaaggaaggaaggaaagaaggaagggaggacccaatctataggagcagtggactgcttgctggtcgcttacatcactttactccataagcgcttcagtggggttatcctagtggctcttgtggaagtgtgtcttagttacatcaagatgttgaaaatctacccaaaatgcagacagatactaaaaacttctgttcagtaagaatcatgtcttactgatctaaccctaaatccaactcatttatacttttatttttagttcagtttaaaatgttgataccttccctcccaggctccttaccttggtcttttccctgttcatctcccaacatgctgtgctccatagctggtaggagagggaaggcaaaatctttcttagttttctttgtcttggccattttgaattcatttagttactgggcataacttactgctttttacaaaagaaacaaacattgtctgtacaggtttcatgctagagctaatgggagatgtggccacactgacttccattttaagctttctaccttcttttcctccgaccgtccccttccctcacatgccatccagtgagaagacctgctcctcagtcttgtaaatgtatcttgagaggtaggagcagagccactatctccattgaagctgaaatggtagacctgtaattgtgggaaaactataaactctcttgttacagccccgccaccccttgctgtgtgtatatatataatactttgtccttcatatgtgaaagatccagtgttggaattctttggtgtaaataaacgtttggttttatttatc

SEQ ID NO: 746 - DNA, 2507 bp, Homo sapiens
  source 1..2507: mol_type = genomic DNA
cccgcctcctggtaggagggggtttccgcttccggcagcagcggctgcagcctcgctctggtccctgcggctggcggccgagccgtgtgtctcctcctccatcgccgccatattgtctgtgtgagcagaggggagagcggccgccgccgctgccgcttccaccacagaaatcaagatgactaccagctggttcgaaaattaggccgaggtaaatacagtgaagtatttgaagccatcaacatcacaaataatgaaaaagttgttgttaaaattctcaagccagtaaaaaagaagaaaattaagcgtgaaataaagattttggagaatttgagaggaggtcccaacatcatcacactggcagacattgtaaaagaccctgtgtcacgaacccccgccttggtttttgaacacgtaaacaacacagacttcaagcaattgtaccagacgttaacagactatgatattcgattttacatgtatgagattctgaaggccctggattattgtcacagcatgggaattatgcacagagatgtcaagccccataatgtcatgattgatcatgagcacagaaagctacgactaatagactggggtttggctgagttttatcatcctggccaagaatataatgtccgagttgcttcccgatacttcaaaggtcctgagctacttgtagactatcagatgtacgattatagtttggatatgtggagtttgggttgtatgctggcaagtatgatctttcggaaggagccatttttccatggacatgacaattatgatcagttggtgaggatagccaaggttctggggacagaagatttatatgactatattgacaaatacaacattgaattagatccacgtttcaatgatatcttgggcagacactctcgaaagcgatgggaacgctttgtccacagtgaaaatcagcaccttgtcagccctgaggccttggatttcctggacaaactgctgcgatatgaccaccagtcacggcttactgcaagagaggcaatggagcacccctatttctacactgttgtgaaggaccaggctcgaatgggttcatctagcatgccagggggcagtacgcccgtcagcagcgccaatatgatgtcagggatttcttcagtgccaaccccttcaccccttggacctctggcaggctcaccagtgattgctgctgccaacccccttgggatgcctgttccagctgccgctggcgctcagcagtaacggccctatctgtctcctgatgcctgagcagaggtgggggagtccaccctctccttgatgcagcttgcgcctggcggggaggggtgaaacacttcagaagcaccgtgtctgaaccgttgcttgtggatttatagtagttcagtcataaaaaaaaaattataataggctgattttcttttttctttttttttttaactcgaacttttcataactcaggggattccctgaaaaattacctgcaggtggaatatttcatggacaaatttttttttctcccctcccaaatttagttcctcatcacaaaagaacaaagataaaccagcctcaatcccggctgctgcatttaggtggagacttcttcccattcccaccattgttcctccaccgtcccacactttagggggttggtatctcgtgctcttctccagagattacaaaaatgtagcttctcaggggaggcaggaagaaaggaaggaaggaaagaaggaagggaggacccaatctataggagcagtggactgcttgctggtcgcttacatcactttactccataagcgcttcagtggggttatcctagtggctcttgtggaagtgtgtcttagttacatcaagatgttgaaaatctacccaaaatgcagacagatactaaaaacttctgttcagtaagaatcatgtcttactgatctaaccctaaatccaactcatttatacttttatttttagttcagtttaaaatgttgataccttccctcccaggctccttaccttggtcttttccctgttcatctcccaacatgctgtgctccatagctggtaggagagggaaggcaaaatctttcttagttttctttgtcttggccattttgaattcatttagttactgggcataacttactgctttttacaaaagaaacaaacattgtctgtacaggtttcatgctagagctaatgggagatgtggccacactgacttccattttaagctttctaccttcttttcctccgaccgtccccttccctcacatgccatccagtgagaagacctgctcctcagtcttgtaaatgtatcttgagaggtaggagcagagccactatctccattgaagctgaaatggtagacctgtaattgtgggaaaactataaactctcttgttacagccccgccaccccttgctgtgtgtatatatataatactttgtccttcatatgtgaaagatccagtgttggaattctttggtgtaaataaacgtttggttttatttatc

SEQ ID NO: 747 - DNA, 1483 bp, Homo sapiens
  source 1..1483: mol_type = genomic DNA
gccgccgctgccgcttccaccacagtttgaagaaaacaggtctgaaacaaggtcttacccccagctgcttctgaacacagtgactgccagatctccaaacatcaagtccagctttgtccgccaacctgtctgacatgtcgggacccgtgccaagcagggccagagtttacacagatgttaatacacacagacctcgagaatactgggattacgagtcacatgtggtggaatggggaaatcaagatgactaccagctggttcgaaaattaggccgaggtaaatacagtgaagtatttgaagccatcaacatcacaaataatgaaaaagttgttgttaaaattctcaagccagtaaaaaagaagaaaattaagcgtgaaataaagattttggagaatttgagaggaggtcccaacatcatcacactggcagacattgtaaaagaccctgtgtcacgaacccccgccttggtttttgaacacgtaaacaacacagacttcaagcaattgtaccagacgttaacagactatgatattcgattttacatgtatgagattctgaaggccctggattattgtcacagcatgggaattatgcacagagatgtcaagccccataatgtcatgattgatcatgagcacagaaagctacgactaatagactggggtttggctgagttttatcatcctggccaagaatataatgtccgagttgcttcccgatacttcaaaggtcctgagctacttgtagactatcagatgtacgattatagtttggatatgtggagtttgggttgtatgctggcaagtatgatctttcggaaggagccatttttccatggacatgacaattatgatcagttggtgaggatagccaaggttctggggacagaagatttatatgactatattgacaaatacaacattgaattagatccacgtttcaatgatatcttgggcagacactctcgaaagcgatgggaacgctttgtccacagtgaaaatcagcaccttgtcagccctgaggccttggatttcctggacaaactgctgcgatatgaccaccagtcacggcttactgcaagagaggcaatggagcacccctatttctacactgttgtgaaggaccaggctcgaatgggttcatctagcatgccagggggcagtacgcccgtcagcagcgccaatatgatgtcagagatgaagttttgccgtgttgcccaggctggtcttgaactcctgagctcaacagtctacccgccttggcctcccaaagtgctgagattagaggcatgagccaccacacctggcccactagggattcttattggcctcaatgtgagaagcccttccccaggtacctccagatggaagcttacaggatggtcagtccatttcttagagaagttcctggggggattgagtatttctgagtcagcttcactcttgcatcatctgctttgacagttttcttggctcctgtaatg

SEQ ID NO: 748 - DNA, 1659 bp, Homo sapiens
  source 1..1659: mol_type = genomic DNA
gcggccgcccgccgccgcgctcctcctcctcctcctccagcgcccggcggcccgctgcctcctccgcccgacgccccgcgtcccccgccgcgccgccgccgccaccctctgcgccccgcgccgccccccggtcccgcccgccatgcccggcccggccgcgggcagcagggcccgggtctacgccgaggtgaacagtctgaggagccgcgagtactgggactacgaggctcacgtcccgagctggggtaatcaagatgattaccaactggttcgaaaacttggtcggggaaaatatagtgaagtatttgaggccattaatatcaccaacaatgagagagtggttgtaaaaatcctgaagccagtgaagaaaaagaagataaaacgagaggttaagattctggagaaccttcgtggtggaacaaatatcattaagctgattgacactgtaaaggaccccgtgtcaaagacaccagctttggtatttgaatatatcaataatacagattttaagcaactctaccagatcctgacagactttgatatccggttttatatgtatgaactacttaaagctctggattactgccacagcaagggaatcatgcacagggatgtgaaacctcacaatgtcatgatagatcaccaacagaaaaagctgcgactgatagattggggtctggcagaattctatcatcctgctcaggagtacaatgttcgtgtagcctcaaggtacttcaagggaccagagctcctcgtggactatcagatgtatgattatagcttggacatgtggagtttgggctgtatgttagcaagcatgatctttcgaagggaaccattcttccatggacaggacaactatgaccagcttgttcgcattgccaaggttctgggtacagaagaactgtatgggtatctgaagaagtatcacatagacctagatccacacttcaacgatatcctgggacaacattcacggaaacgctgggaaaactttatccatagtgagaacagacaccttgtcagccctgaggccctagatcttctggacaaacttctgcgatacgaccatcaacagagactgactgccaaagaggccatggagcacccatacttctaccctgtggtgaaggagcagtcccagccttgtgcagacaatgctgtgctttccagtggtctcacggcagcacgatgaagactggaaagcgacgggtctgttgcggttctcccacttttccataagcagaacaagaaccaaatcaaacgtcttaacgcgtatagagagatcacgttccgtgagcagacacaaaacggtggcaggtttggcgagcacgaactagaccaagcgaagggcagcccaccaccgtatatcaaacctcacttccgaatgtaaaaggctcacttgcctttggcttcctgttgacttcttcccgacccagaaagcatggggaatgtgaagggtatgcagaatgttgttggttactgttgctccccgagcccctcgactcgtcccgtggccgcctgtttttccagcaaaccacgctaactagctgaccacagactccacagtggggggacgggcgcagtatgtggcatggcggcagttacatattattattttaaaagtatatattattgaataaaaggttttaaaagaaa

SEQ ID NO: 749 - DNA, 1169 bp, Homo sapiens
  source 1..1169: mol_type = genomic DNA
gccattaacaaagatggtgcttatggggcaggttccctaacagtcaggattccggttgcagtttttctcccccgccccaaagatacgtggttgcagacggagaaatggaggccagagacaaacaagtactccgctcacttcgcctggagctgggtgcagaggtattggtggagggactggttcttcagtacctctaccaggaaggaatcttgacggaaaaccatattcaagaaatcaatgctcaaaccacaggcctccggaaaacaatgctcctgctggatatcctaccttccaggggccctaaagcatttgatacattcctagattccctacaggagtttccctgggtcagggagaagctgaagaaggcaagggaagaggccatgaccgacctgcctgcaggtgacagattgactgggatcccctcgcacatcctcaacagctccccatcagaccggcagattaaccagctggcccagaggctgggccctgagtgggagcccatggtgctgtctctgggactgtcccagacggatatctaccgctgtaaggccaaccacccccacaacgtgcagtcgcaggtggtggaggccttcatccgttggcggcagcgcttcgggaagcaggccaccttccagagcctgcacaacgggctgcgggctgtggaggtggacccctcgctgctcctgcacatgttggagtgatggtgcctccagcaaccgctggggagtgtgtccctgagtcatgtgggctgaatcctgactttcactcagagcaggtggttttttgtgtaggtttgttttttatttttgatgatcttcagatggaaggagaaaacagggtttccactagacattacttgaaaggccagattactcagcagatctcccatgttggctcaacaattctttgtttttaattgcttgaagattgcattgttgtaattgttcagtttttaaatgtgtaatggcattttaatagactagtaaatcacagtggttcaaaatatatatccatatatatatatatccatatatatatctcatgtcatcacattacaggcaggtgtctcatatgtaaaacatttacctgaatgttgtctgaggactgaactgtggactttactattcataatgataaaataataaaatgcgaattactatatataa

SEQ ID NO: 750 - DNA, 366 bp, Homo sapiens
  source 1..366: mol_type = genomic DNA
atggaggccagagacaaacaagtactccgctcacttcgcctggagctgggtgcagaggtattggtggagggactggttcttcagtacctctaccaggaaggaatcttgacggaaaaccatattcaagaaatcaatgctcaaaccacaggcctccggaaaacaatgctcctgctggatatcctaccttccaggggccctaaagcatttgatacattcctagattccctacaggagtttccctgggtcagggagaagctgaagaaggcaagggaagaggccatgaccgacctgcctgcagagatgaggaaactgaggccaaaggattctgttacttgcctggcttcacagctcacctggagattctga

SEQ ID NO: 751 - DNA, 1403 bp, Homo sapiens
  source 1..1403: mol_type = genomic DNA
aagggtttcagcggccgaagcagagcctttttaaatagttcccaatgggcgctcacggccaaacgtgaacacctcccctcctcacctgtcacctcctgaactttacagggttgcgagggggagtgtgggatcgggtgtcgcctagccgtggtcgtactgcccgggtgtgtctgaagccccatctgtcatccctgcctgccttcccggtcacttaaccttcactgccttacacacaaccaagccacagcacactggtgcaggggtggtggaactgcaccttcaaatcgtgcctggctactgaccagtgctgggggagaaatggaggccagagacaaacaagtactccgctcacttcgcctggagctgggtgcagaggtattggtggagggactggttcttcagtacctctaccaggaaggaatcttgacggaaaaccatattcaagaaatcaatgctcaaaccacaggcctccggaaaacaatgctcctgctggatatcctaccttccaggggccctaaagcatttgatacattcctagattccctacaggagtttccctgggtcagggagaagctgaagaaggcaagggaagaggccatgaccgacctgcctgcaggtgacagattgactgggatcccctcgcacatcctcaacagctccccatcagaccggcagattaaccagctggcccagaggctgggccctgagtgggagcccatggtgctgtctctgggactgtcccagacggatatctaccgctgtaaggccaaccacccccacaacgtgcagtcgcaggtggtggaggccttcatccgttggcggcagcgcttcgggaagcaggccaccttccagagcctgcacaacgggctgcgggctgtggaggtggacccctcgctgctcctgcacatgttggagtgatggtgcctccagcaaccgctggggagtgtgtccctgagtcatgtgggctgaatcctgactttcactcagagcaggtggttttttgtgtaggtttgttttttatttttgatgatcttcagatggaaggagaaaacagggtttccactagacattacttgaaaggccagattactcagcagatctcccatgttggctcaacaattctttgtttttaattgcttgaagattgcattgttgtaattgttcagtttttaaatgtgtaatggcattttaatagactagtaaatcacagtggttcaaaatatatatccatatatatatatatccatatatatatctcatgtcatcacattacaggcaggtgtctcatatgtaaaacatttacctgaatgttgtctgaggactgaactgtggactttactattcataatgataaaataataaaatgcgaattactatatataatgtgcctcactcatgagaaa

SEQ ID NO: 752 - DNA, 1293 bp, Homo sapiens
  source 1..1293: mol_type = genomic DNA
ggggcaggttccctaacagtcaggattccggttgcagtttttctcccccgccccaaagatacgtggttgcagacggagaaatggaggccagagacaaacaagtactccgctcacttcgcctggagctgggtgcagaggtattggtggagggactggttcttcagtacctctaccaggaaggaatcttgacggaaaaccatattcaagaaatcaatgctcaaaccacaggcctccggaaaacaatgctcctgctggatatcctaccttccaggggccctaaagcatttgatacattcctagattccctacaggagtttccctgggtcagggagaagctgaagaaggcaagggaagaggccatgaccgacctgcctgcagggtgttggccatgatccttatgatggggaggaagggaatcaccaattttctaccccatcccactgagcaacttagagatgacctaaggcctcgttacctgtgtggagtaactgggaattggaagagatgaggaaactgaggccaaaggattctgttacttgcctggcttcacagctcacctggagattctgaactggcatcttcctctctctgccatcaccccagaccctaccctctttcctctacaccagtggttctcaatcaagggcgattttgccttccaggggacatttgacaatgtctggaggcgtttttggttgtcacaattctgtgtatgtgtgtgggtgggcggggggcaggggattatgttggcatctagtgagtagataacagagatgctgctaaacctacaatgctcagatggcccctaacaaagaagtatgttgtccaaaatgtcaatggtgcagagggtgagaagccctggtctatacagagctcagcagtccagagcaattgcaacctctgggagttgccaagagctcctctgcccagcaacaggcttggcctctctcctgtggctgccacaagagttaaagccactgtctggaatgccctttggcagtggccaagtgtcccctgcagaactgactgcgggacatgcggtgcatcagccggagctgatgtgttttgtaatttatagtcacagggcgcctgtcttcatttagcagtaggcctgctggcagcttccctgccagggaggaagcaagttccacagaggcccacagcccccgccagctgccggcccgtggtatttggggacggctgttgctcagagacacctgggaataggccggggccgagatggcgctgagcactcggtctccccttcagacccatccatcagcagcggtccct

SEQ ID NO: 753 - DNA, 2295 bp, Homo sapiens
  source 1..2295: mol_type = genomic DNA
tttactcctaacgcgtggaacttgtgtcgacatccacccccggttactgcatactcagtcacacaagccatagcaggaaacagcgagcttgcagcctcaccgacgagtctcaactaaaagggactcccggagctaggggtggggactcggcctcacacagtgagtgccggctattggacttttgtccagtgacagctgagacaacaaggaccacgggaggaggtgtaggagagaagcgccgcgaacagcgatcgcccagcaccaagtccgcttccaggctttcggtttctttgcctccatcttgggtgcgccttcccggcgtctaggggagcgaaggctgaggtggcagcggcaggagagtccggccgcgacaggacgaactcccccactggaaaggattctgaaagaaatgaagtcagccctcagaaatgaagttgactgcctgctggctttctgttgactggcccggagctgtactgcaagacccttgtgagcttccctagtctaagagtaggatgtctgctgaagtcatccatcaggttgaagaagcacttgatacagatgagaaggagatgctgctctttttgtgccgggatgttgctatagatgtggttccacctaatgtcagggaccttctggatattttacgggaaagaggtaagctgtctgtcggggacttggctgaactgctctacagagtgaggcgatttgacctgctcaaacgtatcttgaagatggacagaaaagctgtggagacccacctgctcaggaaccctcaccttgtttcggactatagagtgctgatggcagagattggtgaggatttggataaatctgatgtgtcctcattaattttcctcatgaaggattacatgggccgaggcaagataagcaaggagaagagtttcttggaccttgtggttgagttggagaaactaaatctggttgccccagatcaactggatttattagaaaaatgcctaaagaacatccacagaatagacctgaagacaaaaatccagaagtacaagcagtctgttcaaggagcagggacaagttacaggaatgttctccaagcagcaatccaaaagagtctcaaggatccttcaaataacttcaggctccataatgggagaagtaaagaacaaagacttaaggaacagcttggcgctcaacaagaaccagtgaagaaatccattcaggaatcagaagcttttttgcctcagagcatacctgaagagagatacaagatgaagagcaagcccctaggaatctgcctgataatcgattgcattggcaatgagacagagcttcttcgagacaccttcacttccctgggctatgaagtccagaaattcttgcatctcagtatgcatggtatatcccagattcttggccaatttgcctgtatgcccgagcaccgagactacgacagctttgtgtgtgtcctggtgagccgaggaggctcccagagtgtgtatggtgtggatcagactcactcagggctccccctgcatcacatcaggaggatgttcatgggagattcatgcccttatctagcagggaagccaaagatgttttttattcagaactatgtggtgtcagagggccagctggaggacagcagcctcttggaggtggatgggccagcgatgaagaatgtggaattcaaggctcagaagcgagggctgtgcacagttcaccgagaagctgacttcttctggagcctgtgtactgcggacatgtccctgctggagcagtctcacagctcaccatccctgtacctgcagtgcctctcccagaaactgagacaagaaagaaaacgcccactcctggatcttcacattgaactcaatggctacatgtatgattggaacagcagagtttctgccaaggagaaatattatgtctggctgcagcacactctgagaaagaaacttatcctctcctacacataagaaaccaaaaggctgggcgtagtggctcacacctgtaatcccagcactttgggaggccaaggagggcagatcacttcaggtcaggagttcgagaccagcctggccaacatggtaaacgctgtccctagtaaaaatacaaaaattagctgggtgtgggtgtgggtacctgtattcccagttacttgggaggctgaggtgggaggatcttttgaacccaggagttcagggtcatagcatgctgtgattgtgcctacgaatagccactgcataccaacctgggcaatatagcaagatcccatctctttaaaaaaaaaaaaaaaggacaggaactatctta

SEQ ID NO: 754 - DNA, 1841 bp, Homo sapiens
  source 1..1841: mol_type = genomic DNA
caagccatagcaggaaacagcgagcttgcagcctcaccgacgagtctcaactaaaagggactcccggagctaggggtggggactcggcctcacacagtgagtgccggctattggacttttgtccagtgacagctgagacaacaaggaccacgggaggaggtgtaggagagaagcgccgcgaacagcgatcgcccagcaccaagtccgcttccaggctttcggtttctttgcctccatcttgggtgcgccttcccggcgtctaggggagcgaaggctgaggtggcagcggcaggagagtccggccgcgacaggacgaactcccccactggaaaggattctgaaagaaatgaagtcagccctcagaaatgaagttgactgcctgctggctttctgttgactggcccggagctgtactgcaagacccttgtgagcttccctagtctaagagtaggatgtctgctgaagtcatccatcaggttgaagaagcacttgatacagatgagaaggagatgctgctctttttgtgccgggatgttgctatagatgtggttccacctaatgtcagggaccttctggatattttacgggaaagaggtaagctgtctgtcggggacttggctgaactgctctacagagtgaggcgatttgacctgctcaaacgtatcttgaagatggacagaaaagctgtggagacccacctgctcaggaaccctcaccttgtttcggactatagagtgctgatggcagagattggtgaggatttggataaatctgatgtgtcctcattaattttcctcatgaaggattacatgggccgaggcaagataagcaaggagaagagtttcttggaccttgtggttgagttggagaaactaaatctggttgccccagatcaactggatttattagaaaaatgcctaaagaacatccacagaatagacctgaagacaaaaatccagaagtacaagcagtctgttcaaggagcagggacaagttacaggaatgttctccaagcagcaatccaaaagagtctcaaggatccttcaaataacttcaggctccataatgggagaagtaaagaacaaagacttaaggaacagcttggcgctcaacaagaaccagtgaagaaatccattcaggaatcagaagcttttttgcctcagagcatacctgaagagagatacaagatgaagagcaagcccctaggaatctgcctgataatcgattgcattggcaatgagacagagcttcttcgagacaccttcacttccctgggctatgaagtccagaaattcttgcatctcagtatgcatggtatatcccagattcttggccaatttgcctgtatgcccgagcaccgagactacgacagctttgtgtgtgtcctggtgagccgaggaggctcccagagtgtgtatggtgtggatcagactcactcagggctccccctgcatcacatcaggaggatgttcatgggagattcatgcccttatctagcagggaagccaaagatgttttttattcagaactatgtggtgtcagagggccagctggaggacagcagcctcttggaggtggatgggccagcgatgaagaatgtggaattcaaggctcagaagcgagggctgtgcacagttcaccgagaagctgacttcttctggagcctgtgtactgcggacatgtccctgctggagcagtctcacagctcaccatccctgtacctgcagtgcctctcccagaaactgagacaagaaagggggacaattcccggaagtggaattacagagtcaaaggacatgcatttttcaagcctcggatgcatcttactagatgtcctatag

SEQ ID NO: 755 - DNA, 1787 bp, Homo sapiens
  source 1..1787: mol_type = genomic DNA
caagccatagcaggaaacagcgagcttgcagcctcaccgacgagtctcaactaaaagggactcccggagctaggggtggggactcggcctcacacagtgagtgccggctattggacttttgtccagtgacagctgagacaacaaggaccacgggaggaggtgtaggagagaagcgccgcgaacagcgatcgcccagcaccaagtccgcttccaggctttcggtttctttgcctccatcttgggtgcgccttcccggcgtctaggggagcgaaggctgaggtggcagcggcaggagagtccggccgcgacaggacgaactcccccactggaaaggattctgaaagaaatgaagtcagccctcagaaatgaagttgactgcctgctggctttctgttgactggcccggagctgtactgcaagacccttgtgagcttccctagtctaagagtaggatgtctgctgaagtcatccatcaggttgaagaagcacttgatacagatgagaaggagatgctgctctttttgtgccgggatgttgctatagatgtggttccacctaatgtcagggaccttctggatattttacgggaaagaggtaagctgtctgtcggggacttggctgaactgctctacagagtgaggcgatttgacctgctcaaacgtatcttgaagatggacagaaaagctgtggagacccacctgctcaggaaccctcaccttgtttcggactatagagtgctgatggcagagattggtgaggatttggataaatctgatgtgtcctcattaattttcctcatgaaggattacatgggccgaggcaagataagcaaggagaagagtttcttggaccttgtggttgagttggagaaactaaatctggttgccccagatcaactggatttattagaaaaatgcctaaagaacatccacagaatagacctgaagacaaaaatccagaagtacaagcagtctgttcaaggagcagggacaagttacaggaatgttctccaagcagcaatccaaaagagtctcaaggatccttcaaataacttcagggaagaaccagtgaagaaatccattcaggaatcagaagcttttttgcctcagagcatacctgaagagagatacaagatgaagagcaagcccctaggaatctgcctgataatcgattgcattggcaatgagacagagcttcttcgagacaccttcacttccctgggctatgaagtccagaaattcttgcatctcagtatgcatggtatatcccagattcttggccaatttgcctgtatgcccgagcaccgagactacgacagctttgtgtgtgtcctggtgagccgaggaggctcccagagtgtgtatggtgtggatcagactcactcagggctccccctgcatcacatcaggaggatgttcatgggagattcatgcccttatctagcagggaagccaaagatgttttttattcagaactatgtggtgtcagagggccagctggaggacagcagcctcttggaggtggatgggccagcgatgaagaatgtggaattcaaggctcagaagcgagggctgtgcacagttcaccgagaagctgacttcttctggagcctgtgtactgcggacatgtccctgctggagcagtctcacagctcaccatccctgtacctgcagtgcctctcccagaaactgagacaagaaagggggacaattcccggaagtggaattacagagtcaaaggacatgcatttttcaagcctcggatgcatcttactagatgtcctatag

SEQ ID NO: 756 - DNA, 1689 bp, Homo sapiens
  source 1..1689: mol_type = genomic DNA
caagccatagcaggaaacagcgagcttgcagcctcaccgacgagtctcaactaaaagggactcccggagctaggggtggggactcggcctcacacagtgagtgccggctattggacttttgtccagtgacagctgagacaacaaggaccacgggaggaggtgtaggagagaagcgccgcgaacagcgatcgcccagcaccaagtccgcttccaggctttcggtttctttgcctccatcttgggtgcgccttcccggcgtctaggggagcgaaggctgaggtggcagcggcaggagagtccggccgcgacaggacgaactcccccactggaaaggattctgaaagaaatgaagtcagccctcagaaatgaagttgactgcctgctggctttctgttgactggcccggagctgtactgcaagacccttgtgagcttccctagtctaagagtaggatgtctgctgaagtcatccatcaggttgaagaagcacttgatacagatgagaaggagatgctgctctttttgtgccgggatgttgctatagatgtggttccacctaatgtcagggaccttctggatattttacgggaaagaggtaagctgtctgtcggggacttggctgaactgctctacagagtgaggcgatttgacctgctcaaacgtatcttgaagatggacagaaaagctgtggagacccacctgctcaggaaccctcaccttgtttcggactatagagtgctgatggcagagattggtgaggatttggataaatctgatgtgtcctcattaattttcctcatgaaggattacatgggccgaggcaagataagcaaggagaagagtttcttggaccttgtggttgagttggagaaactaaatctggttgccccagatcaactggatttattagaaaaatgcctaaagaacatccacagaatagacctgaagacaaaaatccagaagtacaagcagtctgttcaaggagcagggacaagttacaggaatgttctccaagcagcaatccaaaagagtctcaaggatccttcaaataacttcaggctccataatgggagaagtaaagaacaaagacttaaggaacagcttggcgctcaacaagaaccagtgaagaaatccattcaggaatcagaagcttttttgcctcagagcatacctgaagagagatacaagatgaagagcaagcccctaggaatctgcctgataatcgattgcattggcaatgagacagaaaacgcccactcctggatcttcacattgaactcaatggctacatgtatgattggaacagcagagtttctgccaaggagaaatattatgtctggctgcagcacactctgagaaagaaacttatcctctcctacacataagaaaccaaaaggctgggcgtagtggctcacacctgtaatcccagcactttgggaggccaaggagggcagatcacttcaggtcaggagttcgagaccagcctggccaacatggtaaacgctgtccctagtaaaaatacaaaaattagctgggtgtgggtgtgggtacctgtattcccagttacttgggaggctgaggtgggaggatcttttgaacccaggagttcagggtcatagcatgctgtgattgtgcctacgaatagccactgcataccaacctgggcaatatagcaagatcccatctcttt

SEQ ID NO: 757 - DNA, 4415 bp, Homo sapiens
  source 1..4415: mol_type = genomic DNA
gggtgcgccttcccggcgtctaggggagcgaaggctgaggtggcagcggcaggagagtccggccgcgacaggacgaactcccccactggaaaggattctgaaagaaatgaagtcagccctcagaaatgaagttgactgcctgctggctttctgttgactggcccggagctgtactgcaagacccttgtgagcttccctagtctaagagtaggatgtctgctgaagtcatccatcaggttgaagaagcacttgatacagatgagaaggagatgctgctctttttgtgccgggatgttgctatagatgtggttccacctaatgtcagggaccttctggatattttacgggaaagaggtaagctgtctgtcggggacttggctgaactgctctacagagtgaggcgatttgacctgctcaaacgtatcttgaagatggacagaaaagctgtggagacccacctgctcaggaaccctcaccttgtttcggactatagagtgctgatggcagagattggtgaggatttggataaatctgatgtgtcctcattaattttcctcatgaaggattacatgggccgaggcaagataagcaaggagaagagtttcttggaccttgtggttgagttggagaaactaaatctggttgccccagatcaactggatttattagaaaaatgcctaaagaacatccacagaatagacctgaagacaaaaatccagaagtacaagcagtctggtggatggaatggaacctggatgaccaaagcctcctttagcttgtggctagaaatcgcgtccctttatattcttcatatcccagatctgccaactccattgccctgtatattcatgatctctgcaaaatgctgccaagcagttcttaacatttcagtcttcaagaaagaatctgggatctgcacaggctggcagagctatggacattcaggggttttgcatgtatgctgaaccctactgccttgctctggtatttggcctcacaaccactgtccaacttcgggtgatgtcacttgggtctcataccttccttgcatgtgtcccaagtttcacaaaacctccttatggaaaagagcacattcgatttcttccttgataaaagggaccagattcacattggccttctgctttacttgcattcctcattgtcttttagactcagcctcagcttgggctttgttagcaagttcactgccaccatagcatcacagcctaaagggcatggctgagactcattgatctatagagcactcttttaccccaacatactctaaatgactgatcaaagatcaaaaacagaagagcatttatactccattcttgttttttgagacctgcttgatttattccgattatttaacacacagggacgcaacagtgatcccaaagtgtgtaaagttaaagccttcaactgcagctgaggagagggcaggaatggggacggtggtgagtcaggaatgacaggcaggcagccatgaccagggcagcctcctccccagggccagggactggggagtggcctaaggagcaggacctaagggtagcccagagctggggaagggggcagagacctccccttggcctaggtctggagctcagaagtgccacatgcctgagggggcagcggcctgggaagggccagaggcagggtcaggagagcaccatttcctggggggctggggacagggaggtgccctataggagaagccaggaggggccgtctgcccctgaggtgggggctgggctggagcaggctgcagcaagaaagacctgaggcaggcacagggcctgagagcccagctgcctgggttcaggggggctcccagggcagcctggcccagggagcagtcctgactctgcaggggatgcccagcaaggggggctgcagacccctcagagcctcccctcctctctccctggaaaggagctggggaacccatagtgcaaatctgtggaccactcagttatggagggaggctgtgcctgaaggtggacactggggtgcactccctccaccatctcgccctgcaccgctgtcctcagtacagccacttctcgtaagagtgcaggccatggatgccaccgtcgatctgggctgacatggtctgcttctcaaacttgagctcccctgagtacatcatggaccgaaggacagacaggctgtgggccccgatatcctggcagccatgctggatgcccactatgaggtagggcacgaacttctgaatggaccctttgtcctggatggagcccaagacatcctgcgtgatcttcgccttatccccgtcgttgaagtattgtttctggctgctgctgctcttctccatggcatccagtgagcccatgccctggtacttcttgagctgcattccgtctgagaagaagcactcgccgggggcctccatggtggcggccagcagggagcccatcatcactgtggaggctcctagggccagggccttgaccacatgccccatggtctggatgccaccatcggctatgatgggcacaccaaagttctgggtatgcttggccaccttgtacacagcagtgccctggggctgactgcaggctatcacttcctggttgatgtagatggagccgcgcagtccatgcccctgcccagcccatccacaccagcgtcaatcaggttgttggcctgggctgctgtcaccacgttccccccaatcacctggaggtggggttacttttgtttgatgtaatgcaccatggcgatctgatacaccgagttcccttgggacgagtccaagcctatgacattgacgcctacctgggtgagcaggtccaggtggtatttgtcatcctcatgggtacccacagctgccccgcccagcagctgctcatgggaatccttggaggccacagggtagtctcggttcttcagcgcggtgcaggtgataatggccaccagctcatcgcgatcattgacgataggcagcttcctttcttactaagctgcaggatctcatttgcctctttcaacctcacactgctggagccaccactagcttgatccttggcatcatcacctcactgaggagggtggtgtggtccttctcagcaagaaagtcgatgtctcgggaggtgacgatgcccaccagcttgctgcccatggtacccgtctcagtgatggggatgccagagaagccatgacgcatcttggcctccaacacatcacccacagtgtgcaaggggctcagcaccacggggtgtgtgataaagcccggttcaaacttcttgaccttctgcacctcactggcctggaactctggggtgcagttgtggtgaatgaaaccagtacctcccatcagagccatcacgatggccaggtcggcctctgtcacagtgtccatgggggaggagatcagcggcgtcttcagagtgaccattgggtcagggctgaggtcaggtccacctcatcagctatgaagtctatgaatcctgggagaatcaagaagtcgttgtaggtgagtccctggtcactggcgaagagctgctgcacggtgtggggaaaagaaagagagatcagattgttactgtgtctgtgtagaaagaagtagacataggagactccattttgttctgtactaagaaaaattcttctgcctcgagatgctgttaatctgtaaccttacccccaaccctgtgctccctgaaacatgtgctatgtcaactcagggttaagtggattaagggctgtgcaagatgtgctttgttaaacagatgcttgaaggcagcgtgctcgttaagagtcatcaccactccctaatctcaagtacccagggacacaaacactgcggaaggccgcagggacctctgcctaggaaagccaggtattgtccaaggtttctccccatgtgatagtctgaaatatggcctcatgggaagggaaagacctgaccgtcccccagcccgacacccataaagggtctgtgctgaggaggattagtaaaagaggaaggaacgcctgtttgcagttgagagaagaggaaggcatctgtctcctgccagtccctgggcaatggaatgtctcggtgtaaaacctgattgtatgttccatctgctgagataggggaaaaccgccttagggctggaggtgggacatgcgggcagcactactgctctttaagtcattgagatgtttatgtgtatgcatatctgaagcacagcacttaattctttaccttgttcttgatgcagagacctttgttcacgtgtttatctgctgaccttctctccactattattctatgaccctgccacacccccctctccgagaaacacctaaaaatgatcaataaatactaagggaactaagaggccggcgggatcctccgtatgctgaacgccggtcccctgggcccccttttttctttctct

SEQ ID NO: 758 - DNA, 684 bp, Homo sapiens
  source 1..684: mol_type = genomic DNA
agtcaggctgtctgtcgttgggcttttcccacttccttctactacgtacttcttccctattcctcctactgaggccattaaacccttagttgtaattttccctgaacatgctttacattctgatgaattctgaaaaagaatgtggggtttccttgcagatgagttcatctgttgtttcatttcctttacaataactcccccactggaaaggattctgaaagaaatgaagtcagccctcagaaatgaagttgactgcctgctggctttctgttgactggcccggagctgtactgcaagacccttgtgagcttccctagtctaagagtaggatgtctgctgaagtcatccatcaggttgaagaagcacttgatacagatgagaaggagatgctgctctttttgtgccgggatgttgctatagatgtggttccacctaatgtcagggaccttctggatattttacgggaaagaggtaagctgtctgtcggggacttggctgaactgctctacagagtgaggcgatttgacctgctcaaacgtatcttgaagatggacagaaaagctgtggagacccacctgctcaggaaccctcaccttgtttcggactatagagtgctgatggcagagattggtgaggatttggataaatctgatgtgtcctcattaattttcctcatgaaggatt

SEQ ID NO: 759 - DNA, 2128 bp, Homo sapiens
  source 1..2128: mol_type = genomic DNA
cactcagtcctggtggggtcgcacgtaacggtcctgagctatgcataagccgtttgaccacgcatggagaattttaccacccagagacacgcgagtggccctgtgcaagtttcaactgcgcggggggcggggaattccgcagacaggattctagaatttatgtcttgtgtggtaacatttcagccggtgggtggcggggattaggcgtgaagcggttcagcaggcagaggttctcggacgccctccggcgaagccacctgttgatgcttttgactttctgtccttgttcctcgtcccatctggagcatttccaattctggttttgcggagcagcaggtctgagcttgtccggcgagggtgggagttggtcccggcggagatccagtgggaagagccggcggctgcccgggcaactcccccactggaaaggattctgaaagaaatgaagtcagccctcagaaatgaagttgactgcctgctggctttctgttgactggcccggagctgtactgcaagacccttgtgagcttccctagtctaagagtaggatgtctgctgaagtcatccatcaggttgaagaagcacttgatacagatgagaaggagatgctgctctttttgtgccgggatgttgctatagatgtggttccacctaatgtcagggaccttctggatattttacgggaaagaggtaagctgtctgtcggggacttggctgaactgctctacagagtgaggcgatttgacctgctcaaacgtatcttgaagatggacagaaaagctgtggagacccacctgctcaggaaccctcaccttgtttcggactatagagtgctgatggcagagattggtgaggatttggataaatctgatgtgtcctcattaattttcctcatgaaggattacatgggccgaggcaagataagcaaggagaagagtttcttggaccttgtggttgagttggagaaactaaatctggttgccccagatcaactggatttattagaaaaatgcctaaagaacatccacagaatagacctgaagacaaaaatccagaagtacaagcagtctgttcaaggagcagggacaagttacaggaatgttctccaagcagcaatccaaaagagtctcaaggatccttcaaataacttcaggctccataatgggagaagtaaagaacaaagacttaaggaacagcttggcgctcaacaagaaccagtgaagaaatccattcaggaatcagaagcttttttgcctcagagcatacctgaagagagatacaagatgaagagcaagcccctaggaatctgcctgataatcgattgcattggcaatgagacagagcttcttcgagacaccttcacttccctgggctatgaagtccagaaattcttgcatctcagtatgcatggtatatcccagattcttggccaatttgcctgtatgcccgagcaccgagactacgacagctttgtgtgtgtcctggtgagccgaggaggctcccagagtgtgtatggtgtggatcagactcactcagggctccccctgcatcacatcaggaggatgttcatgggagattcatgcccttatctagcagggaagccaaagatgttttttattcagaactatgtggtgtcagagggccagctggaggacagcagcctcttggaggtggatgggccagcgatgaagaatgtggaattcaaggctcagaagcgagggctgtgcacagttcaccgagaagctgacttcttctggagcctgtgtactgcggacatgtccctgctggagcagtctcacagctcaccatccctgtacctgcagtgcctctcccagaaactgagacaagaaagaaaacgcccactcctggatcttcacattgaactcaatggctacatgtatgattggaacagcagagtttctgccaaggagaaatattatgtctggctgcagcacactctgagaaagaaacttatcctctcctacacataagaaaccaaaaggctgggcgtagtggctcacacctgtaatcccagcactttgggaggccaaggagggcagatcacttcaggtcaggagttcgagaccagcctggccaacatggtaaacgctgtccctagtaaaaatac

SEQ ID NO: 760 - DNA, 596 bp, Homo sapiens
  source 1..596: mol_type = genomic DNA
caatgatgaccagtctgttcaagacccaagagggctgagattggcagccctggccattgtttaccacagcctaatgaagatgagtaaaagcctatctatccccaaggacctccacatatgacagtactcaactgagtctcacataggatagaataagataaaatgctggaagagaacacaaatagtgctacaaagcaggaagagagacttgatttggggatcaagacaagcttatagaagagacatcttgagagagaagatataatttcagaactcccccactggaaaggattctgaaagaaatgaagtcagccctcagaaatgaagttgactgcctgctggctttctgttgactggcccggagctgtactgcaagacccttgtgagcttccctagtctaagagtaggatgtctgctgaagtcatccatcaggttgaagaagcacttgatacagatgagaaggagatgctgctctttttgtgccgggatgttgctatagatgtggttccacctaatgtcagggaccttctggatattttacgggaaagaggtaagctgtctgtcggggacttggctgaactgctctacagagtgag

SEQ ID NO: 761 - DNA, 435 bp, Homo sapiens
  source 1..435: mol_type = genomic DNA
cctttcgaaagttgttgggaacgtggactttcccaacaattgtgtatgcgctcgatctcactcagtgggagccgccgccctggagggaatttcacaatagcctgaactcccccactggaaaggattctgaaagaaatgaagtcagccctcagaaatgaagttgactgcctgctggctttctgttgactggcccggagctgtactgcaagacccttgtgagcttccctagtctaagagtaggatgtctgctgaagtcatccatcaggttgaagaagcacttgatacagatgagaaggagatgctgctctttttgtgccgggatgttgctatagatgtggttccacctaatgtcagggaccttctggatattttacgggaaagaggtaagctgtctgtcggggacttggctgaactgctctacagagtgaggcgatt

SEQ ID NO: 762 - DNA, 655 bp, Homo sapiens
  source 1..655: mol_type = genomic DNA
cacagcggtacaagctgcaccccgatggacctgagagaccggaagtaacccttggccaactctggccgccccctgcagccgcagccccagaggcccacccgcgagcttcagtggcgggccctcagcgtcgtaactcccccactggaaaggattctgaaagaaatgaagtcagccctcagaaatgaagttgactgcctgctggctttctgttgactggcccggagctgtactgcaagacccttgtgagcttccctagtctaagagtaggatgtctgctgaagtcatccatcaggttgaagaagcacttgatacagatgagaaggagatgctgctctttttgtgccgggatgttgctatagatgtggttccacctaatgtcagggaccttctggatattttacgggaaagaggtaagctgtctgtcggggacttggctgaactgctctacagagtgaggcgatttgacctgctcaaacgtatcttgaagatggacagaaaagctgtggagacccacctgctcaggaaccctcaccttgtttcggactatagagtgctgatggcagagattggtgaggatttggataaatctgatgtgtcctcattaattttcctcatgaaggattacatgggccgaggcaagataagcaaggagaag

SEQ ID NO: 763 - DNA, 1679 bp, Homo sapiens
  source 1..1679: mol_type = genomic DNA
atactcagtcacacaagccatagcaggaaacagcgagcttgcagcctcaccgacgagtctcaactaaaagggactcccggagctaggggtggggactcggcctcacacagtgagtgccggctattggacttttgtccagtgacagctgagacaacaaggaccacgggaggaggtgtaggagagaagcgccgcgaacagcgatcgcccagcaccaagtccgcttccaggctttcggtttctttgcctccatcttgggtgcgccttcccggcgtctaggggagcgaaggctgaggtggcagcggcaggagagtccggccgcgacaggacgagtgctgatggcagagattggtgaggatttggataaatctgatgtgtcctcattaattttcctcatgaaggattacatgggccgaggcaagataagcaaggagaagagtttcttggaccttgtggttgagttggagaaactaaatctggttgccccagatcaactggatttattagaaaaatgcctaaagaacatccacagaatagacctgaagacaaaaatccagaagtacaagcagtctgttcaaggagcagggacaagttacaggaatgttctccaagcagcaatccaaaagagtctcaaggatccttcaaataacttcaggctccataatgggagaagtaaagaacaaagacttaaggaacagcttggcgctcaacaagaaccagtgaagaaatccattcaggaatcagaagcttttttgcctcagagcatacctgaagagagatacaagatgaagagcaagcccctaggaatctgcctgataatcgattgcattggcaatgagacagagcttcttcgagacaccttcacttccctgggctatgaagtccagaaattcttgcatctcagtatgcatggtatatcccagattcttggccaatttgcctgtatgcccgagcaccgagactacgacagctttgtgtgtgtcctggtgagccgaggaggctcccagagtgtgtatggtgtggatcagactcactcagggctccccctgcatcacatcaggaggatgttcatgggagattcatgcccttatctagcagggaagccaaagatgttttttattcagaactatgtggtgtcagagggccagctggaggacagcagcctcttggaggtggatgggccagcgatgaagaatgtggaattcaaggctcagaagcgagggctgtgcacagttcaccgagaagctgacttcttctggagcctgtgtactgcggacatgtccctgctggagcagtctcacagctcaccatccctgtacctgcagtgcctctcccagaaactgagacaagaaagaaaacgcccactcctggatcttcacattgaactcaatggctacatgtatgattggaacagcagagtttctgccaaggagaaatattatgtctggctgcagcacactctgagaaagaaacttatcctctcctacacataagaaaccaaaaggctgggcgtagtggctcacacctgtaatcccagcactttgggaggccaaggagggcagatcacttcaggtcaggagttcgagaccagcctggccaacatggtaaacgctgtccctagtaaaaatacaaaaattagctgggtgtgggtgtgggtacctgtattcccagttacttgggag

SEQ ID NO: 764 - DNA, 1283 bp, Homo sapiens
  source 1..1283: mol_type = genomic DNA
caagccatagcaggaaacagcgagcttgcagcctcaccgacgagtctcaactaaaagggactcccggagctaggggtggggactcggcctcacacagtgagtgccggctattggacttttgtccagtgacagctgagacaacaaggaccacgggaggaggtgtaggagagaagcgccgcgaacagcgatcgcccagcaccaagtccgcttccaggctttcggtttctttgcctccatcttgggtgcgccttcccggcgtctaggggagcgaaggctgaggtggcagcggcaggagagtccggccgcgacaggacgaactcccccactggaaaggattctgaaagaaatgaagtcagccctcagaaatgaagttgactgcctgctggctttctgttgactggcccggagctgtactgcaagacccttgtgagcttccctagtctaagagtaggatgtctgctgaagtcatccatcaggttgaagaagcacttgatacagatgagaaggagatgctgctctttttgtgccgggatgttgctatagatgtggttccacctaatgtcagggaccttctggatattttacgggaaagaggtaagctgtctgtcggggacttggctgaactgctctacagagtgaggcgatttgacctgctcaaacgtatcttgaagatggacagaaaagctgtggagacccacctgctcaggaaccctcaccttgtttcggactatagagtgctgatggcagagattggtgaggatttggataaatctgatgtgtcctcattaattttcctcatgaaggattacatgggccgaggcaagataagcaaggagaagagtttcttggaccttgtggttgagttggagaaactaaatctggttgccccagatcaactggatttattagaaaaatgcctaaagaacatccacagaatagacctgaagacaaaaatccagaagtacaagcagtctgttcaaggagcagggacaagttacaggaatgttctccaagcagcaatccaaaagagtctcaaggatccttcaaataacttcaggatgataacaccctatgcccattgtcctgatctgaaaattcttggaaattgttccatgtgattaacatggaactgcctctacttaatcattctgaatgattaaatcgtttcattttctaaatgtgttataatgtgtttagccctttcttgttgctgtatgtttagatgctttccaatcttttgttactactaataatgctataaaataaatatccttgtacttctt

SEQ ID NO: 765 - DNA, 2056 bp, Homo sapiens
  source 1..2056: mol_type = genomic DNA
cgagtctcaactaaaagggactcccggagctaggggtggggactcggcctcacacagtgagtgccggctattggacttttgtccagtgacagctgagacaacaaggaccacgggaggaggtgtaggagagaagcgccgcgaacagcgatcgcccagcaccaagtccgcttccaggctttcggtttctttgcctccatcttgggtgcgccttcccggcgtctaggggagcgaaggctgaggtggcagcggcaggagagtccggccgcgacaggacgaactcccccactggaaaggattctgaaagaaatgaagtcagccctcagaaatgaagttgactgcctgctggctttctgttgactggcccggagctgtactgcaagacccttgtgagcttccctagtctaagagtaggatgtctgctgaagtcatccatcaggttgaagaagcacttgatacagatgagaaggagatgctgctctttttgtgccgggatgttgctatagatgtggttccacctaatgtcagggaccttctggatattttacgggaaagaggtaagctgtctgtcggggacttggctgaactgctctacagagtgaggcgatttgacctgctcaaacgtatcttgaagatggacagaaaagctgtggagacccacctgctcaggaaccctcaccttgtttcggactatagagtgctgatggcagagattggtgaggatttggataaatctgatgtgtcctcattaattttcctcatgaaggattacatgggccgaggcaagataagcaaggagaagagtttcttggaccttgtggttgagttggagaaactaaatctggttgccccagatcaactggatttattagaaaaatgcctaaagaacatccacagaatagacctgaagacaaaaatccagaagtacaagcagtctgttcaaggagcagggacaagttacaggaatgttctccaagcagcaatccaaaagagtctcaaggatccttcaaataacttcaggagcatacctgaagagagatacaagatgaagagcaagcccctaggaatctgcctgataatcgattgcattggcaatgagacagagcttcttcgagacaccttcacttccctgggctatgaagtccagaaattcttgcatctcagtatgcatggtatatcccagattcttggccaatttgcctgtatgcccgagcaccgagactacgacagctttgtgtgtgtcctggtgagccgaggaggctcccagagtgtgtatggtgtggatcagactcactcagggctccccctgcatcacatcaggaggatgttcatgggagattcatgcccttatctagcagggaagccaaagatgttttttattcagaactatgtggtgtcagagggccagctggaggacagcagcctcttggaggtggatgggccagcgatgaagaatgtggaattcaaggctcagaagcgagggctgtgcacagttcaccgagaagctgacttcttctggagcctgtgtactgcggacatgtccctgctggagcagtctcacagctcaccatccctgtacctgcagtgcctctcccagaaactgagacaagaaagaaaacgcccactcctggatcttcacattgaactcaatggctacatgtatgattggaacagcagagtttctgccaaggagaaatattatgtctggctgcagcacactctgagaaagaaacttatcctctcctacacataagaaaccaaaaggctgggcgtagtggctcacacctgtaatcccagcactttgggaggccaaggagggcagatcacttcaggtcaggagttcgagaccagcctggccaacatggtaaacgctgtccctagtaaaaatacaaaaattagctgggtgtgggtgtgggtacctgtattcccagttacttgggaggctgaggtgggaggatcttttgaacccaggagttcagggtcatagcatgctgtgattgtgcctacgaatagccactgcataccaacctgggcaatatagcaagatcccatctcttta

SEQ ID NO: 766 - DNA, 1281 bp, Homo sapiens
  source 1..1281: mol_type = genomic DNA
gggaggagagaaaagccatggccgacaaggtcctgaaggagaagagaaagctgtttatccgttccatgggtgaaggtacaataaatggcttactggatgaattattacagacaagggtgctgaacaaggaagagatggagaaagtaaaacgtgaaaatgctacagttatggataagacccgagctttgattgactccgttattccgaaaggggcacaggcatgccaaatttgcatcacatacatttgtgaagaagacagttacctggcagggacgctgggactctcagcagctcctcaggcagtgcaggacaacccagctatgcccacatcctcaggctcagaagggaatgtcaagctttgctccctagaagaagctcaaaggatatggaaacaaaagtcggcagagatttatccaataatggacaagtcaagccgcacacgtcttgctctcattatctgcaatgaagaatttgacagtattcctagaagaactggagctgaggttgacatcacaggcatgacaatgctgctacaaaatctggggtacagcgtagatgtgaaaaaaaatctcactgcttcggacatgactacagagctggaggcatttgcacaccgcccagagcacaagacctctgacagcacgttcctggtgttcatgtctcatggtattcgggaaggcatttgtgggaagaaacactctgagcaagtcccagatatactacaactcaatgcaatctttaacatgttgaataccaagaactgcccaagtttgaaggacaaaccgaaggtgatcatcatccaggcctgccgtggtgacagccctggtgtggtgtggtttaaagattcagtaggagtttctggaaacctatctttaccaactacagaagagtttgaggatgatgctattaagaaagcccacatagagaaggattttatcgctttctgctcttccacaccagataatgtttcttggagacatcccacaatgggctctgtttttattggaagactcattgaacatatgcaagaatatgcctgttcctgtgatgtggaggaaattttccgcaaggttcgattttcatttgagcagccagatggtagagcgcagatgcccaccactgaaagagtgactttgacaagatgtttctacctcttcccaggacattaaaataaggaaactgtatgaatgtctgtgggcaggaagtgaagagatccttctgtaaaggtttttggaattatgtctgctgaataataaacttttttgaaataataaatctggt

SEQ ID NO: 767 - DNA, 921 bp, Homo sapiens
  source 1..921: mol_type = genomic DNA
gggaggagagaaaagccatggccgacaaggtcctgaaggagaagagaaagctgtttatccgttccatgggtgaagctcctcaggcagtgcaggacaacccagctatgcccacatcctcaggctcagaagggaatgtcaagctttgctccctagaagaagctcaaaggatatggaaacaaaagtcggcagagatttatccaataatggacaagtcaagccgcacacgtcttgctctcattatctgcaatgaagaatttgacagtattcctagaagaactggagctgaggttgacatcacaggcatgacaatgctgctacaaaatctggggtacagcgtagatgtgaaaaaaaatctcactgcttcggacatgactacagagctggaggcatttgcacaccgcccagagcacaagacctctgacagcacgttcctggtgttcatgtctcatggtattcgggaaggcatttgtgggaagaaacactctgagcaagtcccagatatactacaactcaatgcaatctttaacatgttgaataccaagaactgcccaagtttgaaggacaaaccgaaggtgatcatcatccaggcctgccgtggtgataatgtttcttggagacatcccacaatgggctctgtttttattggaagactcattgaacatatgcaagaatatgcctgttcctgtgatgtggaggaaattttccgcaaggttcgattttcatttgagcagccagatggtagagcgcagatgcccaccactgaaagagtgactttgacaagatgtttctacctcttcccaggacattaaaataaggaaactgtatgaatgtctgtgggcaggaagtgaagagatccttctgtaaaggtttttggaattatgtctgctgaataataaacttttttgaaataataaatctggt

SEQ ID NO: 768 - DNA, 396 bp, Homo sapiens
  source 1..396: mol_type = genomic DNA
gggaggagagaaaagccatggccgacaaggtcctgaaggagaagagaaagctgtttatccgttccatgggtgaagataatgtttcttggagacatcccacaatgggctctgtttttattggaagactcattgaacatatgcaagaatatgcctgttcctgtgatgtggaggaaattttccgcaaggttcgattttcatttgagcagccagatggtagagcgcagatgcccaccactgaaagagtgactttgacaagatgtttctacctcttcccaggacattaaaataaggaaactgtatgaatgtctgtgggcaggaagtgaagagatccttctgtaaaggtttttggaattatgtctgctgaataataaacttttttgaaataataaatctggt

SEQ ID NO: 769 - DNA, 1264 bp, Homo sapiens
  source 1..1264: mol_type = genomic DNA
atggccgacaaggtcctgaaggagaagagaaagctgtttatccgttccatgggtgaaggtacaataaatggcttactggatgaattattacagacaagggtgctgaacaaggaagagatggagaaagtaaaacgtgaaaatgctacagttatggataagacccgagctttgattgactccgttattccgaaaggggcacaggcatgccaaatttgcatcacatacatttgtgaagaagacagttacctggcagggacgctgggactctcagcagctcctcaggcagtgcaggacaacccagctatgcccacatcctcaggctcagaagggaatgtcaagctttgctccctagaagaagctcaaaggatatggaaacaaaagtcggcagagatttatccaataatggacaagtcaagccgcacacgtcttgctctcattatctgcaatgaagaatttgacagtattcctagaagaactggagctgaggttgacatcacaggcatgacaatgctgctacaaaatctggggtacagcgtagatgtgaaaaaaaatctcactgcttcggacatgactacagagctggaggcatttgcacaccgcccagagcacaagacctctgacagcacgttcctggtgttcatgtctcatggtattcgggaaggcatttgtgggaagaaacactctgagcaagtcccagatatactacaactcaatgcaatctttaacatgttgaataccaagaactgcccaagtttgaaggacaaaccgaaggtgatcatcatccaggcctgccgtggtgacagccctggtgtggtgtggtttaaagattcagtaggagtttctggaaacctatctttaccaactacagaagagtttgaggatgatgctattaagaaagcccacatagagaaggattttatcgctttctgctcttccacaccagataatgtttcttggagacatcccacaatgggctctgtttttattggaagactcattgaacatatgcaagaatatgcctgttcctgtgatgtggaggaaattttccgcaaggttcgattttcatttgagcagccagatggtagagcgcagatgcccaccactgaaagagtgactttgacaagatgtttctacctcttcccaggacattaaaataaggaaactgtatgaatgtctgtgggcaggaagtgaagagatccttctgtaaaggtttttggaattatgtctgctgaataataaacttttttgaaataataaatctggt

SEQ ID NO: 770 - DNA, 396 bp, Homo sapiens; identical to SEQ ID NO: 768
  source 1..396: mol_type = genomic DNA

SEQ ID NO: 771 - DNA, 1477 bp, Homo sapiens
  source 1..1477: mol_type = genomic DNA
ctttaatgggaagaaaaataaagacatgcatatgcatgcacagtgagtatttcccaatacatgtacaggccctgccaaaaaggaaggcgaagcatactttcagtttcagtcacacaagaagggaggagagaaaagccatggccgacaaggtcctgaaggagaagagaaagctgtttatccgttccatgggtgaaggtacaataaatggcttactggatgaattattacagacaagggtgctgaacaaggaagagatggagaaagtaaaacgtgaaaatgctacagttatggataagacccgagctttgattgactccgttattccgaaaggggcacaggcatgccaaatttgcatcacatacatttgtgaagaagacagttacctggcagggacgctgggactctcagcagatcaaacatctggaaattaccttaatatgcaagactctcaaggagtactttcttcctttccagctcctcaggcagtgcaggacaacccagctatgcccacatcctcaggctcagaagggaatgtcaagctttgctccctagaagaagctcaaaggatatggaaacaaaagtcggcagagatttatccaataatggacaagtcaagccgcacacgtcttgctctcattatctgcaatgaagaatttgacagtattcctagaagaactggagctgaggttgacatcacaggcatgacaatgctgctacaaaatctggggtacagcgtagatgtgaaaaaaaatctcactgcttcggacatgactacagagctggaggcatttgcacaccgcccagagcacaagacctctgacagcacgttcctggtgttcatgtctcatggtattcgggaaggcatttgtgggaagaaacactctgagcaagtcccagatatactacaactcaatgcaatctttaacatgttgaataccaagaactgcccaagtttgaaggacaaaccgaaggtgatcatcatccaggcctgccgtggtgacagccctggtgtggtgtggtttaaagattcagtaggagtttctggaaacctatctttaccaactacagaagagtttgaggatgatgctattaagaaagcccacatagagaaggattttatcgctttctgctcttccacaccagataatgtttcttggagacatcccacaatgggctctgtttttattggaagactcattgaacatatgcaagaatatgcctgttcctgtgatgtggaggaaattttccgcaaggttcgattttcatttgagcagccagatggtagagcgcagatgcccaccactgaaagagtgactttgacaagatgtttctacctcttcccaggacattaaaataaggaaactgtatgaatgtctgtgggcaggaagtgaagagatccttctgtaaaggtttttggaattatgtctgctgaataataaacttttttgaaataataaatctggtagaaaaatgaaaa

SEQ ID NO: 772 - DNA, 921 bp, Homo sapiens; identical to SEQ ID NO: 767
  source 1..921: mol_type = genomic DNA

SEQ ID NO: 773 - DNA, 1237 bp, Homo sapiens
  source 1..1237: mol_type = genomic DNA
agtttcagtcacacaagaagggaggagagaaaagccatggccgacaaggtcctgaaggagaagagaaagctgtttatccgttccatgggtgaaggtacaataaatggcttactggatgaattattacagacaagggtgctgaacaaggaagagatggagaaagtaaaacgtgaaaatgctacagttatggataagacccgagctttgattgactccgttattccgaaaggggcacaggcatgccaaatttgcatcacatacatttgtgaagaagacagttacctggcagggacgctgggactctcagcagctcctcaggcagtgcaggacaacccagctatgcccacatcctcaggctcagaagggaatgtcaagctttgctccctagaagaagctcaaaggatatggaaacaaaagtcggcagagatttatccaataatggacaagtcaagccgcacacgtcttgctctcattatctgcaatgaagaatttgacagtattcctagaagaactggagctgaggttgacatcacaggcatgacaatgctgctacaaaatctggggtacagcgtagatgtgaaaaaaaatctcactgcttcggacatgactacagagctggaggcatttgcacaccgcccagagcacaagacctctgacagcacgttcctggtgttcatgtctcatggtattcgggaaggcatttgtgggaagaaacactctgagcaagtcccagatatactacaactcaatgcaatctttaacatgttgaataccaagaactgcccaagtttgaaggacaaaccgaaggtgatcatcatccaggcctgccgtggtgacagccctggtgtggtgtggtttaaagattcagtaggagtttctggaaacctatctttaccaactacagaagagtttgaggatgatgctattaagaaagcccacatagagaaggattttatcgctttctgctcttccacaccagataatgtttcttggagacatcccacaatgggctctgtttttattggaagactcattgaacatatgcaagaatatgcctgttcctgtgatgtggaggaaattttccgcaaggttcgattttcatttgagcagccagatggtagagcgcagatgcccaccactgaaagagtgactttgacaagatgtttctacctcttcccaggacattaaaataaggaaactgtatgaatgtctgtgggcaggtacatgtgtatggtcg

SEQ ID NO: 774 - DNA, 1061 bp, Homo sapiens
  source 1..1061: mol_type = genomic DNA
atggccgacaaggtcctgaaggagaagagaaagctgtttatccgttccatgggtgaagctcctcaggcagtgcaggacaacccagctatgcccacatcctcaggctcagaagggaatgtcaagctttgctccctagaagaagctcaaaggatatggaaacaaaagtcggcagagatttatccaataatggacaagtcaagccgcacacgtcttgctctcattatctgcaatgaagaatttgacagtattcctagaagaactggagctgaggttgacatcacaggcatgacaatgctgctacaaaatctggggtacagcgtagatgtgaaaaaaaatctcactgcttcggacatgactacagagctggaggcatttgcacaccgcccagagcacaagacctctgacagcacgttcctggtgttcatgtctcatggtattcgggaaggcatttgtgggaagaaacactctgagcaagtcccagatatactacaactcaatgcaatctttaacatgttgaataccaagaactgcccaagtttgaaggacaaaccgaaggtgatcatcatccaggcctgccgtggtgacagccctggtgtggtgtggtttaaagattcagtaggagtttctggaaacctatctttaccaactacagaagagtttgaggatgatgctattaagaaagcccacatagagaaggattttatcgctttctgctcttccacaccagataatgtttcttggagacatcccacaatgggctctgtttttattggaagactcattgaacatatgcaagaatatgcctgttcctgtgatgtggaggaaattttccgcaaggttcgattttcatttgagcagccagatggtagagcgcagatgcccaccactgaaagagtgactttgacaagatgtttctacctcttcccaggacattaaaataaggaaactgtatgaatgtctgtgggcaggaagtgaagagatccttctgtaaaggtttttggaattatgtctgctgaataataaacttttttgaaataataaatctggtagaaaaatgaaaa

SEQ ID NO: 775 - DNA, 1402 bp, Homo sapiens
  source 1..1402: mol_type = genomic DNA
tttcagtcacacaagaagggaggagagaaaagccatggccgacaagggtgctgaacaaggaagagatggagaaagtaaaacgtgaaaatgctacagttatggataagacccgagctttgattgactccgttattccgaaaggggcacaggcatgccaaatttgcatcacatacatttgtgaagaagacagttacctggcagggacgctgggactctcagcagatcaaacatctggaaattaccttaatatgcaagactctcaaggagtactttcttcctttccagctcctcaggcagtgcaggacaacccagctatgcccacatcctcaggctcagaagggaatgtcaagctttgctccctagaagaagctcaaaggatatggaaacaaaagtcggcagagatttatccaataatggacaagtcaagccgcacacgtcttgctctcattatctgcaatgaagaatttgacagtattcctagaagaactggagctgaggttgacatcacaggcatgacaatgctgctacaaaatctggggtacagcgtagatgtgaaaaaaaatctcactgcttcggacatgactacagagctggaggcatttgcacaccgcccagagcacaagacctctgacagcacgttcctggtgttcatgtctcatggtattcgggaaggcatttgtgggaagaaacactctgagcaagtcccagatatactacaactcaatgcaatctttaacatgttgaataccaagaactgcccaagtttgaaggacaaaccgaaggtgatcatcatccaggcctgccgtggtgacagccctggtgtggtgtggtttaaagattcagtaggagtttctggaaacctatctttaccaactacagaagagtttgaggatgatgctattaagaaagcccacatagagaaggattttatcgctttctgctcttccacaccaggcaagagccagtcttgagatttgaaatgtgctttatccatagataatgtttcttggagacatcccacaatgggctctgtttttattggaagactcattgaacatatgcaagaatatgcctgttcctgtgatgtggaggaaattttccgcaaggtaagatgctagtggatgctattttcactctacttccctgaatgcttggctattgcaattggaagcatagaaagcagatccagacaagtttatcttccaataatgctcttctttccaaaagagttttggagttctttggagagtggacaaacccaggagcctaatccaatctattaagacccacagccttgagaaaacaatcatttagtttcaccccgctcctgccctgcagagacaaatgaatggactctaatttacctgtgtctctcatggctattagatccagcagcagattt

SEQ ID NO: 776 - DNA, 1392 bp, Homo sapiens
  source 1..1392: mol_type = genomic DNA
tttcagtcacacaagaagggaggagagaaaagccatggccgacaaggtcctgaaggagaagagaaagctgtttatccgttccatgggtgaaggtacaataaatggcttactggatgaattattacagacaagggtgctgaacaaggaagagatggagaaagtaaaacgtgaaaatgctacagttatggataagacccgagctttgattgactccgttattccgaaaggggcacaggcatgccaaatttgcatcacatacatttgtgaagaagacagttacctggcagggacgctgggactctcagcagatttatccaataatggacaagtcaagccgcacacgtcttgctctcattatctgcaatgaagaatttgacagtattcctagaagaactggagctgaggttgacatcacaggcatgacaatgctgctacaaaatctggggtacagcgtagatgtgaaaaaaaatctcactgcttcggacatgactacagagctggaggcatttgcacaccgcccagagcacaagacctctgacagcacgttcctggtgttcatgtctcatggtattcgggaaggcatttgtgggaagaaacactctgagcaagtcccagatatactacaactcaatgcaatctttaacatgttgaataccaagaactgcccaagtttgaaggacaaaccgaaggtgatcatcatccaggcctgccgtggtgacagccctggtgtggtgtggtttaaagattcagtaggagtttctggaaacctatctttaccaactacagaagagtttgaggatgatgctattaagaaagcccacatagagaaggattttatcgctttctgctcttccacaccagataatgtttcttggagacatcccacaatgggctctgtttttattggaagactcattgaacatatgcaagaatatgcctgttcctgtgatgtggaggaaattttccgcaaggtaagatgctagtggatgctattttcactctacttccctgaatgcttggctattgcaattggaagcatagaaagcagatccagacaagtttatcttccaataatgctcttctttccaaaagagttttggagttctttggagagtggacaaacccaggagcctaatccaatctattaagacccacagccttgagaaaacaatcatttagtttcaccccgctcctgccctgcagagacaaatgaatggactctaatttacctgtgtctctcatggctattagatccagcagcagatttaaaatgccctgaggagggtcattcaatgcttacatacatatatggttatacttgttgcagatggaagtactttttgtttttgtcacttattttgctatatttgttgtagttttttggcataactc

SEQ ID NO: 777 - DNA, 300 bp, Homo sapiens
  source 1..300: mol_type = genomic DNA
atggccgacaaggtcctgaaggagaagagaaagctgtttatccgttccatgggtgaagataatgtttcttggagacatcccacaatgggctctgtttttattggaagactcattgaacatatgcaagaatatgcctgttcctgtgatgtggaggaaattttccgcaaggttcgattttcatttgagcagccagatggtagagcgcagatgcccaccactgaaagagtgactttgacaagatgtttctacctcttcccaggacattaaaataaggaaactgtatgaatgtctgtgggcagg

SEQ ID NO: 778 - DNA, 2001 bp, Homo sapiens
  source 1..2001: mol_type = genomic DNA
agtttcagtcacacaagaagggaggagagaaaagccatggccgacaaggtcctgaaggagaagagaaagctgtttatccgttccatgggtgaaggtacaataaatggcttactggatgaattattacagacaagggtgctgaacaaggaagagatggagaaagtaaaacgtgaaaatgctacagttatggataagacccgagctttgattgactccgttattccgaaaggggcacaggcatgccaaatttgcatcacatacatttgtgaagaagacagttacctggcagggacgctgggactctcagcagatcaaacatctggaaattaccttaatatgcaagactctcaaggagtactttcttcctttccagctcctcaggcagtgcaggacaacccagctatgcccacatcctcaggctcagaagggaatgtcaagctttgctccctagaagaagctcaaaggatatggaaacaaaagtcggcagagatttatccaataatggacaagtcaagccgcacacgtcttgctctcattatctgcaatgaagaatttgacagtattcctagaagaactggagctgaggttgacatcacaggcatgacaatgctgctacaaaatctggggtacagcgtagatgtgaaaaaaaatctcactgcttcggacatgactacagagctggaggcatttgcacaccgcccagagcacaagacctctgacagcacgttcctggtgttcatgtctcatggtattcgggaaggcatttgtgggaagaaacactctgagcaagtcccagatatactacaactcaatgcaatctttaacatgttgaataccaagaactgcccaagtttgaaggacaaaccgaaggtgatcatcatccaggcctgccgtggtgacagccctggtgtggtgtggtttaaagattcagtaggagtttctggaaacctatctttaccaactacagaagagtttgaggatgatgctattaagaaagcccacatagagaaggattttatcgctttctgctcttccacaccagataatgtttcttggagacatcccacaatgggctctgtttttattggaagactcattgaacatatgcaagaatatgcctgttcctgtgatgtggaggaaattttccgcaaggttcgattttcatttgagcagccagatggtagagcgcagatgcccaccactgaaagagtgactttgacaagatgtttctacctcttcccaggacattaaaataaggaaactgtatgaatgtctgtgggcaggtacatgtgtatggtcgggagtgtgggaaggttgaggaaagggtactgaaagtccatttgagtcaagaactctaggtttacaggctgagaatccttaatccaaaaatttgaattttgaaatgctctaaaatccaacactgtgtgagcgcccacatgatattcaaaggaaatgtttattgaaacatttcaaattataggtttttggattagggatgctaaaccagtaagtatacagctgaattccaatatacaaaaatatctgaaatttgaaatacttctggtagcatgcattttggataagggataatcaagccatatacagaaaatactgaagtaatgcctttcttctggtcagtgcagagcacgttgctcttctcccaaagtttttcatttagaccccttttgagattcatctgatattggcctagaagtggccgtaagactacaaaccctcacttttggatgtttctctccttcacctcagcagggtatatttaaacatagcatgtggtctttccttttaaaattgtgtatgttcccattggtggtataactttataacttgcatgtctttaaccaaattctttcctatgtttttttttttaattatttctttttctcataggaagtgaagagatccttctgtaaaggtttttggaattatgtctgctgaataataaacttttttgaaataataaatctggtagaaaaatgaaaa

SEQ ID NO: 779 - DNA, 825 bp, Homo sapiens
  source 1..825: mol_type = genomic DNA
atggccgacaaggtcctgaaggagaagagaaagctgtttatccgttccatgggtgaagctcctcaggcagtgcaggacaacccagctatgcccacatcctcaggctcagaagggaatgtcaagctttgctccctagaagaagctcaaaggatatggaaacaaaagtcggcagagatttatccaataatggacaagtcaagccgcacacgtcttgctctcattatctgcaatgaagaatttgacagtattcctagaagaactggagctgaggttgacatcacaggcatgacaatgctgctacaaaatctggggtacagcgtagatgtgaaaaaaaatctcactgcttcggacatgactacagagctggaggcatttgcacaccgcccagagcacaagacctctgacagcacgttcctggtgttcatgtctcatggtattcgggaaggcatttgtgggaagaaacactctgagcaagtcccagatatactacaactcaatgcaatctttaacatgttgaataccaagaactgcccaagtttgaaggacaaaccgaaggtgatcatcatccaggcctgccgtggtgataatgtttcttggagacatcccacaatgggctctgtttttattggaagactcattgaacatatgcaagaatatgcctgttcctgtgatgtggaggaaattttccgcaaggttcgattttcatttgagcagccagatggtagagcgcagatgcccaccactgaaagagtgactttgacaagatgtttctacctcttcccaggacattaaaataaggaaactgtatgaatgtctgtgggcagg

SEQ ID NO: 780 - DNA, 1521 bp, Homo sapiens
  source 1..1521: mol_type = genomic DNA
ggagcttctttggaccttggagcacacagaggattctactttctttaaaactttgttttcaggcaatttccctgagaaccgtttacttccagaagattggtggagcttgatctgaaggctggccatgaaatctcaaggtcaacattggtattccagttcagataaaaactgtaaagtgagctttcgtgagaagcttctgattattgattcaaacctgggggtccaagatgtggagaacctcaagtttctctgcataggattggtccccaacaagaagctggagaagtccagctcagcctcagatgtttttgaacatctcttggcagaggatctgctgagtgaggaagaccctttcttcctggcagaactcctctatatcatacggcagaagaagctgctgcagcacctcaactgtaccaaagaggaagtggagcgactgctgcccacccgacaaagggtttctctgtttagaaacctgctctacgaactgtcagaaggcattgactcagagaacttaaaggacatgatcttccttctgaaagactcgcttcccaaaactgaaatgacctccctaagtttcctggcatttctagagaaacaaggtaaaatagatgaagataatctgacatgcctggaggacctctgcaaaacagttgtacctaaacttttgagaaacatagagaaatacaaaagagagaaagctatccagatagtgacacctcctgtagacaaggaagccgagtcgtatcaaggagaggaagaactagtttcccaaacagatgttaagacattcttggaagccttaccgcaggagtcctggcaaaataagcatgcaggtagtaatgagatcctgagtcatgtgttccagtggcttgggttcacagtgcatatacacaataatgtgacgaaagtggaaatggagatggtcctgcagaagcagaagtgcaatccagcccatgccgacggggactgcttcgtgttctgtattctgacccatgggagatttggagctgtctactcttcggatgaggccctcattcccattcgggagatcatgtctcacttcacagccctgcagtgccctagactggctgaaaaacctaaactctttttcatccaggcctgccaaggtgaagagatacagccttccgtatccatcgaagcagatgctctgaaccctgagcaggcacccacttccctgcaggacagtattcctgccgaggctgacttcctacttggtctggccactgtcccaggctatgtatcctttcggcatgtggaggaaggcagctggtatattcagtctctgtgtaatcatctgaagaaattggtcccaagacatgaagacatcttatccatcctcactgctgtcaacgatgatgtgagtcgaagagtggacaaacagggaacaaagaaacagatgccccagcctgctttcacactaaggaaaaaactagtattccctgtgcccctggatgcactttcattatagcagagagtttttgttggttcttagacctc

SEQ ID NO: 781 - DNA, 1603 bp, Homo sapiens
  source 1..1603: mol_type = genomic DNA
gcttctttggaccttggagcacacagaggattctactttctttaaaactttgttttcaggcaatttccctgagaaccgtttacttccagaagattggtggagcttgatctgaaggctggccatgaaatctcaaggtcaacattggtattccagttcagataaaaactgtaaagtgagctttcgtgagaagcttctgattattgattcaaacctgggggtccaagatgtggagaacctcaagtttctctgcataggattggtccccaacaagaagctggagaagtccagctcagcctcagatgtttttgaacatctcttggcagaggatctgctgagtgaggaagaccctttcttcctggcagaactcctctatatcatacggcagaagaagctgctgcagcacctcaactgtaccaaagaggaagtggagcgactgctgcccacccgacaaagggtttctctgtttagaaacctgctctacgaactgtcagaaggcattgactcagagaacttaaaggacatgatcttccttctgaaagactcgcttcccaaaactgaaatgacctccctaagtttcctggcatttctagagaaacaaggtaaaatagatgaagataatctgacatgcctggaggacctctgcaaaacagttgtacctaaacttttgagaaacatagagaaatacaaaagagagaaagctatccagatagtgacacctcctgtagacaaggaagccgagtcgtatcaaggagaggaagaactagtttcccaaacagatgttaagacattcttggaagccttaccgagggcagctgtgtacaggatgaatcggaaccacagaggcctctgtgtcattgtcaacaaccacagctttacctccctgaaggacagacaaggaacccataaagatgctgagatcctgagtcatgtgttccagtggcttgggttcacagtgcatatacacaataatgtgacgaaagtggaaatggagatggtcctgcagaagcagaagtgcaatccagcccatgccgacggggactgcttcgtgttctgtattctgacccatgggagatttggagctgtctactcttcggatgaggccctcattcccattcgggagatcatgtctcacttcacagccctgcagtgccctagactggctgaaaaacctaaactctttttcatccaggcctgccaaggtgaagagatacagccttccgtatccatcgaagcagatgctctgaaccctgagcaggcacccacttccctgcaggacagtattcctgccgaggctgacttcctacttggtctggccactgtcccaggctatgtatcctttcggcatgtggaggaaggcagctggtatattcagtctctgtgtaatcatctgaagaaattggtcccaaggatgctgaaatttctggaaaagacaatggaaatcaggggcaggaagagaacagtgtggggtgctaaacagatctcagcaacctccctgcccacggccatctctgcgcagacacctcgaccccccatgcgcaggtggagcagcgtttcctagttctttccagaggcttccttctgcctgccttccagccacatcgcc

SEQ ID NO: 782 - DNA, 2073 bp, Homo sapiens
  source 1..2073: mol_type = genomic DNA
tgaagattcagttttcacttaaacaaccagcaagtcttgaagtctcttcccaagcaaatgggagcttctttggaccttggagcacacagaggattctactttctttaaaactttgttttcaggcaatttccctgagaaccgtttacttccagaagattggtggagcttgatctgaaggctggccatgaaatctcaaggtcaacattggtattccagttcagataaaaactgtaaagtgagctttcgtgagaagcttctgattattgattcaaacctgggggtccaagatgtggagaacctcaagtttctctgcataggattggtccccaacaagaagctggagaagtccagctcagcctcagatgtttttgaacatctcttggcagaggatctgctgagtgaggaagaccctttcttcctggcagaactcctctatatcatacggcagaagaagctgctgcagcacctcaactgtaccaaagaggaagtggagcgactgctgcccacccgacaaagggtttctctgtttagaaacctgctctacgaactgtcagaaggcattgactcagagaacttaaaggacatgatcttccttctgaaagactcgcttcccaaaactgaaatgacctccctaagtttcctggcatttctagagaaacaaggtaaaatagatgaagataatctgacatgcctggaggacctctgcaaaacagttgtacctaaacttttgagaaacatagagaaatacaaaagagagaaagctatccagatagtgacacctcctgtagacaaggaagccgagtcgtatcaaggagaggaagaactagtttcccaaacagatgttaagacattcttggaagccttaccgcaggagtcctggcaaaataagcatgcaggtagtaatggtaacagagccacaaatggtgcaccaagcctggtctccagggggatgcaaggagcatctgctaacactctaaactctgaaaccagcacaaagagggcagctgtgtacaggatgaatcggaaccacagaggcctctgtgtcattgtcaacaaccacagctttacctccctgaaggacagacaaggaacccataaagatgctgagatcctgagtcatgtgttccagtggcttgggttcacagtgcatatacacaataatgtgacgaaagtggaaatggagatggtcctgcagaagcagaagtgcaatccagcccatgccgacggggactgcttcgtgttctgtattctgacccatgggagatttggagctgtctactcttcggatgaggccctcattcccattcgggagatcatgtctcacttcacagccctgcagtgccctagactggctgaaaaacctaaactctttttcatccaggcctgccaaggtgaagagatacagccttccgtatccatcgaagcagatgctctgaaccctgagcaggcacccacttccctgcaggacagtattcctgccgaggctgacttcctacttggtctggccactgtcccaggctatgtatcctttcggcatgtggaggaaggcagctggtatattcagtctctgtgtaatcatctgaagaaattggtcccaaggatgctgaaatttctggaaaagacaatggaaatcaggggcaggaagagaacagtgtggggtgctaaacagatctcagcaacctccctgcccacggccatctctgcgcagacacctcgaccccccatgcgcaggtggagcagcgtttcctagttctttccagaggcttccttctgcctgccttccagccacatcgcctgagattgacaacgccctacagcaagacggaaacctccctttacagcaccaccttgcgattctgcagccacaaagttgagacttctgaacgtggcactcttctgttcccttactgtttcacgtgtacctgtgtcatctttcttgtttcatcgtaaacatacttctaaaattcccattttctttatttagaaatagaactacaagcggatggttaaacaatttaaacaaatggtccatggggaaaagtgaatttcacactgtcccccaaactttcagtg

SEQ ID NO: 783 - DNA, 5928 bp, Homo sapiens
  source 1..5928: mol_type = genomic DNA
tccctttttgacttaccaaggaaatggagatccaaaggaaagcctgaagcactttgtggcttccacgggttcgtttctaggaagcttttgctttacctggggaaaccccaagctctacagtgagaaagttgtaaattagcctttaggagacgctgtttgtcaaagttatcttaaccctggaaaaggggagggaaaaaggcagataagcagtgatgacatcagcaggaaactagtatcaggctacccagtcctgaagattcagttttcacttaaacaaccagcaagtcttgaagtctcttcccaagcaaatgggagcttctttggaccttggagcacacagaggattctactttctttaaaactttgttttcaggcaatttccctgagaaccgtttacttccagaagattggtggagcttgatctgaaggctggccatgaaatctcaaggtcaacattggtattccagttcagataaaaactgtaaagtgagctttcgtgagaagcttctgattattgattcaaacctgggggtccaagatgtggagaacctcaagtttctctgcataggattggtccccaacaagaagctggagaagtccagctcagcctcagatgtttttgaacatctcttggcagaggatctgctgagtgaggaagaccctttcttcctggcagaactcctctatatcatacggcagaagaagctgctgcagcacctcaactgtaccaaagaggaagtggagcgactgctgcccacccgacaaagggtttctctgtttagaaacctgctctacgaactgtcagaaggcattgactcagagaacttaaaggacatgatcttccttctgaaagactcgcttcccaaaactgaaatgacctccctaagtttcctggcatttctagagaaacaaggtaaaatagatgaagataatctgacatgcctggaggacctctgcaaaacagttgtacctaaacttttgagaaacatagagaaatacaaaagagagaaagctatccagatagtgacacctcctgtagacaaggaagccgagtcgtatcaaggagaggaagaactagtttcccaaacagatgttaagacattcttggaagccttaccgcaggagtcctggcaaaataagcatgcaggtagtaatggtaacagagccacaaatggtgcaccaagcctggtctccagggggatgcaaggagcatctgctaacactctaaactctgaaaccagcacaaagagggcagctgtgtacaggatgaatcggaaccacagaggcctctgtgtcattgtcaacaaccacagctttacctccctgaaggacagacaaggaacccataaagatgctgagatcctgagtcatgtgttccagtggcttgggttcacagtgcatatacacaataatgtgacgaaagtggaaatggagatggtcctgcagaagcagaagtgcaatccagcccatgccgacggggactgcttcgtgttctgtattctgacccatgggagatttggagctgtctactcttcggatgaggccctcattcccattcgggagatcatgtctcacttcacagccctgcagtgccctagactggctgaaaaacctaaactctttttcatccaggcctgccaaggtgaagagatacagccttccgtatccatcgaagcagatgctctgaaccctgagcaggcacccacttccctgcaggacagtattcctgccgaggctgacttcctacttggtctggccactgtcccaggctatgtatcctttcggcatgtggaggaaggcagctggtatattcagtctctgtgtaatcatctgaagaaattggtcccaagacatgaagacatcttatccatcctcactgctgtcaacgatgatgtgagtcgaagagtggacaaacagggaacaaagaaacagatgccccagcctgctttcacactaaggaaaaaactagtattccctgtgcccctggatgcactttcattatagcagagagtttttgttggttcttagacctcaaacgaatcattggctataacctccagcctcctgcccagcacaggaatcggtggtctccacctgtcattctagaaacaggaaacaccgtgttttctgacacagtcaattctgattttctttttcttttgcaagtctaaatgttagaaaactttcttttttttggagatagtctcattctgtcacccagactggagtgcaggggggcaatcacggctcactgtagtctcgacctcccaggctcaagctgtcctcccgcctcagcttcccaagtagctgggaccacaggtgtgtaccaccgtgcccggattttttttattctttattttttgtagagatggagggatctcactttgttgcacaggctggtttcaaactcctaggcccaagtgatcctcccacctctgtccccaaaatactgggattataggcacgagccaccacacctggccagaaaactttcattattgaagacttggattgtagccttggttttggatgtctattctgaagacagagtaattggctttggtttgtgcaggtactttttctttgagacagagtcactccgtcacctgggctggagtgcagtggtgggatcactgttcactgcagccttgacctcccaggttcaagcgatcctcccacctcagcctcccaagtagctgagactacaggtgtgtgtccatgcacagctaactttttattttttttgtggagatggggtttcactatgttgcctaagctggtctcaaactcctgggctcaagcgatcctcccacctcagcttctcaaagttctgggactacaggcatgaaatactgtgcctggcctggggaccaggtgcattttaaggttccttggtgttcaaaaaccacgttcttagcctagattgagcttagattgcctctctagacaactaccccttagttataattctgtgtcccctctgcatgcccttaaacattggacagtgaggtcacagtccacccaccctctctctgatctcccccttcctaagacttctcttttgcacatctagtgaggtgaaaatttggtctatgccaggcccatttcctgcttttgtgtaaggaaggtgctcacataggaagtttttatttggttagagacaggtttccctgtaggaagatgatggctcatttacactcagctgctctgcaagcagaaactttacaacctgatgtcatattccattttggactgggtgcggtgactcatgcctgtaatcccagtactctgggaagccaaggcaggcagatcacttgaggtcaggagttcgagaccagcctggccaatacggcaaaacctcatcattactaaaaacacaaaaattagccaggtgtggcggcgagcacctgtaatcccagctactcgggaggctgagacaggagaatctcttgaatccaggaggcagaggctgtggtgagccaagatgacacaactgcactccagcttgggcaacagggcgagaccttgtttaaaaaaaaaattcaatattggggttggaacatttcagttgccattgacagaacacccaattcaaattgactgaagcaaagaagggaatttattgcctctttcacattgaaacccaggagtggataacactggcttcaggcaaagcttgaatcaggactcaatctacaggccagcacctttctcttggccggatgtcctcagggctggcagatgcagtagactgcagtggacagtccccaccttgttactgctactacactttgctcctctggcccaaggcatgaggagagaggctgtgtcagaaactgaagctgttctcaggatcactgggctcttcttggcagaggggatgtctggcttgcctgaagggagtggctctgtaaggacgccttgatgctttcttcattaagattttgagcatttttacgtacttgagcttttttttttttttttttcaatttctagaggaactttttctctgttaattcctggaactgtattttgaatccttaaaggtgagccctcatagggagatccaaagtcctgtggttaacgccttcatttatagatgaggcagctgaggcctggggatgtgaacaacctgctcacagtcctcatttactggatttgacttcagccaggtgaactggaatgccttggggcgtggaagggcattaggagtgtttcatttgatatgtgaatgctcataaaaaaatgtcaaggaatgaagaacaacaactctcagtggtgcctgcatttataattatttatgtgaaagtcaaattcatgtacagtaaatttgttataagaatattcacaagaacactgttctgatatctctgattgtcatgtggatttgaatgtagcttgacagagggaatgtctaatctatattgacagggcaggaacaccgtcatcttagacaaacaccgccactttaagttccagttccctttctagcctcatgcatttcaaggaaatcacttcttttctaacagcgagcagccagaaagagaagagagtaaaatacagataagacagctctggcatagagggaggtgggggggtgggggaagtctcttgggtaactgccaaactttgccttcatacaatgggttccaggaaaacaatgagccttaataagcacattcctttcccttcaggtgcactaagtggggaagctaaaagcagactggaggggggtggggtgtacctacagctgcagaaatattgtatgggaacggacacacaactctccctcccagataagcacagcaaagagacatagaagcaatccaagcctctgataaactctcccaccctaaatccttaaaaactcttagtctgtaagtgagtgggctctgacctaactcggccagaagcccctttcaaatttgttttctctaaaataaacctgtccttggctgtcaagccacctttcatgtttctttcctctttctttaattcttacacatgtgtcaggatgatctcccaaaaccgtgttcataacagtcagggccaaaagctagtggtcacagtccttgtccagttggcagaactgacatgtgaaggcaagtgaaggatggtgagatactgaggaaagagcaaaggatctggagatcaaagccctgcatttccattttgtcctgattcctttgctcagagacactaactaaatcaagctagcttttttcagccttgtctgtaaagtagagaaaacattagctgttgggaagacgaaaaagaatgtgtcctatgtgtgcatctatttaaatctaactgtgctgaggtgcatataaatgcctttaggtggtagggtcttccggttgtaactgcaacagaaatagcaggacttaagttcctttgtgcgtaattccagctgactttattagcggcaactcagcactagcattacccctgacatactctgagtaagatctaattcttccctcactggttcgtgatgtctaccgcagcagaaggccagctcttgactctgagttcagttggacaaaatgctgttgataaaacctcctgtcaggcctctgagcccaagctaagccatcatatcccttgtgacctgcacatatatatccagatggcctgaagtaactgaagaatcacaaaagaagtgaaaatggcctgttcctgccttaactgatgacattaccttgtgaaattccttctcctggctcatcctggctcaaaagctcccccagtgagcaccttgtgacccccatccctgccagccagagaacaaccccctttgactgtaattttccactacttacccaaatcctataaaacggccccacccctatctcccttcactgactttcttttcggactcagcccacctgcacccaggtgattaaaaagctttattgctcacacaaa

SEQ ID NO: 784 - DNA, 3926 bp, Homo sapiens
  source 1..3926: mol_type = genomic DNA
tgaagtctcttcccaagcaaatgggagcttctttggaccttggagcacacagaggattctactttctttaaaactttgttttcaggcaatttccctgagaaccgtttacttccagaagattggtggagcttgatctgaaggctggccatgaaatctcaaggtcaacattggtattccagttcagataaaaactgtaaagtgagctttcgtgagaagcttctgattattgattcaaacctgggggtccaagatgtggagaacctcaagtttctctgcataggattggtccccaacaagaagctggagaagtccagctcagcctcagatgtttttgaacatctcttggcagaggatctgctgagtgaggaagaccctttcttcctggcagaactcctctatatcatacggcagaagaagctgctgcagcacctcaactgtaccaaagaggaagtggagcgactgctgcccacccgacaaagggtttctctgtttagaaacctgctctacgaactgtcagaaggcattgactcagagaacttaaaggacatgatcttccttctgaaagactcgcttcccaaaactgaaatgacctccctaagtttcctggcatttctagagaaacaaggtaaaatagatgaagataatctgacatgcctggaggacctctgcaaaacagttgtacctaaacttttgagaaacatagagaaatacaaaagagagaaagctatccagatagtgacacctcctgtagacaaggaagccgagtcgtatcaaggagaggaagaactagtttcccaaacagatgttaagacattcttggaagccttaccgagggcagctgtgtacaggatgaatcggaaccacagaggcctctgtgtcattgtcaacaaccacagctttacctccctgaaggacagacaaggaacccataaagatgctgagatcctgagtcatgtgttccagtggcttgggttcacagtgcatatacacaataatgtgacgaaagtggaaatggagatggtcctgcagaagcagaagtgcaatccagcccatgccgacggggactgcttcgtgttctgtattctgacccatgggagatttggagctgtctactcttcggatgaggccctcattcccattcgggagatcatgtctcacttcacagccctgcagtgccctagactggctgaaaaacctaaactctttttcatccaggcctgccaaggtgaagagatacagccttccgtatccatcgaagcagatgctctgaaccctgagcaggcacccacttccctgcaggacagtattcctgccgaggctgacttcctacttggtctggccactgtcccaggctatgtatcctttcggcatgtggaggaaggcagctggtatattcagtctctgtgtaatcatctgaagaaattggtcccaagacatgaagacatcttatccatcctcactgctgtcaacgatgatgtgagtcgaagagtggacaaacagggaacaaagaaacagatgccccagcctgctttcacactaaggaaaaaactagtattccctgtgcccctggatgcactttcattatagcagagagtttttgttggttcttagacctcaaacgaatcattggctataacctccagcctcctgcccagcacaggaatcggtggtctccacctgtcattctagaaacaggaaacaccgtgttttctgacacagtcaattctgattttctttttcttttgcaagtctaaatgttagaaaactttcttttttttggagatagtctcattctgtcacccagactggagtgcaggggggcaatcacggctcactgtagtctcgacctcccaggctcaagctgtcctcccgcctcagcttcccaagtagctgggaccacaggtgtgtaccaccgtgcccggattttttttattctttattttttgtagagatggagggatctcactttgttgcacaggctggtttcaaactcctaggcccaagtgatcctcccacctctgtccccaaaatactgggattataggcacgagccaccacacctggccagaaaactttcattattgaagacttggattgtagccttggttttggatgtctattctgaagacagagtaattggctttggtttgtgcaggtactttttctttgagacagagtcactccgtcacctgggctggagtgcagtggtgggatcactgttcactgcagccttgacctcccaggttcaagcgatcctcccacctcagcctcccaagtagctgagactacaggtgtgtgtccatgcacagctaactttttattttttttgtggagatggggtttcactatgttgcctaagctggtctcaaactcctgggctcaagcgatcctcccacctcagcttctcaaagttctgggactacaggcatgaaatactgtgcctggcctggggaccaggtgcattttaaggttccttggtgttcaaaaaccacgttcttagcctagattgagcttagattgcctctctagacaactaccccttagttataattctgtgtcccctctgcatgcccttaaacattggacagtgaggtcacagtccacccaccctctctctgatctcccccttcctaagacttctcttttgcacatctagtgaggtgaaaatttggtctatgccaggcccatttcctgcttttgtgtaaggaaggtgctcacataggaagtttttatttggttagagacaggtttccctgtaggaagatgatggctcatttacactcagctgctctgcaagcagaaactttacaacctgatgtcatattccattttggactgggtgcggtgactcatgcctgtaatcccagtactctgggaagccaaggcaggcagatcacttgaggtcaggagttcgagaccagcctggccaatacggcaaaacctcatcattactaaaaacacaaaaattagccaggtgtggcggcgagcacctgtaatcccagctactcgggaggctgagacaggagaatctcttgaatccaggaggcagaggctgtggtgagccaagatgacacaactgcactccagcttgggcaacagggcgagaccttgtttaaaaaaaaaattcaatattggggttggaacatttcagttgccattgacagaacacccaattcaaattgactgaagcaaagaagggaatttattgcctctttcacattgaaacccaggagtggataacactggcttcaggcaaagcttgaatcaggactcaatctacaggccagcacctttctcttggccggatgtcctcagggctggcagatgcagtagactgcagtggacagtccccaccttgttactgctactacactttgctcctctggcccaaggcatgaggagagaggctgtgtcagaaactgaagctgttctcaggatcactgggctcttcttggcagaggggatgtctggcttgcctgaagggagtggctctgtaaggacgccttgatgctttcttcattaagattttgagcatttttacgtacttgagcttttttttttttttttttcaatttctagaggaactttttctctgttaattcctggaactgtattttgaatccttaaaggtgagccctcatagggagatccaaagtcctgtggttaacgccttcatttatagatgaggcagctgaggcctggggatgtgaacaacctgctcacagtcctcatttactggatttgacttcagccaggtgaactggaatgccttggggcgtggaagggcattaggagtgtttcatttgatatgtgaatgctcataaaaaaatgtcaaggaatgaagaacaacaactctcagtggtgcctgcatttataattatttatgtgaaagtcaaattcatgtacagtaaatttgttataagaat

SEQ ID NO: 785 - DNA, 5814 bp, Homo sapiens
  source 1..5814: mol_type = genomic DNA
aaggaaatggagatccaaaggaaagcctgaagcactttgtggcttccacgggttcgtttctaggaagcttttgctttacctggggaaaccccaagctctacagtgagaaagttgtaaattagcctttaggagacgctgtttgtcaaagttatcttaaccctggaaaaggggagggaaaaaggcagataagcagtgatgacatcagcaggaaactagtatcaggctacccagtcctgaagattcagttttcacttaaacaaccagcaagtcttgaagtctcttcccaagcaaatgggagcttctttggaccttggagcacacagaggattctactttctttaaaactttgttttcaggcaatttccctgagaaccgtttacttccagaagattggtggagcttgatctgaaggctggccatgaaatctcaaggtcaacattggtattccagttcagataaaaactgtaaagtgagctttcgtgagaagcttctgattattgattcaaacctgggggtccaagatgtggagaacctcaagtttctctgcataggattggtccccaacaagaagctggagaagtccagctcagcctcagatgtttttgaacatctcttggcagaggatctgctgagtgaggaagaccctttcttcctggcagaactcctctatatcatacggcagaagaagctgctgcagcacctcaactgtaccaaagaggaagtggagcgactgctgcccacccgacaaagggtttctctgtttagaaacctgctctacgaactgtcagaaggcattgactcagagaacttaaaggacatgatcttccttctgaaagactcgcttcccaaaactgaaatgacctccctaagtttcctggcatttctagagaaacaaggtaaaatagatgaagataatctgacatgcctggaggacctctgcaaaacagttgtacctaaacttttgagaaacatagagaaatacaaaagagagaaagctatccagatagtgacacctcctgtagacaaggaagccgagtcgtatcaaggagaggaagaactagtttcccaaacagatgttaagacattcttggaagccttaccgcaggagtcctggcaaaataagcatgcaggtagtaatgagggcagctgtgtacaggatgaatcggaaccacagaggcctctgtgtcattgtcaacaaccacagctttacctccctgaaggacagacaaggaacccataaagatgctgagatcctgagtcatgtgttccagtggcttgggttcacagtgcatatacacaataatgtgacgaaagtggaaatggagatggtcctgcagaagcagaagtgcaatccagcccatgccgacggggactgcttcgtgttctgtattctgacccatgggagatttggagctgtctactcttcggatgaggccctcattcccattcgggagatcatgtctcacttcacagccctgcagtgccctagactggctgaaaaacctaaactctttttcatccaggcctgccaaggtgaagagatacagccttccgtatccatcgaagcagatgctctgaaccctgagcaggcacccacttccctgcaggacagtattcctgccgaggctgacttcctacttggtctggccactgtcccaggctatgtatcctttcggcatgtggaggaaggcagctggtatattcagtctctgtgtaatcatctgaagaaattggtcccaagacatgaagacatcttatccatcctcactgctgtcaacgatgatgtgagtcgaagagtggacaaacagggaacaaagaaacagatgccccagcctgctttcacactaaggaaaaaactagtattccctgtgcccctggatgcactttcattatagcagagagtttttgttggttcttagacctcaaacgaatcattggctataacctccagcctcctgcccagcacaggaatcggtggtctccacctgtcattctagaaacaggaaacaccgtgttttctgacacagtcaattctgattttctttttcttttgcaagtctaaatgttagaaaactttcttttttttggagatagtctcattctgtcacccagactggagtgcaggggggcaatcacggctcactgtagtctcgacctcccaggctcaagctgtcctcccgcctcagcttcccaagtagctgggaccacaggtgtgtaccaccgtgcccggattttttttattctttattttttgtagagatggagggatctcactttgttgcacaggctggtttcaaactcctaggcccaagtgatcctcccacctctgtccccaaaatactgggattataggcacgagccaccacacctggccagaaaactttcattattgaagacttggattgtagccttggttttggatgtctattctgaagacagagtaattggctttggtttgtgcaggtactttttctttgagacagagtcactccgtcacctgggctggagtgcagtggtgggatcactgttcactgcagccttgacctcccaggttcaagcgatcctcccacctcagcctcccaagtagctgagactacaggtgtgtgtccatgcacagctaactttttattttttttgtggagatggggtttcactatgttgcctaagctggtctcaaactcctgggctcaagcgatcctcccacctcagcttctcaaagttctgggactacaggcatgaaatactgtgcctggcctggggaccaggtgcattttaaggttccttggtgttcaaaaaccacgttcttagcctagattgagcttagattgcctctctagacaactaccccttagttataattctgtgtcccctctgcatgcccttaaacattggacagtgaggtcacagtccacccaccctctctctgatctcccccttcctaagacttctcttttgcacatctagtgaggtgaaaatttggtctatgccaggcccatttcctgcttttgtgtaaggaaggtgctcacataggaagtttttatttggttagagacaggtttccctgtaggaagatgatggctcatttacactcagctgctctgcaagcagaaactttacaacctgatgtcatattccattttggactgggtgcggtgactcatgcctgtaatcccagtactctgggaagccaaggcaggcagatcacttgaggtcaggagttcgagaccagcctggccaatacggcaaaacctcatcattactaaaaacacaaaaattagccaggtgtggcggcgagcacctgtaatcccagctactcgggaggctgagacaggagaatctcttgaatccaggaggcagaggctgtggtgagccaagatgacacaactgcactccagcttgggcaacagggcgagaccttgtttaaaaaaaaaattcaatattggggttggaacatttcagttgccattgacagaacacccaattcaaattgactgaagcaaagaagggaatttattgcctctttcacattgaaacccaggagtggataacactggcttcaggcaaagcttgaatcaggactcaatctacaggccagcacctttctcttggccggatgtcctcagggctggcagatgcagtagactgcagtggacagtccccaccttgttactgctactacactttgctcctctggcccaaggcatgaggagagaggctgtgtcagaaactgaagctgttctcaggatcactgggctcttcttggcagaggggatgtctggcttgcctgaagggagtggctctgtaaggacgccttgatgctttcttcattaagattttgagcatttttacgtacttgagcttttttttttttttttttcaatttctagaggaactttttctctgttaattcctggaactgtattttgaatccttaaaggtgagccctcatagggagatccaaagtcctgtggttaacgccttcatttatagatgaggcagctgaggcctggggatgtgaacaacctgctcacagtcctcatttactggatttgacttcagccaggtgaactggaatgccttggggcgtggaagggcattaggagtgtttcatttgatatgtgaatgctcataaaaaaatgtcaaggaatgaagaacaacaactctcagtggtgcctgcatttataattatttatgtgaaagtcaaattcatgtacagtaaatttgttataagaatattcacaagaacactgttctgatatctctgattgtcatgtggatttgaatgtagcttgacagagggaatgtctaatctatattgacagggcaggaacaccgtcatcttagacaaacaccgccactttaagttccagttccctttctagcctcatgcatttcaaggaaatcacttcttttctaacagcgagcagccagaaagagaagagagtaaaatacagataagacagctctggcatagagggaggtgggggggtgggggaagtctcttgggtaactgccaaactttgccttcatacaatgggttccaggaaaacaatgagccttaataagcacattcctttcccttcaggtgcactaagtggggaagctaaaagcagactggaggggggtggggtgtacctacagctgcagaaatattgtatgggaacggacacacaactctccctcccagataagcacagcaaagagacatagaagcaatccaagcctctgataaactctcccaccctaaatccttaaaaactcttagtctgtaagtgagtgggctctgacctaactcggccagaagcccctttcaaatttgttttctctaaaataaacctgtccttggctgtcaagccacctttcatgtttctttcctctttctttaattcttacacatgtgtcaggatgatctcccaaaaccgtgttcataacagtcagggccaaaagctagtggtcacagtccttgtccagttggcagaactgacatgtgaaggcaagtgaaggatggtgagatactgaggaaagagcaaaggatctggagatcaaagccctgcatttccattttgtcctgattcctttgctcagagacactaactaaatcaagctagcttttttcagccttgtctgtaaagtagagaaaacattagctgttgggaagacgaaaaagaatgtgtcctatgtgtgcatctatttaaatctaactgtgctgaggtgcatataaatgcctttaggtggtagggtcttccggttgtaactgcaacagaaatagcaggacttaagttcctttgtgcgtaattccagctgactttattagcggcaactcagcactagcattacccctgacatactctgagtaagatctaattcttccctcactggttcgtgatgtctaccgcagcagaaggccagctcttgactctgagttcagttggacaaaatgctgttgataaaacctcctgtcaggcctctgagcccaagctaagccatcatatcccttgtgacctgcacatatatatccagatggcctgaagtaactgaagaatcacaaaagaagtgaaaatggcctgttcctgccttaactgatgacattaccttgtgaaattccttctcctggctcatcctggctcaaaagctcccccagtgagcaccttgtgacccccatccctgccagccagagaacaaccccctttgactgtaattttccactacttacccaaatcctataaaacggccccacccctatctcccttcactgactttcttttcggactcagcccacctgcacccaggtgattaaaaagctttattgctcac

SEQ ID NO: 786 - DNA, 777 bp, Homo sapiens
  source 1..777: mol_type = genomic DNA
aggatcagacaagggtgctgagagccgggactcacaaccaaaggagaaatgagcaatccgcggtctttggaagaggagaaatatgatatgtcaggtgcccgcctggccctaatactgtgtgtcaccaaagcccgggaaggttccgaagaagacctggatgctctggaacacatgtttcggcagctgagattcgaaagcaccatgaaaagagaccccactgccgagcaattccaggaagagctggaaaaattccagcaggccatcgattcccgggaagatcccgtcagttgtgccttcgtggtactcatggctcacgggagggaaggcttcctcaagggagaagatggggagatggtcaagctggagaatctcttcgaggccctgaacaacaagaactgccaggccctgcgagctaagcccaaggtgtacatcatacaggcctgtcgaggagaacaaagggaccccggtgaaacagtaggtggagatgagattgtgatggtcatcaaagacagcccacaaaccatcccaacatacacagatgccttgcacgtttattccacggtagagggatacatcgcctaccgacatgatcagaaaggctcatgctttatccagaccctggtggatgtgttcacgaagaggaaaggacatatcttggaacttctgacagaggtgacccggcggatggcagaagcagagctggttcaagaaggaaaagcaaggaaaacgaaccctgaaatccaaagcaccctccggaaacggctgtatctgcagtag

SEQ ID NO: 787 - DNA, 941 bp, Homo sapiens
  source 1..941: mol_type = genomic DNA
atagaccaggcttctcaggagaaaccccgggagattccacactgtcagccccttctccaagatcagtacgtgggcctgactcctcctcggtgcccagctcagtattggcaactaggagagtagtgagattgaacttggccttgaggaacagctgcctctagagttggatcagacaagggtgctgagagccgggactcacaaccaaaggagaaatgagcaatccgcggtctttggaagaggagaaatatgatatgtcaggtgcccgcctggccctaatactgtgtgtcaccaaagcccgggaaggttccgaagaagacctggatgctctggaacacatgtttcggcagctgagattcgaaagcaccatgaaaagagaccccactgccgagcaattccaggaagagctggaaaaattccagcaggccatcgattcccgggaagatcccgtcagttgtgccttcgtggtactcatggctcacgggagggaaggcttcctcaagggagaagatggggagatggtcaagctggagaatctcttcgaggccctgaacaacaagaactgccaggccctgcgagctaagcccaaggtgtacatcatacaggcctgtcgaggagaacaaagggaccccggtgaaacagtaggtggagatgagattgtgatggtcatcaaagacagcccacaaaccatcccaacatacacagatgccttgcacgtttattccacggtagagggatacatcgcctaccgacatgatcagaaaggctcatgctttatccagaccctggtggatgtgttcacgaagaggaaaggacatatcttggaacttctgacagaggtgacccggcggatggcagaagcagagctggttcaagaaggaaaagcaaggaaaacgaaccctgaaatccaaagcaccctccggaaacggctgtatctgcagtag

SEQ ID NO: 788 - DNA, 4225 bp, Homo sapiens
  source 1..4225: mol_type = genomic DNA
cttttgtctgtccgccgagcaccccacttcaccccattggaccgcgcggccgccgctagagctctgcgcctgcgcacgcaccgggccggggactgggtggcctggtgtgtgggcgcggcagggcgcaggcgcaggcgcagtgtgcgtccgcgtctgaggggagggatgtgggggaagcgacggcccccggtttgtttgggctgtgggcggtgcgcagcggagagcccgggaaaagcgggaaatggcggcgccgagcgcggggtcttggtccaccttccagcacaaggagctgatggccgctgacaggggacgcaggatattgggagtgtgtggcatgcatcctcatcatcaggaaactctaaaaaagaaccgagtggtgctagccaaacagctgttgttgagcgaattgttagaacatcttctggagaaggacatcatcaccttggaaatgagggagctcatccaggccaaagtgggcagtttcagccagaatgtggaactcctcaacttgctgcctaagaggggtccccaagcttttgatgccttctgtgaagcactgagggagaccaagcaaggccacctggaggatatgttgctcaccaccctttctgggcttcagcatgtactcccaccgttgagctgtgactacgacttgagtctcccttttccggtgtgtgagtcctgtcccctttacaagaagctccgcctgtcgacagatactgtggaacactccctagacaataaagatggtcctgtctgccttcaggtgaagccttgcactcctgaattttatcaaacacacttccagctggcatataggttgcagtctcggcctcgtggcctagcactggtgttgagcaatgtgcacttcactggagagaaagaactggaatttcgctctggaggggatgtggaccacagtactctagtcaccctcttcaagcttttgggctatgacgtccatgttctatgtgaccagactgcacaggaaatgcaagagaaactgcagaattttgcacagttacctgcacaccgagtcacggactcctgcatcgtggcactcctctcgcatggtgtggagggcgccatctatggtgtggatgggaaactgctccagctccaagaggtttttcagctctttgacaacgccaactgcccaagcctacagaacaaaccaaaaatgttcttcatccaggcctgccgtggagatgagactgatcgtggggttgaccaacaagatggaaagaaccacgcaggatcccctgggtgcgaggagagtgatgccggtaaagaaaagttgccgaagatgagactgcccacgcgctcagacatgatatgcggctatgcctgcctcaaagggactgccgccatgcggaacaccaaacgaggttcctggtacatcgaggctcttgctcaagtgttttctgagcgggcttgtgatatgcacgtggccgacatgctggttaaggtgaacgcacttatcaaggatcgggaaggttatgctcctggcacagaattccaccggtgcaaggagatgtctgaatactgcagcactctgtgccgccacctctacctgttcccaggacaccctcccacatgatgtcacctccccatcatccacgccaagtggaagccactggaccacaggaggtgtgatagagcctttgatcttcaggatgcacggtttctgttctgccccctcagggatgtgggaatctcccagacttgtttcctgtgcccatcatctctgcctttgagtgtgggactccaggccagctccttttctgtgaagccctttgcctgtagagccagccttggttggacctattgccaggaatgtttcagctgcagttgaagagcctgacaagtgaagttgtaaacacagtgtggttatggggagagggcatataaattccccatatttgtgttcagttccagcttttgtagatggcactttagtgattgcttttattacattagttaagatgtctgagagaccatctcctatcttttatttcattcatatcctccgccctttttgtcctagagtgagagtttggaaggtgtccaaatttaatgtagacattatcttttggctctgaagaagcaaacatgactagagacgcaccttgctgcagtgtccagaagcggcctgtgcgttcccttcagtactgcagcgccacccagtggaaggacactcttggctcgtttgggctcaaggcaccgcagcctgtcagccaacattgccttgcatttgtaccttattgatctttgcccatggaagtctcaaagatctttcgttggttgtttctctgagctttgttactgaaatgagcctcgtggggagcatcagagaaggccaggaagaatggtgtgtttccctagactctgtaaccacctctctgtctttttccttcctgagaaacgtccatctctctcccttactattcccactttcattcaatcaacctgcacttcatatctagatttctagaaaagcttcctagcttatctccctgcttcatatctctcccttctttaccttcatttcatcctgttggctgctgccaccaaatctgtctagaatcctgctttacaggatcatgtaaatgctcaaagatgtaatgtagttctttgttcctgctttctctttcagtattaaactctcctttgatattatgtggcttttatttcagtgccatacatgttattgttttcaacctagaaacctttatccctgcttatctgaaacttcccaacttccctgttctttaagactttttttttttttttttttttttttgagacagagtctcgctctgtcgcccaggctggagggcagtggcacgatctcagctcactgcaagctccaactcccgggttcacgccattctcctgcctcagccttccaagtagctgggactacaggtgcccgccaccgtgcccggctaatttttttgtatttttagtagagacagggtttcaccatgttagccgggatggtcttgatctcctgacctcatgatccacccacctcagcctcccaaagtgttgggattacaggcgtgagccactgcgcccgggcaagacctttttttaaaaaaaaaaaaaaaaaaacttccattctttcttcctccagtctgttctcacataacagagtagttttggtttttaattttttttggttgtttgctgttttttgttttttaaggtgagttctcactatgtttctcagactggtctcgaactcctggcctcaagccatcttcccgcctcagcctctcaaatagctgggcttacaggcatgagccaccacacctggccaggatttggttgtttaaatataaatctgatcacccccctgcttagaacccttctgctttctattacccctcatttaaaatgtaaactcttcaccttggtttatgagaactggttcttgccttccccttgaacctcattaaatggtgatttcttgctaagctccagcccgagtggtctcctctcagcttctaattttgtgctctttcctgcccttttcctgggccttctcagctctccacccccaccactcttgactcaggtggtgtccttcttcctcaagtcttgacaattcccgggcccttcagtccctgagcagtctacttctgtgtctgtcaccacatcttgtcttttcccctcattgcatttattgcagtttatatatatgctacttttacttgttcatttctgtctcccctaccaggctgtaaatgagggcagaaaccttgtttgttttattcaccatcatgtaccaagtgcttggcacatagtgggccttcattaaatgtttgttgaataaaagagggaagaaggcaagccaaccttagctacaatcctaccttttgataaaatgttccttttgacaatatacacggattattatttgtactttgtttttccatgtgttttgcttttatccactggcatttttagctccttgaagacatatcatgtgtgagataacttccttcacatctcccatggtccctagcaaaatgctaggcctgtagtagtcaaggtgctcaataaatatttgtttgggtggtttgtgagccttgctgccaagtcctgcctttgggtcgacatagtatggaagtatttgagagagagaacctttccactcccactgccaggattttgtattgccatcgggtgccaaataaatgctcatatttattactga

SEQ ID NO: 789 - DNA, 1146 bp, Homo sapiens
  source 1..1146: mol_type = genomic DNA
gggaaatggcggcgccgagcgcggggtcttggtccaccttccagcacaaggagctgatggccgctgacaggggacgcaggatattgggagtgtgtggcatgcatcctcatcatcaggaaactctaaaaaagaaccgagtggtgctagccaaacagctgttgttgagcgaattgttagaacatcttctggagaaggacatcatcaccttggaaatgagggagctcatccaggccaaagtgggcagtttcagccagaatgtggaactcctcaacttgctgcctaagaggggtccccaagcttttgatgccttctgtgaagccttgcactcctgaattttatcaaacacacttccagctggcatataggttgcagtctcggcctcgtggcctagcactggtgttgagcaatgtgcacttcactggagagaaagaactggaatttcgctctggaggggatgtggaccacagtactctagtcaccctcttcaagcttttgggctatgacgtccatgttctatgtgaccagactgcacaggaaatgcaagagaaactgcagaattttgcacagttacctgcacaccgagtcacggactcctgcatcgtggcactcctctcgcatggtgtggagggcgccatctatggtgtggatgggaaactgctccagctccaagaggtttttcagctctttgacaacgccaactgcccaagcctacagaacaaaccaaaaatgttcttcatccaggcctgccgtggagatgagactgatcgtggggttgaccaacaagatggaaagaaccacgcaggatcccctgggtgcgaggagagtgatgccggtaaagaaaagttgccgaagatgagactgcccacgcgctcagacatgatatgcggctatgcctgcctcaaagggactgccgccatgcggaacaccaaacgaggttcctggtacatcgaggctcttgctcaagtgttttctgagcgggcttgtgatatgcacgtggccgacatgctggttaaggtgaacgcacttatcaaggatcgggaaggttatgctcctggcacagaattccaccggtgcaaggagatgtctgaatactgcagcactctgtgccgccacctctacctgttcccaggacaccctcccacatga

SEQ ID NO: 790 - DNA, 1048 bp, Homo sapiens
  source 1..1048: mol_type = genomic DNA
ggaaaagcgggaaatggcggcgccgagcgcggggtcttggtccaccttccagcacaaggagctgatggccgctgacaggggacgcaggatattgggagtgtgtggcatgcatcctcatcatcaggaaactctaaaaaagaaccgagtggtgctagccaaacagctgttgttgagcgaattgttagaacatcttctggagaaggacatcatcaccttggaaatgagggagctcatccaggccaaagtgggcagtttcagccagaatgtggaactcctcaacttgctgcctaagaggggtccccaagcttttgatgccttctgtgaagcactgagggagaccaagcaaggccacctggaggatatgttgctcaccaccctttctgggcttcagcatgtactcccaccgttgagctgtgactacgacttgagtctcccttttccggtgtgtgagtcctgtcccctttacaagaagctccgcctgtcgacagatactgtggaacactccctagacaataaagatggtcctgtctgccttcaggtgaagccttgcactcctgaattttatcaaacacacttccagctggcatataggttgcagtctcggcctcgtggcctagcactggtgttgagcaatgtgcacttcactggagagaaagaactggaatttcgctctggaggggatgtggaccacagtactctagtcaccctcttcaagcttttgggctatgacgtccatgttctatgtgaccagactgcacaggaaatgcaagagaaactgcagaattttgcacagttacctgcacaccgagtcacggactcctgcatcgtggcactcctctcgcatggtgtggagggcgccatctatggtgtggatgggaaactgctccagctccaagaggtttttcagctctttgacaacgccaactgcccaagcctacagaacaaaccaaaaatgttcttcatccaggcctgccgtggagcaggtgctattggatcccttgggcacctccttctgttcactgctgccaccgcctctcttgctctgtaa

SEQ ID NO: 791 - DNA, 1338 bp, Homo sapiens
  source 1..1338: mol_type = genomic DNA
cagaagcctttgtgatctcacctgttggaatgcactaatgttttctgagccccttaaatatcttgtctacattcttttaagaagctcttcaccaactgtcagaaggcaaccacagaaaaaagccacttaaggtgttggaatccctgggcaaagatttcctcactggtgttttggataacttggtggaacaaaatgtactgaactggaaggaagaggaaaaaaagaaatattacgatgctaaaactgaagacaaagttcgggtcatggcagactctatgcaagagaagcaacgtatggcaggacaaatgcttcttcaaaccttttaacatagaccaaatatcccccaataaaaaagctcatccgaatatggaggctggaccacctgagtcaggagaatctacagatgccctcaagctttgtcctcatgaagaattcctgagactatgtaaagaaagagctgaagagatctatccaataaaggagagaaacaaccgcacacgcctggctctcatcatatgcaatacagagtttgaccatctgcctccgaggaatggagctgactttgacatcacagggatgaaggagctacttgagggtctggactatagtgtagatgtagaagagaatctgacagccagggatatggagtcagcgctgagggcatttgctaccagaccagagcacaagtcctctgacagcacattcttggtactcatgtctcatggcatcctggagggaatctgcggaactgtgcatgatgagaaaaaaccagatgtgctgctttatgacaccatcttccagatattcaacaaccgcaactgcctcagtctgaaggacaaacccaaggtcatcattgtccaggcctgcagaggtgcaaaccgtggggaactgtgggtcagagactctccagcatccttggaagtggcctcttcacagtcatctgagaacctagaggaagatgctgtttacaagacccacgtggagaaggacttcattgctttctgctcttcaacgccacacaacgtgtcctggagagacagcacaatgggctctatcttcatcacacaactcatcacatgcttccagaaatattcttggtgctgccacctagaggaagtatttcggaaggtacagcaatcatttgaaactccaagggccaaagctcaaatgcccaccatagaacgactgtccatgacaagatatttctacctctttcctggcaattgaaaatggaagccacaagcagcccagccctccttaatcaacttcaaggagcaccttcattagtacagcttgcatatttaacattttgtatttcaataaaagtgaagacaaacg

SEQ ID NO: 792 - DNA, 763 bp, Homo sapiens
  source 1..763: mol_type = genomic DNA
ggagggatggatcccggtcccacctaaagaagcagtctggccatgatctgccacagcggctgtgctgcactgtgaagactgctgcccagtccaatctgcccagcctccctagcactgtcagaaactaaattccagtaattggatgccaatttgctgatgacaaggcacttcctgataatgagtctggaattctgagcagcagtttcacaatctgtaattacacgtttccgccctttgcaataaggaaatacatagtttactttcatttttgactctgaggctctttccaacgctgtaaaaaaggacagaggctgttccctatggcagaaggcaaccacagaaaaaagccacttaaggtgttggaatccctgggcaaagatttcctcactggtgttttggataacttggtggaacaaaatgtactgaactggaaggaagaggaaaaaaagaaatattacgatgctaaaactgaagacaaagttcgggtcatggcagactctatgcaagagaagcaacgtatggcaggacaaatgcttcttcaaaccttttttaacatagaccaaatatcccccaataaaaaagctcatccgaatatggaggctggaccacctgagtcaggagaatctacagatgccctcaagctttgtcctcatgaagaattcctgagactatgtaaagaaagagctgaagagatctatccaataaaggagagaaacaaccgcacacgcctggctctcatcatatgcaatacagagtttgacca

SEQ ID NO: 793 - DNA, 2158 bp, Homo sapiens
  source 1..2158: mol_type = genomic DNA
aaatgagagctctgtctgtaaactctaggtggagttgctgaaattcctgcaagcatttcttgccgggagaggagggatggatcccggtcccacctaaagaagcagtctggccatgatctgccacagcggctgtgctgcactgtgaagactgctgcccagtccaatctgcccagcctccctagcactggtagggaaaaaccgctgactagagctgcagtaatggcagtcgcccctcccctggggaactcggtcatctctggcgtactccaggctgctatgctggctagtggggattctaatccagcggatctaagcttgcaggcttctgtgagaatggacctgctgcaaggccattttgctccctggcttcagccccctttccatgggagtggacgggactcctgcctcactagagttccgggagctgctggactatgtaaaaactcctgcagctcagtgcctgcccaaaaagctggaaatatgaactattgggttaattcttatcaggaaatgaaaaagagttgttagattaaacttcttcagtcattgtcgttctttgtaatcagagaaagaaaaactgagagatcaggaagagaagagacagatggatagaagaagtttgggtggccacaggaaacaagaaaagaaacaagctgaggtgtcaacccacaggataatattttgtcattttcatttttttcccccaagtcagaaactaaattccagtaattggatgccaatttgctgatgacaaggcacttcctgataatgagtctggaattctgagcagcagtttcacaatctgtaattacacgtttccgccctttgcaataaggaaatacatagtttactttcatttttgactctgaggctctttccaacgctgtaaaaaaggacagaggctgttccctatggcagaaggcaaccacagaaaaaagccacttaaggtgttggaatccctgggcaaagatttcctcactggtgttttggataacttggtggaacaaaatgtactgaactggaaggaagaggaaaaaaagaaatattacgatgctaaaactgaagacaaagttcgggtcatggcagactctatgcaagagaagcaacgtatggcaggacaaatgcttcttcaaaccttttttaacatagaccaaatatcccccaataaaaaagctcatccgaatatggaggctggaccacctgagtcaggagaatctacagatgccctcaagctttgtcctcatgaagaattcctgagactatgtaaagaaagagctgaagagatctatccaataaaggagagaaacaaccgcacacgcctggctctcatcatatgcaatacagagtttgaccatctgcctccgaggaatggagctgactttgacatcacagggatgaaggagctacttgagggtctggactatagtgtagatgtagaagagaatctgacagccagggatatggagtcagcgctgagggcatttgctaccagaccagagcacaagtcctctgacagcacattcttggtactcatgtctcatggcatcctggagggaatctgcggaactgtgcatgatgagaaaaaaccagatgtgctgctttatgacaccatcttccagatattcaacaaccgcaactgcctcagtctgaaggacaaacccaaggtcatcattgtccaggcctgcagaggtgcaaaccgtggggaactgtgggtcagagactctccagcatccttggaagtggcctcttcacagtcatctgagaacctagaggaagatgctgtttacaagacccacgtggagaaggacttcattgctttctgctcttcaacgccacacaacgtgtcctggagagacagcacaatgggctctatcttcatcacacaactcatcacatgcttccagaaatattcttggtgctgccacctagaggaagtatttcggaaggtacagcaatcatttgaaactccaagggccaaagctcaaatgcccaccatagaacgactgtccatgacaagatatttctacctctttcctggcaattgaaaatggaagccacaagcagcccagccctccttaatcaacttcaaggagcaccttcattagtacagcttgcatatttaacattttgtatttcaataaaagtgaagacaaacgaa

SEQ ID NO: 794 - DNA, 1414 bp, Homo sapiens
  source 1..1414: mol_type = genomic DNA
atggctgaagacagtggcaaaaaaaaaaggcgtaagaattttgaagctatgttcaaaggtatccttcagagtggattggataacttcgtgataaaccacatgctaaagaacaacgtggctggacaaacatctatccagaccctagtacctaatacggatcaaaagtcgaccagtgtaaaaaaagacaaccacaaaaaaaaaacagttaagatgttggaatacctgggcaaagatgttcttcatggtgtttttaattatttggcaaaacacgatgttctgacattgaaggaagaggaaaagaaaaaatattatgataccaaaattgaagacaaggccctgatcttggtagactctttgcgaaagaatcgcgtggctcatcaaatgtttacccaaacacttctcaatatggaccaaaagatcaccagtgtaaaacctcttctgcaaatcgaggctggaccacctgagtcagcagaatctacaaatatactcaaactttgtcctcgtgaagaattcctgagactgtgtaaaaaaaatcatgatgagatctatccaataaaaaagagagaggaccgcagacgcctggctctcatcatatgcaatacaaagtttgatcacctgcctgcaaggaatggggctcactatgacatcgtggggatgaaaaggctgcttcaaggcctgggctacactgtggttgacgaaaagaatctcacagccagggatatggagtcagtgctgagggcatttgctgccagaccagagcacaagtcctctgacagcacgttcttggtactcatgtctcatggcatcctagagggaatctgcggaactgcgcataaaaagaaaaaaccggatgtgctgctttatgacaccatcttccagatattcaacaaccgcaactgcctcagtctaaaggacaaacccaaggtcatcattgtccaggcctgcagaggtgaaaaacatggggaactctgggtcagagactctccagcatccttggcactcatctcttcacagtcatctgagaacctggaggcagattctgtttgcaagatccacgaggagaaggacttcattgctttctgttcttcaacaccacataacgtgtcctggagagaccgcacaaggggctccatcttcattacggaactcatcacatgcttccagaaatattcttgctgctgccacctaatggaaatatttcggaaggtacagaaatcatttgaagttccacaggctaaagcccagatgcccaccatagaacgagcaaccttgacaagagatttctacctctttcctggcaattgaaaatgaaaccacaggcagcccagccctcctctgtcaacatcaaagagcacatttaccagtatagcttgcatagtcaatatttggtatttcaataaaagtaaagactgta

SEQ ID NO: 795 - DNA, 1378 bp, Homo sapiens
  source 1..1378: mol_type = genomic DNA
agtgctgtacaaagagacagaggctgttagctatggctgctgtgcccagagttgaaggagtctttatatttctgatagaagacagtggcaaaaaaaaaaggcgtaagaattttgaagctatgttcaaaggtatccttcagagtggattggataacttcgtgataaaccacatgctaaagaacaacgtggctggacaaacatctatccagaccctagtacctaatacggatcaaaagtcgaccagtgtaaaaaaagacaaccacaaaaaaaaaacagttaagatgttggaatacctgggcaaagatgttcttcatggtgtttttaattatttggcaaaacacgatgttctgacattgaaggaagaggaaaagaaaaaatattatgataccaaaattgaagacaaggccctgatcttggtagactctttgcgaaagaatcgcgtggctcatcaaatgtttacccaaacacttctcaatatggaccaaaagatcaccagtgtaaaacatctatccaataaaaaagagagaggaccgcagacgcctggctctcatcatatgcaatacaaagtttgatcacctgcctgcaaggaatggggctcactatgacatcgtggggatgaaaaggctgcttcaaggcctgggctacactgtggttgacgaaaagaatctcacagccagggatatggagtcagtgctgagggcatttgctgccagaccagagcacaagtcctctgacagcacgttcttggtactcatgtctcatggcatcctagagggaatctgcggaactgcgcataaaaagaaaaaaccggatgtgctgctttatgacaccatcttccagatattcaacaaccgcaactgcctcagtctaaaggacaaacccaaggtcatcattgtccaggcctgcagaggtgaaaaacatggggaactctgggtcagagactctccagcatccttggcactcatctcttcacagtcatctgagaacctggaggcagattctgtttgcaagatccacgaggagaaggacttcattgctttctgttcttcaacaccacataacgtgtcctggagagaccgcacaaggggctccatcttcattacggaactcatcacatgcttccagaaatattcttgctgctgccacctaatggaaatatttcggaaggtacagaaatcatttgaagttccacaggctaaagcccagatgcccaccatagaacgagcaaccttgacaagagatttctacctctttcctggcaattgaaaatgaaaccacaggcagcccagccctcctctgtcaacatcaaagagcacatttaccagtatagcttgcatagtcaatatttggtatttcaataaaagtaaagactgtatct

SEQ ID NO: 796 - DNA, 1488 bp, Homo sapiens
  source 1..1488: mol_type = genomic DNA
agtgctgtacaaagagacagaggctgttagctatggctgctgtgcccagagttgaaggagtctttatatttctgatagaagacagtggcaaaaaaaaaaggcgtaagaattttgaagctatgttcaaaggtatccttcagagtggattggataacttcgtgataaaccacatgctaaagaacaacgtggctggacaaacatctatccagaccctagtacctaatacggatcaaaagtcgaccagtgtaaaaaaagacaaccacaaaaaaaaaacagttaagatgttggaatacctgggcaaagatgttcttcatggtgtttttaattatttggcaaaacacgatgttctgacattgaaggaagaggaaaagaaaaaatattatgataccaaaattgaagacaaggccctgatcttggtagactctttgcgaaagaatcgcgtggctcatcaaatgtttacccaaacacttctcaatatggaccaaaagatcaccagtgtaaaacctcttctgcaaatcgaggctggaccacctgagtcagcagaatctacaaatatactcaaactttgtcctcgtgaagaattcctgagactgtgtaaaaaaaatcatgatgagatctatccaataaaaaagagagaggaccgcagacgcctggctctcatcatatgcaatacaaagtttgatcacctgcctgcaaggaatggggctcactatgacatcgtggggatgaaaaggctgcttcaaggcctgggctacactgtggttgacgaaaagaatctcacagccagggatatggagtcagtgctgagggcatttgctgccagaccagagcacaagtcctctgacagcacgttcttggtactcatgtctcatggcatcctagagggaatctgcggaactgcgcataaaaagaaaaaaccggatgtgctgctttatgacaccatcttccagatattcaacaaccgcaactgcctcagtctaaaggacaaacccaaggtcatcattgtccaggcctgcagaggtgaaaaacatggggaactctgggtcagagactctccagcatccttggcactcatctcttcacagtcatctgagaacctggaggcagattctgtttgcaagatccacgaggagaaggacttcattgctttctgttcttcaacaccacataacgtgtcctggagagaccgcacaaggggctccatcttcattacggaactcatcacatgcttccagaaatattcttgctgctgccacctaatggaaatatttcggaaggtacagaaatcatttgaagttccacaggctaaagcccagatgcccaccatagaacgagcaaccttgacaagagatttctacctctttcctggcaattgaaaatgaaaccacaggcagcccagccctcctctgtcaacatcaaagagcacatttaccagtatagcttgcatagtcaatatttggtatttcaataaaagtaaagactgtatct

SEQ ID NO: 797 - DNA, 1023 bp, Homo sapiens
  source 1..1023: mol_type = genomic DNA
agtgctgtacaaagagacagaggctgttagctatggctgctcttctgcaaatcgaggctggaccacctgagtcagcagaatctacaaatatactcaaactttgtcctcgtgaagaattcctgagactgtgtaaaaaaaatcatgatgagatctatccaataaaaaagagagaggaccgcagacgcctggctctcatcatatgcaatacaaagtttgatcacctgcctgcaaggaatggggctcactatgacatcgtggggatgaaaaggctgcttcaaggcctgggctacactgtggttgacgaaaagaatctcacagccagggatatggagtcagtgctgagggcatttgctgccagaccagagcacaagtcctctgacagcacgttcttggtactcatgtctcatggcatcctagagggaatctgcggaactgcgcataaaaagaaaaaaccggatgtgctgctttatgacaccatcttccagatattcaacaaccgcaactgcctcagtctaaaggacaaacccaaggtcatcattgtccaggcctgcagaggtgaaaaacatggggaactctgggtcagagactctccagcatccttggcactcatctcttcacagtcatctgagaacctggaggcagattctgtttgcaagatccacgaggagaaggacttcattgctttctgttcttcaacaccacataacgtgtcctggagagaccgcacaaggggctccatcttcattacggaactcatcacatgcttccagaaatattcttgctgctgccacctaatggaaatatttcggaaggtacagaaatcatttgaagttccacaggctaaagcccagatgcccaccatagaacgagcaaccttgacaagagatttctacctctttcctggcaattgaaaatgaaaccacaggcagcccagccctcctctgtcaacatcaaagagcacatttaccagtatagcttgcatagtcaatatttggtatttcaataaaagtaaagactgtatct

SEQ ID NO: 798 - DNA, 1237 bp, Homo sapiens
  source 1..1237: mol_type = genomic DNA
gtgctgtacaaagagacagaggctgttagctatggctgaagacaaccacaaaaaaaaaacagttaagatgttggaatacctgggcaaagatgttcttcatggtgtttttaattatttggcaaaacacgatgttctgacattgaaggaagaggaaaagaaaaaatattatgataccaaaattgaagacaaggccctgatcttggtagactctttgcgaaagaatcgcgtggctcatcaaatgtttacccaaacacttctcaatatggaccaaaagatcaccagtgtaaaacctcttctgcaaatcgaggctggaccacctgagtcagcagaatctacaaatatactcaaactttgtcctcgtgaagaattcctgagactgtgtaaaaaaaatcatgatgagatctatccaataaaaaagagagaggaccgcagacgcctggctctcatcatatgcaatacaaagtttgatcacctgcctgcaaggaatggggctcactatgacatcgtggggatgaaaaggctgcttcaaggcctgggctacactgtggttgacgaaaagaatctcacagccagggatatggagtcagtgctgagggcatttgctgccagaccagagcacaagtcctctgacagcacgttcttggtactcatgtctcatggcatcctagagggaatctgcggaactgcgcataaaaagaaaaaaccggatgtgctgctttatgacaccatcttccagatattcaacaaccgcaactgcctcagtctaaaggacaaacccaaggtcatcattgtccaggcctgcagaggtgaaaaacatggggaactctgggtcagagactctccagcatccttggcactcatctcttcacagtcatctgagaacctggaggcagattctgtttgcaagatccacgaggagaaggacttcattgctttctgttcttcaacaccacataacgtgtcctggagagaccgcacaaggggctccatcttcattacggaactcatcacatgcttccagaaatattcttgctgctgccacctaatggaaatatttcggaaggtacagaaatcatttgaagttccacaggctaaagcccagatgcccaccatagaacgagcaaccttgacaagagatttctacctctttcctggcaattgaaaatgaaaccacaggcagcccagccctcctctgtcaacatcaaagagcacatttaccagtatagcttgcatagtc

SEQ ID NO: 799 - DNA, 1344 bp, Homo sapiens
  source 1..1344: mol_type = genomic DNA
atggctgctgtgcccagagttgaaggagtctttatatttctgatagaagacagtggcaaaaaaaaaaggcgtaagaattttgaagctatgttcaaaggtatccttcagagtggattggataacttcgtgataaaccacatgctaaagaacaacgtggctggacaaacatctatccagaccctagtacctaatacggatcaaaagtcgaccagtgtaaaaaaagacaaccacaaaaaaaaaacagttaagatgttggaatacctgggcaaagatgttcttcatggtgtttttaattatttggcaaaacacgatgttctgacattgaaggaagaggaaaagaaaaaatattatgataccaaaattgaagacaaggccctgatcttggtagactctttgcgaaagaatcgcgtggctcatcaaatgtttacccaaacacttctcaatatggaccaaaagatcaccagtgtaaaacctcttctgcaaatcgaggctggaccacctgagtcagcagaatctacaaatatactcaaactttgtcctcgtgaagaattcctgagactgtgtaaaaaaaatcatgatgagatctatccaataaaaaagagagaggaccgcagacgcctggctctcatcatatgcaatacaaagtttgatcacctgcctgcaaggaatggggctcactatgacatcgtggggatgaaaaggctgcttcaaggcctgggctacactgtggttgacgaaaagaatctcacagccagggatatggagtcagtgctgagggcatttgctgccagaccagagcacaagtcctctgacagcacgttcttggtactcatgtctcatggcatcctagagggaatctgcggaactgcgcataaaaagaaaaaaccggatgtgctgctttatgacaccatcttccagatattcaacaaccgcaactgcctcagtctaaaggacaaacccaaggtcatcattgtccaggcctgcagaggtgaaaaacatggggaactctgggtcagagactctccagcatccttggcactcatctcttcacagtcatctgagaacctggaggcagattctgtttgcaagatccacgaggagaaggacttcattgctttctgttcttcaacaccacataacgtgtcctggagagaccgcacaaggggctccatcttcattacggaactcatcacatgcttccagaaatattcttgctgctgccacctaatggaaatatttcggaaggtacagaaatcatttgaagttccacaggctaaagcccagatgcccaccatagaacgagcaaccttgacaagagatttctacctctttcctggcaattga

SEQ ID NO: 800 - DNA, 879 bp, Homo sapiens
  source 1..879: mol_type = genomic DNA
atggctgctcttctgcaaatcgaggctggaccacctgagtcagcagaatctacaaatatactcaaactttgtcctcgtgaagaattcctgagactgtgtaaaaaaaatcatgatgagatctatccaataaaaaagagagaggaccgcagacgcctggctctcatcatatgcaatacaaagtttgatcacctgcctgcaaggaatggggctcactatgacatcgtggggatgaaaaggctgcttcaaggcctgggctacactgtggttgacgaaaagaatctcacagccagggatatggagtcagtgctgagggcatttgctgccagaccagagcacaagtcctctgacagcacgttcttggtactcatgtctcatggcatcctagagggaatctgcggaactgcgcataaaaagaaaaaaccggatgtgctgctttatgacaccatcttccagatattcaacaaccgcaactgcctcagtctaaaggacaaacccaaggtcatcattgtccaggcctgcagaggtgaaaaacatggggaactctgggtcagagactctccagcatccttggcactcatctcttcacagtcatctgagaacctggaggcagattctgtttgcaagatccacgaggagaaggacttcattgctttctgttcttcaacaccacataacgtgtcctggagagaccgcacaaggggctccatcttcattacggaactcatcacatgcttccagaaatattcttgctgctgccacctaatggaaatatttcggaaggtacagaaatcatttgaagttccacaggctaaagcccagatgcccaccatagaacgagcaaccttgacaagagatttctacctctttcctggcaattga

SEQ ID NO: 801 - DNA, 1548 bp, Homo sapiens
  source 1..1548: mol_type = genomic DNA
ccgagggcggggccgggcccgggagcctgtggcttcaggaagaggagggcaaggtgtctggctgcgcgtttggctgcaatgagctcggcctcggggctccgcagggggcacccggcaggtggggaagaaaacatgacagaaacagatgccttctataaaagagaaatgtttgatccggcagaaaagtacaaaatggaccacaggaggagaggaattgctttaatcttcaatcatgagaggttcttttggcacttaacactgccagaaaggcggggcacctgcgcagatagagacaatcttacccgcaggttttcagatctaggatttgaagtgaaatgctttaatgatcttaaagcagaagaactactgctcaaaattcatgaggtgtcaactgttagccacgcagatgccgattgctttgtgtgtgtcttcctgagccatggcgaaggcaatcacatttatgcatatgatgctaaaatcgaaattcagacattaactggcttgttcaaaggagacaagtgtcacagcctggttggaaaacccaagatatttatcattcaggcatgtcggggaaaccagcacgatgtgccagtcattcctttggatgtagtagataatcagacagagaagttggacaccaacataactgaggtggatgcagcctccgtttacacgctgcctgctggagctgacttcctcatgtgttactctgttgcagaaggatattattctcaccgggaaactgtgaacggctcatggtacattcaagatttgtgtgagatgttgggaaaatatggctcctccttagagttcacagaactcctcacactggtgaacaggaaagtttctcagcgccgagtggacttttgcaaagacccaagtgcaattggaaagaagcaggttccctgttttgcctcaatgctaactaaaaagctgcatttctttccaaaatctaattaattaatagaggctatctaattttacactctgtattgaaaatggctttctcagccaggcgtggttactcacacctgtaatcccagcactttgggagtccaaggtgggcggatcacctgaggtcgggagttcgagaccagcctgaccaacatggagaagccccgtctctactaaaaatgcaaaaaaaaatttagctaggcatggcggcgcatgcctgcaatcccagctacttggaaggctgaggcaggagaatcacttgaacccaggaggtggaggctgcggtgagccgagattgcgccattgcactccagcctgggcaacgagtgaaactccgtctcaaaaaaaagaaaatgtctttctcttccttttatataaatatcgttagggtgaagcattatggtctaatgattcaaatgttttaaagtttaatgcctagcagagaactgccttaaaaaaaaaaaaaaaaagttcatgttggccatggtgaaagggtttgatatggagaaacaaaatcctcaggaaattagataaataaaaatttataagcatttgtattattttttaataaactgcagggttacacaaaaatct

SEQ ID NO: 802 - DNA, 1340 bp, Homo sapiens
  source 1..1340: mol_type = genomic DNA
tgtctggctgcgcgtttggctgcaatgagctcggcctcggggctccgcagggggcacccggcagtgtcaactgttagccacgcagatgccgattgctttgtgtgtgtcttcctgagccatggcgaaggcaatcacatttatgcatatgatgctaaaatcgaaattcagacattaactggcttgttcaaaggagacaagtgtcacagcctggttggaaaacccaagatatttatcattcaggcatgtcggggaaaccagcacgatgtgccagtcattcctttggatgtagtagataatcagacagagaagttggacaccaacataactgaggtggatgcagcctccgtttacacgctgcctgctggagctgacttcctcatgtgttactctgttgcagaaggatattattctcaccgggaaactgtgaacggctcatggtacattcaagatttgtgtgagatgttgggaaaatatggctcctccttagagttcacagaactcctcacactggtgaacaggaaagtttctcagcgccgagtggacttttgcaaagacccaagtgcaattggaaagaagcaggttccctgttttgcctcaatgctaactaaaaagctgcatttctttccaaaatctaattaattaatagaggctatctaattttacactctgtattgaaaatggctttctcagccaggcgtggttactcacacctgtaatcccagcactttgggagtccaaggtgggcggatcacctgaggtcgggagttcgagaccagcctgaccaacatggagaagccccgtctctactaaaaatgcaaaaaaaaatttagctaggcatggcggcgcatgcctgcaatcccagctacttggaaggctgaggcaggagaatcacttgaacccaggaggtggaggctgcggtgagccgagattgcgccattgcactccagcctgggcaacgagtgaaactccgtctcaaaaaaaagaaaatgtctttctcttccttttatataaatatcgttagggtgaagcattatggtctaatgattcaaatgttttaaagtttaatgcctagcagagaactgccttaaaaaaaaaaaaaaaaagttcatgttggccatggtgaaagggtttgatatggagaaacaaaatcctcaggaaattagataaataaaaatttataagcatttgtattattttttaataaactgcagggttacacaaaaatctagctgatttaacttgtattttgtcacttttttataaaagtttattgtttgatgtttttaaaggtttttgaaatccaggaattaaatcatcccttaataaaatattcgaaattc

SEQ ID NO: 803 - DNA, 2659 bp, Homo sapiens
  source 1..2659: mol_type = genomic DNA
cccgcgcgcgggctcaactttgtagagcgaggggccaacttggcagagcgcgcggccagctttgcagagagcgccctccagggactatgcgtgcggggacacgggtcgctttgggctcttccacccctgcggagcgcactaccccgagccaggggcggtgcaagccccgcccggccctacccagggcggctcctccctccgcagcgccgagacttttagtttcgctttcgctaaaggggccccagacccttgctgcggagcgacggagagagactgtgccagtcccagccgccctaccgccgtgggaacggcaggaagtggcacttggaaaagaacaccagctgcggtggtagcagtgggatttgtgcttcttatgttacccagatggcagatgatcagggctgtattgaagagcagggggttgaggattcagcaaatgaagattcagtggatgctaagccagaccggtcctcgtttgtaccgtccctcttcagtaagaagaagaaaaatgtcaccatgcgatccatcaagaccacccgggaccgagtgcctacatatcagtacaacatgaattttgaaaagctgggcaaatgcatcataataaacaacaagaactttgataaagtgacaggtatgggcgttcgaaacggaacagacaaagatgccgaggcgctcttcaagtgcttccgaagcctgggttttgacgtgattgtctataatgactgctcttgtgccaagatgcaagatctgcttaaaaaagcttctgaagaggaccatacaaatgccgcctgcttcgcctgcatcctcttaagccatggagaagaaaatgtaatttatgggaaagatggtgtcacaccaataaaggatttgacagcccactttaggggggatagatgcaaaacccttttagagaaacccaaactcttcttcattcaggcttgccgagggaccgagcttgatgatggcatccaggccgactcggggcccatcaatgacacagatgctaatcctcgatacaagatcccagtggaagctgacttcctcttcgcctattccacggttccaggctattactcgtggaggagcccaggaagaggctcctggtttgtgcaagccctctgctccatcctggaggagcacggaaaagacctggaaatcatgcagatcctcaccagggtgaatgacagagttgccaggcactttgagtctcagtctgatgacccacacttccatgagaagaagcagatcccctgtgtggtctccatgctcaccaaggaactctacttcagtcaatagccatatcaggggtacattctagctgagaagcaatgggtcactcattaatgaatcacatttttttatgctcttgaaatattcagaaattctccaggattttaatttcaggaaaatgtattgattcaacagggaagaaactttctggtgctgtcttttgttctctgaattttcagagactttttttataatgttattcatttggtgactgtgtaactttctcttaagattaattttctctttgtatgtctgttaccttgttaatagacttaatacatgcaacagaagtgacttctggagaaagctcatggctgtgtccactgcaattggtggtaacagtggtagagtcatgtttgcacttggcaaaaagaatcccaatgtttgacaaaacacagccaaggggatatttactgctctttattgcagaatgtgggtattgagtgtgatttgaatgatttttcattggcttagggcagattttcatgcaaaagttctcatatgagttagaggagaaaaagcttaatgattctgatatgtatccatcaggatccagtctggaaaacagaaaccattctaggtgtttcaacagagggagtttaatacaggaaattgacttacatagatgataaaagagaagccaaacagcaagaagctgttaccacacccagggctatgaggataatgggaagaggtttggtttcctgtgtccagtagtgggatcatccagaggagctggaaccatggtgggggctgcctagtgggagttaggaccaccaatggattgtggaaaatggagccatgacaagaacaaagccactgactgagatggagtgagctgagacagataagagaataccttggtctcacctatcctgccctcacatcttccaccagcaccttactgcccaggcctatctggaagccacctcaccaaggaccttggaagagcaagggacagtgaggcaggagaagaacaagaaatggatgtaagcctggcccataatgtgaacataagtaatcactaatgctcaacaatttatccattcaatcatttattcattgggttgtcagatagtctatgtatgtgtaaaacaatctgttttggctttatgtgcaaaatctgttatagctttaaaatatatctggaactttttagattattccaagccttattttgagtaaatatttgttacttttagttctataagtgaggaagagtttatggcaaagatttttggcactttgttttcaagatggtgttatcttttgaattcttgataaatgactgtttttttctgcctaatagtaactggttaaaaaacaaatgttcatatttattgattaaaaatgtggttgcttaattcct

SEQ ID NO: 804 - DNA, 2421 bp, Homo sapiens
  source 1..2421: mol_type = genomic DNA
gactgtgccagtcccagccgccctaccgccgtgggaacgatgctgtaatggactgtgttggttggcctccaggcaggaagtggcacttggaaaagaacaccagctgcggtggtagcagtgggatttgtgcttcttatgttacccagatggcagatgatcagggctgtattgaagagcagggggttgaggattcagcaaatgaagattcagtggatgctaagccagaccggtcctcgtttgtaccgtccctcttcagtaagaagaagaaaaatgtcaccatgcgatccatcaagaccacccgggaccgagtgcctacatatcagtacaacatgaattttgaaaagctgggcaaatgcatcataataaacaacaagaactttgataaagtgacaggtatgggcgttcgaaacggaacagacaaagatgccgaggcgctcttcaagtgcttccgaagcctgggttttgacgtgattgtctataatgactgctcttgtgccaagatgcaagatctgcttaaaaaagcttctgaagaggaccatacaaatgccgcctgcttcgcctgcatcctcttaagccatggagaagaaaatgtaatttatgggaaagatggtgtcacaccaataaaggatttgacagcccactttaggggggatagatgcaaaacccttttagagaaacccaaactcttcttcattcaggcttgccgagggaccgagcttgatgatggcatccaggccgactcggggcccatcaatgacacagatgctaatcctcgatacaagatcccagtggaagctgacttcctcttcgcctattccacggttccaggctattactcgtggaggagcccaggaagaggctcctggtttgtgcaagccctctgctccatcctggaggagcacggaaaagacctggaaatcatgcagatcctcaccagggtgaatgacagagttgccaggcactttgagtctcagtctgatgacccacacttccatgagaagaagcagatcccctgtgtggtctccatgctcaccaaggaactctacttcagtcaatagccatatcaggggtacattctagctgagaagcaatgggtcactcattaatgaatcacatttttttatgctcttgaaatattcagaaattctccaggattttaatttcaggaaaatgtattgattcaacagggaagaaactttctggtgctgtcttttgttctctgaattttcagagactttttttataatgttattcatttggtgactgtgtaactttctcttaagattaattttctctttgtatgtctgttaccttgttaatagacttaatacatgcaacagaagtgacttctggagaaagctcatggctgtgtccactgcaattggtggtaacagtggtagagtcatgtttgcacttggcaaaaagaatcccaatgtttgacaaaacacagccaaggggatatttactgctctttattgcagaatgtgggtattgagtgtgatttgaatgatttttcattggcttagggcagattttcatgcaaaagttctcatatgagttagaggagaaaaagcttaatgattctgatatgtatccatcaggatccagtctggaaaacagaaaccattctaggtgtttcaacagagggagtttaatacaggaaattgacttacatagatgataaaagagaagccaaacagcaagaagctgttaccacacccagggctatgaggataatgggaagaggtttggtttcctgtgtccagtagtgggatcatccagaggagctggaaccatggtgggggctgcctagtgggagttaggaccaccaatggattgtggaaaatggagccatgacaagaacaaagccactgactgagatggagtgagctgagacagataagagaataccttggtctcacctatcctgccctcacatcttccaccagcaccttactgcccaggcctatctggaagccacctcaccaaggaccttggaagagcaagggacagtgaggcaggagaagaacaagaaatggatgtaagcctggcccataatgtgaacataagtaatcactaatgctcaacaatttatccattcaatcatttattcattgggttgtcagatagtctatgtatgtgtaaaacaatctgttttggctttatgtgcaaaatctgttatagctttaaaatatatctggaactttttagattattccaagccttattttgagtaaatatttgttacttttagttctataagtgaggaagagtttatggcaaagatttttggcactttgttttcaagatggtgttatcttttgaattcttgataaatgactgtttttttctgcctaatagtaactggttaaaaaacaaatgttcatatttattgattaaaaatgtggttgcttaattcct

SEQ ID NO: 805 - DNA, 777 bp, Homo sapiens
  source 1..777: mol_type = genomic DNA
agacccttgctgcggagcgacggagagagactgtgccagtcccagccgccctaccgccgtgggaacgatggcagatgatcagggctgtattgaagagcagggggttgaggattcagcaaatgaagattcagtggatgctaagccagaccggtcctcgtttgtaccgtccctcttcagtaagaagaagaaaaatgtcaccatgcgatccatcaagaccacccgggaccgagtgcctacatatcagtacaacatgaattttgaaaagctgggcaaatgcatcataataaacaacaagaactttgataaagtgacaggtatgggcgttcgaaacggaacagacaaagatgccgaggcgctcttcaagtgcttccgaagcctgggttttgacgtgattgtctataatgactgctctgtcacccaggctggagtgcagcggcgtgatctcggaagactgcaacctccacctcccaggttcaagcaatactcctgcctcagcctcctgagtagctgggattacaggcacgcaccaccacgcctggctaatttttgtatttttagaagagaggggtttcgccatgttggccaggctggtctcaaactcctggcgtcaagtgatccacccacctcaggctcccaaagtgctgggattacaggtgtgagcctccacacccagccacaaattatgaaggtttctttaagacattgcaatacttttatttgctttgcttagtcatttgaaacacattcattcatttatcttttcatcaaattatcatt

SEQ ID NO: 806 - DNA, 2377 bp, Homo sapiens
  source 1..2377: mol_type = genomic DNA
gagacttttagtttcgctttcgctaaaggggccccagacccttgctgcggagcgacggagagagactgtgccagtcccagccgccctaccgccgtgggaacgatggcagatgatcagggctgtattgaagagcagggggttgaggattcagcaaatgaagattcagtggatgctaagccagaccggtcctcgtttgtaccgtccctcttcagtaagaagaagaaaaatgtcaccatgcgatccatcaagaccacccgggaccgagtgcctacatatcagtacaacatgaattttgaaaagctgggcaaatgcatcataataaacaacaagaactttgataaagtgacaggtatgggcgttcgaaacggaacagacaaagatgccgaggcgctcttcaagtgcttccgaagcctgggttttgacgtgattgtctataatgactgctcttgtgccaagatgcaagatctgcttaaaaaagcttctgaagaggaccatacaaatgccgcctgcttcgcctgcatcctcttaagccatggagaagaaaatgtaatttatgggaaagatggtgtcacaccaataaaggatttgacagcccactttaggggggatagatgcaaaacccttttagagaaacccaaactcttcttcattcaggcttgccgagggaccgagcttgatgatggcatccaggccgactcggggcccatcaatgacacagatgctaatcctcgatacaagatcccagtggaagctgacttcctcttcgcctattccacggttccaggctattactcgtggaggagcccaggaagaggctcctggtttgtgcaagccctctgctccatcctggaggagcacggaaaagacctggaaatcatgcagatcctcaccagggtgaatgacagagttgccaggcactttgagtctcagtctgatgacccacacttccatgagaagaagcagatcccctgtgtggtctccatgctcaccaaggaactctacttcagtcaatagccatatcaggggtacattctagctgagaagcaatgggtcactcattaatgaatcacatttttttatgctcttgaaatattcagaaattctccaggattttaatttcaggaaaatgtattgattcaacagggaagaaactttctggtgctgtcttttgttctctgaattttcagagactttttttataatgttattcatttggtgactgtgtaactttctcttaagattaattttctctttgtatgtctgttaccttgttaatagacttaatacatgcaacagaagtgacttctggagaaagctcatggctgtgtccactgcaattggtggtaacagtggtagagtcatgtttgcacttggcaaaaagaatcccaatgtttgacaaaacacagccaaggggatatttactgctctttattgcagaatgtgggtattgagtgtgatttgaatgatttttcattggcttagggcagattttcatgcaaaagttctcatatgagttagaggagaaaaagcttaatgattctgatatgtatccatcaggatccagtctggaaaacagaaaccattctaggtgtttcaacagagggagtttaatacaggaaattgacttacatagatgataaaagagaagccaaacagcaagaagctgttaccacacccagggctatgaggataatgggaagaggtttggtttcctgtgtccagtagtgggatcatccagaggagctggaaccatggtgggggctgcctagtgggagttaggaccaccaatggattgtggaaaatggagccatgacaagaacaaagccactgactgagatggagtgagctgagacagataagagaataccttggtctcacctatcctgccctcacatcttccaccagcaccttactgcccaggcctatctggaagccacctcaccaaggaccttggaagagcaagggacagtgaggcaggagaagaacaagaaatggatgtaagcctggcccataatgtgaacataagtaatcactaatgctcaacaatttatccattcaatcatttattcattgggttgtcagatagtctatgtatgtgtaaaacaatctgttttggctttatgtgcaaaatctgttatagctttaaaatatatctggaactttttagattattccaagccttattttgagtaaatatttgttacttttagttctataagtgaggaagagtttatggcaaagatttttggcactttgttttcaagatggtgttatcttttgaattcttgataaatgactgtttttttctgcctaatagtaactggttaaaaaacaaatgttcatatttattgattaaaaatgtggttgcttaattcct

SEQ ID NO: 807 - DNA, 741 bp, Homo sapiens
  source 1..741: mol_type = genomic DNA
aaaggggccccagacccttgctgcggagcgacggagagagactgtgccagtcccagccgccctaccgccgtgggaacgatggcagatgatcagggctgtattgaagagcagggggttgaggattcagcaaatgaagattcagtggatgctaagccagaccggtcctcgtttgtaccgtccctcttcagtaagaagaagaaaaatgtcaccatgcgatccatcaagaccacccgggaccgagtgcctacatatcagtacaacatgaattttgaaaagctgggcaaatgcatcataataaacaacaagaactttgataaagtgacaggtatgggcgttcgaaacggaacagacaaagatgccgaggcgctcttcaagtgcttccgaagcctgggttttgacgtgattgtctataatgactgctctttcacccaggctggagtgcagcggcgtgatctcggaagactgcaacctccacctcccaggttcaagcaatactcctgcctcagcctcctgagtagctgggattacaggcacgcaccaccacgcctggctaatttttgtatttttagaagagaggggtttcgccatgttggccaggctggtctcaaactcctggcgtcaagtgatccacccacctcaggctcccaaagtgctgggattacaggtgtgagcctccacacccagccacaaattatgaaggtttctttaagacattgcaatacttttatttgctttgcttag

SEQ ID NO: 808 - DNA, 2694 bp, Homo sapiens
  source 1..2694: mol_type = genomic DNA
ctcccgcgcgcgggctcaactttgtagagcgaggggccaacttggcagagcgcgcggccagctttgcagagagcgccctccagggactatgcgtgcggggacacgggtcgctttgggctcttccacccctgcggagcgcactaccccgagccaggggcggtgcaagccccgcccggccctacccagggcggctcctccctccgcagcgccgagacttttagtttcgctttcgctaaaggggccccagacccttgctgcggagcgacggagagagactgtgccagtcccagccgccctaccgccgtgggaacgatgctgtaatggactgtgttggttggcctccaggcaggaagtggcacttggaaaagaacaccagctgcggtggtagcagtgggatttgtgcttcttatgttacccagatggcagatgatcagggctgtattgaagagcagggggttgaggattcagcaaatgaagattcagtggatgctaagccagaccggtcctcgtttgtaccgtccctcttcagtaagaagaagaaaaatgtcaccatgcgatccatcaagaccacccgggaccgagtgcctacatatcagtacaacatgaattttgaaaagctgggcaaatgcatcataataaacaacaagaactttgataaagtgacaggtatgggcgttcgaaacggaacagacaaagatgccgaggcgctcttcaagtgcttccgaagcctgggttttgacgtgattgtctataatgactgctcttgtgccaagatgcaagatctgcttaaaaaagcttctgaagaggaccatacaaatgccgcctgcttcgcctgcatcctcttaagccatggagaagaaaatgtaatttatgggaaagatggtgtcacaccaataaaggatttgacagcccactttaggggggatagatgcaaaacccttttagagaaacccaaactcttcttcattcaggcttgccgagggaccgagcttgatgatggcatccaggccgactcggggcccatcaatgacacagatgctaatcctcgatacaagatcccagtggaagctgacttcctcttcgcctattccacggttccaggctattactcgtggaggagcccaggaagaggctcctggtttgtgcaagccctctgctccatcctggaggagcacggaaaagacctggaaatcatgcagatcctcaccagggtgaatgacagagttgccaggcactttgagtctcagtctgatgacccacacttccatgagaagaagcagatcccctgtgtggtctccatgctcaccaaggaactctacttcagtcaatagccatatcaggggtacattctagctgagaagcaatgggtcactcattaatgaatcacatttttttatgctcttgaaatattcagaaattctccaggattttaatttcaggaaaatgtattgattcaacagggaagaaactttctggtgctgtcttttgttctctgaattttcagagactttttttataatgttattcatttggtgactgtgtaactttctcttaagattaattttctctttgtatgtctgttaccttgttaatagacttaatacatgcaacagaagtgacttctggagaaagctcatggctgtgtccactgcaattggtggtaacagtggtagagtcatgtttgcacttggcaaaaagaatcccaatgtttgacaaaacacagccaaggggatatttactgctctttattgcagaatgtgggtattgagtgtgatttgaatgatttttcattggcttagggcagattttcatgcaaaagttctcatatgagttagaggagaaaaagcttaatgattctgatatgtatccatcaggatccagtctggaaaacagaaaccattctaggtgtttcaacagagggagtttaatacaggaaattgacttacatagatgataaaagagaagccaaacagcaagaagctgttaccacacccagggctatgaggataatgggaagaggtttggtttcctgtgtccagtagtgggatcatccagaggagctggaaccatggtgggggctgcctagtgggagttaggaccaccaatggattgtggaaaatggagccatgacaagaacaaagccactgactgagatggagtgagctgagacagataagagaataccttggtctcacctatcctgccctcacatcttccaccagcaccttactgcccaggcctatctggaagccacctcaccaaggaccttggaagagcaagggacagtgaggcaggagaagaacaagaaatggatgtaagcctggcccataatgtgaacataagtaatcactaatgctcaacaatttatccattcaatcatttattcattgggttgtcagatagtctatgtatgtgtaaaacaatctgttttggctttatgtgcaaaatctgttatagctttaaaatatatctggaactttttagattattccaagccttattttgagtaaatatttgttacttttagttctataagtgaggaagagtttatggcaaagatttttggcactttgttttcaagatggtgttatcttttgaattcttgataaatgactgtttttttctgcctaatagtaactggttaaaaaacaaatgttcatatttattgattaaaaatgtggttgcttaattcct

SEQ ID NO: 809 - DNA, 2387 bp, Homo sapiens
  source 1..2387: mol_type = genomic DNA
gcaagctgggctgctgggtgggtacttccttcaaagctgagggagcgtcctacgcccacgcgcgcaggagggcgccccccgcaaagcaacgtctaggagaccacagtggatgccacagcgggcccgaagcggatcagccttgtgggatggcagatgatcagggctgtattgaagagcagggggttgaggattcagcaaatgaagattcagtggatgctaagccagaccggtcctcgtttgtaccgtccctcttcagtaagaagaagaaaaatgtcaccatgcgatccatcaagaccacccgggaccgagtgcctacatatcagtacaacatgaattttgaaaagctgggcaaatgcatcataataaacaacaagaactttgataaagtgacaggtatgggcgttcgaaacggaacagacaaagatgccgaggcgctcttcaagtgcttccgaagcctgggttttgacgtgattgtctataatgactgctcttgtgccaagatgcaagatctgcttaaaaaagcttctgaagaggaccatacaaatgccgcctgcttcgcctgcatcctcttaagccatggagaagaaaatatggaatcttgctctgtcacccaggctggagtgcagcggcgtgatctcggaagactgcaacctccacctcccaggcttgccgagggaccgagcttgatgatggcatccaggccgactcggggcccatcaatgacacagatgctaatcctcgatacaagatcccagtggaagctgacttcctcttcgcctattccacggttccaggctattactcgtggaggagcccaggaagaggctcctggtttgtgcaagccctctgctccatcctggaggagcacggaaaagacctggaaatcatgcagatcctcaccagggtgaatgacagagttgccaggcactttgagtctcagtctgatgacccacacttccatgagaagaagcagatcccctgtgtggtctccatgctcaccaaggaactctacttcagtcaatagccatatcaggggtacattctagctgagaagcaatgggtcactcattaatgaatcacatttttttatgctcttgaaatattcagaaattctccaggattttaatttcaggaaaatgtattgattcaacagggaagaaactttctggtgctgtcttttgttctctgaattttcagagactttttttataatgttattcatttggtgactgtgtaactttctcttaagattaattttctctttgtatgtctgttaccttgttaatagacttaatacatgcaacagaagtgacttctggagaaagctcatggctgtgtccactgcaattggtggtaacagtggtagagtcatgtttgcacttggcaaaaagaatcccaatgtttgacaaaacacagccaaggggatatttactgctctttattgcagaatgtgggtattgagtgtgatttgaatgatttttcattggcttagggcagattttcatgcaaaagttctcatatgagttagaggagaaaaagcttaatgattctgatatgtatccatcaggatccagtctggaaaacagaaaccattctaggtgtttcaacagagggagtttaatacaggaaattgacttacatagatgataaaagagaagccaaacagcaagaagctgttaccacacccagggctatgaggataatgggaagaggtttggtttcctgtgtccagtagtgggatcatccagaggagctggaaccatggtgggggctgcctagtgggagttaggaccaccaatggattgtggaaaatggagccatgacaagaacaaagccactgactgagatggagtgagctgagacagataagagaataccttggtctcacctatcctgccctcacatcttccaccagcaccttactgcccaggcctatctggaagccacctcaccaaggaccttggaagagcaagggacagtgaggcaggagaagaacaagaaatggatgtaagcctggcccataatgtgaacataagtaatcactaatgctcaacaatttatccattcaatcatttattcattgggttgtcagatagtctatgtatgtgtaaaacaatctgttttggctttatgtgcaaaatctgttatagctttaaaatatatctggaactttttagattattccaagccttattttgagtaaatatttgttacttttagttctataagtgaggaagagtttatggcaaagatttttggcactttgttttcaagatggtgttatcttttgaattcttgataaatgactgtttttttctgcctaatagtaactggttaaaaaacaaatgttcatatttattgattaaaaatgtggttgcttaattcct

SEQ ID NO: 810 - DNA, 834 bp, Homo sapiens
  source 1..834: mol_type = genomic DNA
ccaggagcagcatctccaccagcaagctgggctgctgggtgggtacttccttcaaagctgagggagcgtcctacgcccacgcgcgcaggagggcgccccccgcaaagcaacgtctaggagaccacagtggatgccacagcgggcccgaagcggatcagccttgtgggatggcagatgatcagggctgtattgaagagcagggggttgaggattcagcaaatgaagattcagtggatgctaagccagaccggtcctcgtttgtaccgtccctcttcagtaagaagaagaaaaatgtcaccatgcgatccatcaagaccacccgggaccgagtgcctacatatcagtacaacatgaattttgaaaagctgggcaaatgcatcataataaacaacaagaactttgataaagtgacaggtatgggcgttcgaaacggaacagacaaagatgccgaggcgctcttcaagtgcttccgaagcctgggttttgacgtgattgtctataatgactgctcttgtgccaagatgcaagatctgcttaaaaaagcttctgaagaggaccatacaaatgccgcctgcttcgcctgcatcctcttaagccatggagaagaaaatgtaatttatgggaaagatggtgtcacaccaataaaggatttgacagcccactttaggggggatagatgcaaaacccttttagagaaacccaaactcttcttcattcaggcttgccgagggaccgagcttgatgatggcatccaggccgactcggggcccatcaatgacacagatgctaatcctcgatacaagatcccagtggaagctgacttcctcttcgcct

SEQ ID NO: 811 - DNA, 2229 bp, Homo sapiens
  source 1..2229: mol_type = genomic DNA
aaaggggccccagacccttgctgcggagcgacggagagagactgtgccagtcccagccgccctaccgccgtgggaacgatggcagatgatcagggctgtattgaagagcagggggttgaggattcagcaaatgaagattcagtggatgctaagccagaccggtcctcgtttgtaccgtccctcttcagtaagaagaagaaaaatgtcaccatgcgatccatcaagaccacccgggaccgagtgcctacatatcagtacaacatgaattttgaaaagctgggcaaatgcatcataataaacaacaagaactttgataaagtgacaggtatgggcgttcgaaacggaacagacaaagatgccgaggcgctcttcaagtgcttccgaagcctgggttttgacgtgattgtctataatgactgctcttgtgccaagatgcaagatctgcttaaaaaagcttctgaagaggaccatacaaatgccgcctgcttcgcctgcatcctcttcttcattcaggcttgccgagggaccgagcttgatgatggcatccaggccgactcggggcccatcaatgacacagatgctaatcctcgatacaagatcccagtggaagctgacttcctcttcgcctattccacggttccaggctattactcgtggaggagcccaggaagaggctcctggtttgtgcaagccctctgctccatcctggaggagcacggaaaagacctggaaatcatgcagatcctcaccagggtgaatgacagagttgccaggcactttgagtctcagtctgatgacccacacttccatgagaagaagcagatcccctgtgtggtctccatgctcaccaaggaactctacttcagtcaatagccatatcaggggtacattctagctgagaagcaatgggtcactcattaatgaatcacatttttttatgctcttgaaatattcagaaattctccaggattttaatttcaggaaaatgtattgattcaacagggaagaaactttctggtgctgtcttttgttctctgaattttcagagactttttttataatgttattcatttggtgactgtgtaactttctcttaagattaattttctctttgtatgtctgttaccttgttaatagacttaatacatgcaacagaagtgacttctggagaaagctcatggctgtgtccactgcaattggtggtaacagtggtagagtcatgtttgcacttggcaaaaagaatcccaatgtttgacaaaacacagccaaggggatatttactgctctttattgcagaatgtgggtattgagtgtgatttgaatgatttttcattggcttagggcagattttcatgcaaaagttctcatatgagttagaggagaaaaagcttaatgattctgatatgtatccatcaggatccagtctggaaaacagaaaccattctaggtgtttcaacagagggagtttaatacaggaaattgacttacatagatgataaaagagaagccaaacagcaagaagctgttaccacacccagggctatgaggataatgggaagaggtttggtttcctgtgtccagtagtgggatcatccagaggagctggaaccatggtgggggctgcctagtgggagttaggaccaccaatggattgtggaaaatggagccatgacaagaacaaagccactgactgagatggagtgagctgagacagataagagaataccttggtctcacctatcctgccctcacatcttccaccagcaccttactgcccaggcctatctggaagccacctcaccaaggaccttggaagagcaagggacagtgaggcaggagaagaacaagaaatggatgtaagcctggcccataatgtgaacataagtaatcactaatgctcaacaatttatccattcaatcatttattcattgggttgtcagatagtctatgtatgtgtaaaacaatctgttttggctttatgtgcaaaatctgttatagctttaaaatatatctggaactttttagattattccaagccttattttgagtaaatatttgttacttttagttctataagtgaggaagagtttatggcaaagatttttggcactttgttttcaagatggtgttatcttttgaattcttgataaatgactgtttttttctgcctaatagtaactggttaaaaaacaaatgttcatatttattgattaaaaatgtggttgctt

SEQ ID NO: 812 - DNA, 1148 bp, Homo sapiens
  source 1..1148: mol_type = genomic DNA
tgtcgtcgcagagcacagcctagttctgatgcagaggggactgttttcagatggagacactagtaagaagaagaaaaatgtcaccatgcgatccatcaagaccacccgggaccgagtgcctacatatcagtacaacatgaattttgaaaagctgggcaaatgcatcataataaacaacaagaactttgataaagtgacaggtatgggcgttcgaaacggaacagacaaagatgccgaggcgctcttcaagtgcttccgaagcctgggttttgacgtgattgtctataatgactgctcttgtgccaagatgcaagatctgcttaaaaaagcttctgaagaggaccatacaaatgccgcctgcttcgcctgcatcctcttaagccatggagaagaaaatgtaatttatgggaaagatggtgtcacaccaataaaggatttgacagcccactttaggggggatagatgcaaaacccttttagagaaacccaaactcttcttcattcaggcttgccgagggaccgagcttgatgatggcatccaggccgactcggggcccatcaatgacacagatgctaatcctcgatacaagatcccagtggaagctgacttcctcttcgcctattccacggttccaggctattactcgtggaggagcccaggaagaggctcctggtttgtgcaagccctctgctccatcctggaggagcacggaaaagacctggaaatcatgcagatcctcaccagggtgaatgacagagttgccaggcactttgagtctcagtctgatgacccacacttccatgagaagaagcagatcccctgtgtggtctccatgctcaccaaggaactctacttcagtcaatagccatatcaggggtacattctagctgagaagcaatgggtcactcattaatgaatcacatttttttatgctcttgaaatattcagaaattctccaggattttaatttcaggaaaatgtattgattcaacagggaagaaactttctggtgctgtcttttgttctctgaattttcagagactttttttataatgttattcatttggtgactgtgtaactttctcttaagattaattttctctttgtatgtctgttaccttgttaatagacttaatacatgcaacaga

SEQ ID NO: 813 - DNA, 2540 bp, Homo sapiens
  source 1..2540: mol_type = genomic DNA
gtgctctgagtttttggtttctgtttcaccttgtgtctgagctggtctgaaggctggttgttcagactgagcttcctgcctgcctgtaccccgccaacagcttcagaagaaggagcagcccctgggtgcgtccactttctgggcacgtgaggttgggccttggccgcctgagcccttgagttggtcacttgaaccttgggaatattgagattatattctcctgccttttaaaaagatggacttcagcagaaatctttatgatattggggaacaactggacagtgaagatctggcctccctcaagttcctgagcctggactacattccgcaaaggaagcaagaacccatcaaggatgccttgatgttattccagagactccaggaaaagagaatgttggaggaaagcaatctgtccttcctgaaggagctgctcttccgaattaatagactggatttgctgattacctacctaaacactagaaaggaggagatggaaagggaacttcagacaccaggcagggctcaaatttctgcctacagggtcatgctctatcagatttcagaagaagtgagcagatcagaattgaggtcttttaagtttcttttgcaagaggaaatctccaaatgcaaactggatgatgacatgaacctgctggatattttcatagagatggagaagagggtcatcctgggagaaggaaagttggacatcctgaaaagagtctgtgcccaaatcaacaagagcctgctgaagataatcaacgactatgaagaattcagcaaaggggctttgaccacgacctttgaagagcttcattttgagatcaagccccacgatgactgcacagtagagcaaatctatgagattttgaaaatctaccaactcatggaccacagtaacatggactgcttcatctgctgtatcctctcccatggagacaagggcatcatctatggcactgatggacaggaggcccccatctatgagctgacatctcagttcactggtttgaagtgcccttcccttgctggaaaacccaaagtgttttttattcaggcttgtcagggggataactaccagaaaggtatacctgttgagactgattcagaggagcaaccctatttagaaatggatttatcatcacctcaaacgagatatatcccggatgaggctgactttctgctggggatggccactgtgaataactgtgtttcctaccgaaaccctgcagagggaacctggtacatccagtcactttgccagagcctgagagagcgatgtcctcgaggcgatgatattctcaccatcctgactgaagtgaactatgaagtaagcaacaaggatgacaagaaaaacatggggaaacagatgcctcagcctactttcacactaagaaaaaaacttgtcttcccttctgattgatggtgctattttgtttgttttgttttgttttgtttttttgagacagaatctcgctctgtcgcccaggctggagtgcagtggcgtgatctcggctcaccgcaagctccgcctcccgggttcaggccattctcctgcctcagcctcccgagtagctgggactacaggggcccgccaccacacctggctaattttttaaaaatatttttagtagagacagggtttcactgtgttagccagggtggtcttgatctcctgacctcgtgatccacccacctcggcctcccaaagtgctgggattacaggcgtgagccaccgcgcctggccgatggtactatttagatataacactatgtttatttactaattttctagattttctactttattaattgttttgcacttttttataagagctaaagttaaataggatattaacaacaataacactgtctcctttctcttatgcttaaggctttgggaatgtttttagctggtggcaataaataccagacacgtacaaaatccagctatgaatatagagggcttatgattcagattgttatctatcaactataagcccactgttaatattctattaactttaattctctttcaaagctaaattccacactaccacattaaaaaaattagaaagtagccacgtatggtggctcatgtctataatcccagcactttgggaggttgaggtgggaggattgcttgaacccaagaggtcaaggctgcagtgagccatgttcacaccgctgcactcaagcttgggtgacagaacaagaccccgtctcaaaaaaaattttttttttaataaaacaaaatttgtttgaaatcttttaaaaattcaaatgatttttacaagttttaaataagctctccccaaacttgctttatgccttcttattgcttttatgatatatatatgcttggctaactatatttgctttttgctaacaatgctctggggtctttttatgcatttgcatttgctctttcatctctgcttggattattttaaatcattaggaattaagttatctttaaaatttaagtatcttttttcaaaaacattttttaatagaataaaatataatttgatcttatt

SEQ ID NO: 814 - DNA, 1906 bp, Homo sapiens
  source 1..1906: mol_type = genomic DNA
tttcaccttgtgtctgagctggtctgaaggctggttgttcagactgagcttcctgcctgcctgtaccccgccaacagcttcagaagaaggtgactggtggctgcctgaggaataccagtgggcaagagaattagcatttctggagcatctgctgtctgagcagcccctgggtgcgtccactttctgggcacgtgaggttgggccttggccgcctgagcccttgagttggtcacttgaaccttgggaatattgagattatattctcctgccttttaaaaagatggacttcagcagaaatctttatgatattggggaacaactggacagtgaagatctggcctccctcaagttcctgagcctggactacattccgcaaaggaagcaagaacccatcaaggatgccttgatgttattccagagactccaggaaaagagaatgttggaggaaagcaatctgtccttcctgaaggagctgctcttccgaattaatagactggatttgctgattacctacctaaacactagaaaggaggagatggaaagggaacttcagacaccaggcagggctcaaatttctgcctacaggttccacttctgccgcatgagctgggctgaagcaaacagccagtgccagacacagtctgtacctttctggcggagggtcgatcatctattaataagggtcatgctctatcagatttcagaagaagtgagcagatcagaattgaggtcttttaagtttcttttgcaagaggaaatctccaaatgcaaactggatgatgacatgaacctgctggatattttcatagagatggagaagagggtcatcctgggagaaggaaagttggacatcctgaaaagagtctgtgcccaaatcaacaagagcctgctgaagataatcaacgactatgaagaattcagcaaaggggaggagttgtgtggggtaatgacaatctcggactctccaagagaacaggatagtgaatcacagactttggacaaagtttaccaaatgaaaagcaaacctcggggatactgtctgatcatcaacaatcacaattttgcaaaagcacgggagaaagtgcccaaacttcacagcattagggacaggaatggaacacacttggatgcaggggctttgaccacgacctttgaagagcttcattttgagatcaagccccacgatgactgcacagtagagcaaatctatgagattttgaaaatctaccaactcatggaccacagtaacatggactgcttcatctgctgtatcctctcccatggagacaagggcatcatctatggcactgatggacaggaggcccccatctatgagctgacatctcagttcactggtttgaagtgcccttcccttgctggaaaacccaaagtgttttttattcaggcttgtcagggggataactaccagaaaggtatacctgttgagactgattcagaggagcaaccctatttagaaatggatttatcatcacctcaaacgagatatatcccggatgaggctgactttctgctggggatggccactgtgaataactgtgtttcctaccgaaaccctgcagagggaacctggtacatccagtcactttgccagagcctgagagagcgatgtcctcgaggcgatgatattctcaccatcctgactgaagtgaactatgaagtaagcaacaaggatgacaagaaaaacatggggaaacagatgcctcagcctactttcacactaagaaaaaaacttgtcttcccttctgattgatggtgctattttgtttgttttgttttgttttgtttttttgagacagaatctcgctctgtcgcccaggctggagtgcagtggcgtgatctcggctcaccgcaagctccgcctcccgggttcaggccattctcctgc

SEQ ID NO: 815 - DNA, 2650 bp, Homo sapiens
  source 1..2650: mol_type = genomic DNA
gtagagctggctggctgtgcccttccgtccttcattagacgtttgctcttgtcttagatgctcagatggtagtggataggcctgtgacgaaggtgctaccatcgtgagagtaagattatattctcctgccttttaaaaagatggacttcagcagaaatctttatgatattggggaacaactggacagtgaagatctggcctccctcaagttcctgagcctggactacattccgcaaaggaagcaagaacccatcaaggatgccttgatgttattccagagactccaggaaaagagaatgttggaggaaagcaatctgtccttcctgaaggagctgctcttccgaattaatagactggatttgctgattacctacctaaacactagaaaggaggagatggaaagggaacttcagacaccaggcagggctcaaatttctgcctacagggtcatgctctatcagatttcagaagaagtgagcagatcagaattgaggtcttttaagtttcttttgcaagaggaaatctccaaatgcaaactggatgatgacatgaacctgctggatattttcatagagatggagaagagggtcatcctgggagaaggaaagttggacatcctgaaaagagtctgtgcccaaatcaacaagagcctgctgaagataatcaacgactatgaagaattcagcaaaggggaggagttgtgtggggtaatgacaatctcggactctccaagagaacaggatagtgaatcacagactttggacaaagtttaccaaatgaaaagcaaacctcggggatactgtctgatcatcaacaatcacaattttgcaaaagcacgggagaaagtgcccaaacttcacagcattagggacaggaatggaacacacttggatgcaggggctttgaccacgacctttgaagagcttcattttgagatcaagccccacgatgactgcacagtagagcaaatctatgagattttgaaaatctaccaactcatggaccacagtaacatggactgcttcatctgctgtatcctctcccatggagacaagggcatcatctatggcactgatggacaggaggcccccatctatgagctgacatctcagttcactggtttgaagtgcccttcccttgctggaaaacccaaagtgttttttattcaggcttgtcagggggataactaccagaaaggtatacctgttgagactgattcagaggagcaaccctatttagaaatggatttatcatcacctcaaacgagatatatcccggatgaggctgactttctgctggggatggccactgtgaataactgtgtttcctaccgaaaccctgcagagggaacctggtacatccagtcactttgccagagcctgagagagcgatgtcctcgaggcgatgatattctcaccatcctgactgaagtgaactatgaagtaagcaacaaggatgacaagaaaaacatggggaaacagatgcctcagcctactttcacactaagaaaaaaacttgtcttcccttctgattgatggtgctattttgtttgttttgttttgttttgtttttttgagacagaatctcgctctgtcgcccaggctggagtgcagtggcgtgatctcggctcaccgcaagctccgcctcccgggttcaggccattctcctgcctcagcctcccgagtagctgggactacaggggcccgccaccacacctggctaattttttaaaaatatttttagtagagacagggtttcactgtgttagccagggtggtcttgatctcctgacctcgtgatccacccacctcggcctcccaaagtgctgggattacaggcgtgagccaccgcgcctggccgatggtactatttagatataacactatgtttatttactaattttctagattttctactttattaattgttttgcacttttttataagagctaaagttaaataggatattaacaacaataacactgtctcctttctcttatgcttaaggctttgggaatgtttttagctggtggcaataaataccagacacgtacaaaatccagctatgaatatagagggcttatgattcagattgttatctatcaactataagcccactgttaatattctattaactttaattctctttcaaagctaaattccacactaccacattaaaaaaattagaaagtagccacgtatggtggctcatgtctataatcccagcactttgggaggttgaggtgggaggattgcttgaacccaagaggtcaaggctgcagtgagccatgttcacaccgctgcactcaagcttgggtgacagaacaagaccccgtctcaaaaaaaattttttttttaataaaacaaaatttgtttgaaatcttttaaaaattcaaatgatttttacaagttttaaataagctctccccaaacttgctttatgccttcttattgcttttatgatatatatatgcttggctaactatatttgctttttgctaacaatgctctggggtctttttatgcatttgcatttgctctttcatctctgcttggattattttaaatcattaggaattaagttatctttaaaatttaagtatcttttttcaaaaacattttttaatagaataaaatataatttgatctta

SEQ ID NO: 816 - DNA, 2930 bp, Homo sapiens
  source 1..2930: mol_type = genomic DNA
agtcatctctgttctgctttaggagtaaagtttaccctgcagttccttctgtggtgaagttttctctttctctcggagaccagattctgcctttctgctggagggaagtgttttcacaggttctcctccttttatcttttgtgttttttttcaagccctgctgaatttgctagtcaactcaacaggaagtgaggccatggagggaggcagaagagccagggtggttattgaaagtaaaagaaacttcttcctgggagcctttcccacccccttccctgctgagcacgtggagttaggcaggttaggggactcggagactgcgatggtgccaggaaagggtggagcggattatattctcctgccttttaaaaagatggacttcagcagaaatctttatgatattggggaacaactggacagtgaagatctggcctccctcaagttcctgagcctggactacattccgcaaaggaagcaagaacccatcaaggatgccttgatgttattccagagactccaggaaaagagaatgttggaggaaagcaatctgtccttcctgaaggagctgctcttccgaattaatagactggatttgctgattacctacctaaacactagaaaggaggagatggaaagggaacttcagacaccaggcagggctcaaatttctgcctacagggtcatgctctatcagatttcagaagaagtgagcagatcagaattgaggtcttttaagtttcttttgcaagaggaaatctccaaatgcaaactggatgatgacatgaacctgctggatattttcatagagatggagaagagggtcatcctgggagaaggaaagttggacatcctgaaaagagtctgtgcccaaatcaacaagagcctgctgaagataatcaacgactatgaagaattcagcaaagagagaagcagcagccttgaaggaagtcctgatgaattttcaaatggggaggagttgtgtggggtaatgacaatctcggactctccaagagaacaggatagtgaatcacagactttggacaaagtttaccaaatgaaaagcaaacctcggggatactgtctgatcatcaacaatcacaattttgcaaaagcacgggagaaagtgcccaaacttcacagcattagggacaggaatggaacacacttggatgcaggggctttgaccacgacctttgaagagcttcattttgagatcaagccccacgatgactgcacagtagagcaaatctatgagattttgaaaatctaccaactcatggaccacagtaacatggactgcttcatctgctgtatcctctcccatggagacaagggcatcatctatggcactgatggacaggaggcccccatctatgagctgacatctcagttcactggtttgaagtgcccttcccttgctggaaaacccaaagtgttttttattcaggcttgtcagggggataactaccagaaaggtatacctgttgagactgattcagaggagcaaccctatttagaaatggatttatcatcacctcaaacgagatatatcccggatgaggctgactttctgctggggatggccactgtgaataactgtgtttcctaccgaaaccctgcagagggaacctggtacatccagtcactttgccagagcctgagagagcgatgtcctcgaggcgatgatattctcaccatcctgactgaagtgaactatgaagtaagcaacaaggatgacaagaaaaacatggggaaacagatgcctcagcctactttcacactaagaaaaaaacttgtcttcccttctgattgatggtgctattttgtttgttttgttttgttttgtttttttgagacagaatctcgctctgtcgcccaggctggagtgcagtggcgtgatctcggctcaccgcaagctccgcctcccgggttcaggccattctcctgcctcagcctcccgagtagctgggactacaggggcccgccaccacacctggctaattttttaaaaatatttttagtagagacagggtttcactgtgttagccagggtggtcttgatctcctgacctcgtgatccacccacctcggcctcccaaagtgctgggattacaggcgtgagccaccgcgcctggccgatggtactatttagatataacactatgtttatttactaattttctagattttctactttattaattgttttgcacttttttataagagctaaagttaaataggatattaacaacaataacactgtctcctttctcttatgcttaaggctttgggaatgtttttagctggtggcaataaataccagacacgtacaaaatccagctatgaatatagagggcttatgattcagattgttatctatcaactataagcccactgttaatattctattaactttaattctctttcaaagctaaattccacactaccacattaaaaaaattagaaagtagccacgtatggtggctcatgtctataatcccagcactttgggaggttgaggtgggaggattgcttgaacccaagaggtcaaggctgcagtgagccatgttcacaccgctgcactcaagcttgggtgacagaacaagaccccgtctcaaaaaaaattttttttttaataaaacaaaatttgtttgaaatcttttaaaaattcaaatgatttttacaagttttaaataagctctccccaaacttgctttatgccttcttattgcttttatgatatatatatgcttggctaactatatttgctttttgctaacaatgctctggggtctttttatgcatttgcatttgctctttcatctctgcttggattattttaaatcattaggaattaagttatctttaaaatttaagtatcttttttcaaaaacattttttaatagaataaaatataatttgatcttatt

SEQ ID NO: 817 - DNA, 1060 bp, Homo sapiens
  source 1..1060: mol_type = genomic DNA
agactgagcttcctgcctgcctgtaccccgccaacagcttcagaagaaggtgactggtggctgcctgaggaataccagtgggcaagagaattagcatttctggagcatctgctgtctgagcagcccctgggtgcgtccactttctgggcacgtgaggttgggccttggccgcctgagcccttgagttggtcacttgaaccttgggaatattgagattatattctcctgccttttaaaaagatggacttcagcagaaatctttatgatattggggaacaactggacagtgaagatctggcctccctcaagttcctgagcctggactacattccgcaaaggaagcaagaacccatcaaggatgccttgatgttattccagagactccaggaaaagagaatgttggaggaaagcaatctgtccttcctgaaggagctgctcttccgaattaatagactggatttgctgattacctacctaaacactagaaaggaggagatggaaagggaacttcagacaccaggcagggctcaaatttctgcctacagggtcatgctctatcagatttcagaagaagtgagcagatcagaattgaggtcttttaagtttcttttgcaagaggaaatctccaaatgcaaactggatgatgacatgaacctgctggatattttcatagagatggagaagagggtcatcctgggagaaggaaagttggacatcctgaaaagagtctgtgcccaaatcaacaagagcctgctgaagataatcaacgactatgaagaattcagcaaagagagaagcagcagccttgaaggaagtcctgatgaattttcaaatgactttggacaaagtttaccaaatgaaaagcaaacctcggggatactgtctgatcatcaacaatcacaattttgcaaaagcacgggagaaagtgcccaaacttcacagcattagggacaggaatggaacacacttggatgcagggtttgagaatgtttttagctggtggcaataaatattagaagcctgcagaatccagctacgaatatagagggttttgctcttg

SEQ ID NO: 818 - DNA, 2727 bp, Homo sapiens
  source 1..2727: mol_type = genomic DNA
gtgctctgagtttttggtttctgtttcaccttgtgtctgagctggtctgaaggctggttgttcagactgagcttcctgcctgcctgtaccccgccaacagcttcagaagaaggagcagcccctgggtgcgtccactttctgggcacgtgaggttgggccttggccgcctgagcccttgagttggtcacttgaaccttgggaatattgagattatattctcctgccttttaaaaagatggacttcagcagaaatctttatgatattggggaacaactggacagtgaagatctggcctccctcaagttcctgagcctggactacattccgcaaaggaagcaagaacccatcaaggatgccttgatgttattccagagactccaggaaaagagaatgttggaggaaagcaatctgtccttcctgaaggagctgctcttccgaattaatagactggatttgctgattacctacctaaacactagaaaggaggagatggaaagggaacttcagacaccaggcagggctcaaatttctgcctacagggtcatgctctatcagatttcagaagaagtgagcagatcagaattgaggtcttttaagtttcttttgcaagaggaaatctccaaatgcaaactggatgatgacatgaacctgctggatattttcatagagatggagaagagggtcatcctgggagaaggaaagttggacatcctgaaaagagtctgtgcccaaatcaacaagagcctgctgaagataatcaacgactatgaagaattcagcaaagagagaagcagcagccttgaaggaagtcctgatgaattttcaaatgactttggacaaagtttaccaaatgaaaagcaaacctcggggatactgtctgatcatcaacaatcacaattttgcaaaagcacgggagaaagtgcccaaacttcacagcattagggacaggaatggaacacacttggatgcaggggctttgaccacgacctttgaagagcttcattttgagatcaagccccacgatgactgcacagtagagcaaatctatgagattttgaaaatctaccaactcatggaccacagtaacatggactgcttcatctgctgtatcctctcccatggagacaagggcatcatctatggcactgatggacaggaggcccccatctatgagctgacatctcagttcactggtttgaagtgcccttcccttgctggaaaacccaaagtgttttttattcaggcttgtcagggggataactaccagaaaggtatacctgttgagactgattcagaggagcaaccctatttagaaatggatttatcatcacctcaaacgagatatatcccggatgaggctgactttctgctggggatggccactgtgaataactgtgtttcctaccgaaaccctgcagagggaacctggtacatccagtcactttgccagagcctgagagagcgatgtcctcgaggcgatgatattctcaccatcctgactgaagtgaactatgaagtaagcaacaaggatgacaagaaaaacatggggaaacagatgcctcagcctactttcacactaagaaaaaaacttgtcttcccttctgattgatggtgctattttgtttgttttgttttgttttgtttttttgagacagaatctcgctctgtcgcccaggctggagtgcagtggcgtgatctcggctcaccgcaagctccgcctcccgggttcaggccattctcctgcctcagcctcccgagtagctgggactacaggggcccgccaccacacctggctaattttttaaaaatatttttagtagagacagggtttcactgtgttagccagggtggtcttgatctcctgacctcgtgatccacccacctcggcctcccaaagtgctgggattacaggcgtgagccaccgcgcctggccgatggtactatttagatataacactatgtttatttactaattttctagattttctactttattaattgttttgcacttttttataagagctaaagttaaataggatattaacaacaataacactgtctcctttctcttatgcttaaggctttgggaatgtttttagctggtggcaataaataccagacacgtacaaaatccagctatgaatatagagggcttatgattcagattgttatctatcaactataagcccactgttaatattctattaactttaattctctttcaaagctaaattccacactaccacattaaaaaaattagaaagtagccacgtatggtggctcatgtctataatcccagcactttgggaggttgaggtgggaggattgcttgaacccaagaggtcaaggctgcagtgagccatgttcacaccgctgcactcaagcttgggtgacagaacaagaccccgtctcaaaaaaaattttttttttaataaaacaaaatttgtttgaaatcttttaaaaattcaaatgatttttacaagttttaaataagctctccccaaacttgctttatgccttcttattgcttttatgatatatatatgcttggctaactatatttgctttttgctaacaatgctctggggtctttttatgcatttgcatttgctctttcatctctgcttggattattttaaatcattaggaattaagttatctttaaaatttaagtatcttttttcaaaaacattttttaatagaataaaatataatttgatcttatt

SEQ ID NO: 819 - DNA, 1283 bp, Homo sapiens
  source 1..1283: mol_type = genomic DNA
gaagttttctctttctctcggagaccagattctgcctttctgctggagggaagtgttttcacagattatattctcctgccttttaaaaagatggacttcagcagaaatctttatgatattggggaacaactggacagtgaagatctggcctccctcaagttcctgagcctggactacattccgcaaaggaagcaagaacccatcaaggatgccttgatgttattccagagactccaggaaaagagaatgttggaggaaagcaatctgtccttcctgaaggagctgctcttccgaattaatagactggatttgctgattacctacctaaacactagaaaggaggagatggaaagggaacttcagacaccaggcagggctcaaatttctgcctacagggtcatgctctatcagatttcagaagaagtgagcagatcagaattgaggtcttttaagtttcttttgcaagaggaaatctccaaatgcaaactggatgatgacatgaacctgctggatattttcatagagatggagaagagggtcatcctgggagaaggaaagttggacatcctgaaaagagtctgtgcccaaatcaacaagagcctgctgaagataatcaacgactatgaagaattcagcaaaggggaggagttgtgtggggtaatgacaatctcggactctccaagagaacaggatagtgaatcacagactttggacaaagtttaccaaatgaaaagcaaacctcggggatactgtctgatcatcaacaatcacaattttgcaaaagcacgggagaaagtgcccaaacttcacagcattagggacaggaatggaacacacttggatgcagggtctcactctgttgcccaggctggagtgcagtggtgtgatctcagctcactgcagcctccacctccctggttcaagtgattctcctgcctcagcctcccaagtagctgggactacaggcacacaccaccacacatggctaatttttgtatttttagtagagatggggttttgccatattggccaggctggtcttgaactcctgacctcaagtgatccgcctgcctcggcctcccaaagtgctggaattacaggtgtcagccacctgtacctggtccctgctaacatttgatttgtttatttaagcaaatctaagcctttaaaaaggcacagagattaagtccattgattacatcattcgtcactatgcgcttggtattgaaaaaaatattttggacccttgatttgtattcttttaaaattaaaacatttctatt

SEQ ID NO: 820 - DNA, 1627 bp, Homo sapiens
  source 1..1627: mol_type = genomic DNA
gtgctctgagtttttggtttctgtttcaccttgtgtctgagctggtctgaaggctggttgttcagactgagcttcctgcctgcctgtaccccgccaacagcttcagaagaaggagcagcccctgggtgcgtccactttctgggcacgtgaggttgggccttggccgcctgagcccttgagttggtcacttgaaccttgggaatattgagattatattctcctgccttttaaaaagatggacttcagcagaaatctttatgatattggggaacaactggacagtgaagatctggcctccctcaagttcctgagcctggactacattccgcaaaggaagcaagaacccatcaaggatgccttgatgttattccagagactccaggaaaagagaatgttggaggaaagcaatctgtccttcctgaaggagctgctcttccgaattaatagactggatttgctgattacctacctaaacactagaaaggaggagatggaaagggaacttcagacaccaggcagggctcaaatttctgcctacagggtcatgctctatcagatttcagaagaagtgagcagatcagaattgaggtcttttaagtttcttttgcaagaggaaatctccaaatgcaaactggatgatgacatgaacctgctggatattttcatagagatggagaagagggtcatcctgggagaaggaaagttggacatcctgaaaagagtctgtgcccaaatcaacaagagcctgctgaagataatcaacgactatgaagaattcagcaaaggggaggagttgtgtggggtaatgacaatctcggactctccaagagaacaggatagtgaatcacagactttggacaaagtttaccaaatgaaaagcaaacctcggggatactgtctgatcatcaacaatcacaattttgcaaaagcacgggagaaagtgcccaaacttcacagcattagggacaggaatggaacacacttggatgcaggggctttgaccacgacctttgaagagcttcattttgagatcaagccccacgatgactgcacagtagagcaaatctatgagattttgaaaatctaccaactcatggaccacagtaacatggactgcttcatctgctgtatcctctcccatggagacaagggcatcatctatggcactgatggacaggaggcccccatctatgagctgacatctcagttcactggtttgaagtgcccttcccttgctggaaaacccaaagtgttttttattcaggcttgtcagggggataactaccagaaaggtatacctgttgagactgattcagaggagcaaccctatttagaaatggatttatcatcacctcaaacgagatatatcccggatgaggctgactttctgctggggatggccactgtgaataactgtgtttcctaccgaaaccctgcagagggaacctggtacatccagtcactttgccagagcctgagagagcgatgtcctcgaggcgatgatattctcaccatcctgactgaagtgaactatgaagtaagcaacaaggatgacaagaaaaacatggggaaacagatgcctcagcctactttcacactaagaaaaaaacttgtcttcccttctgat

SEQ ID NO: 821 - DNA, 2682 bp, Homo sapiens
  source 1..2682: mol_type = genomic DNA
gtgctctgagtttttggtttctgtttcaccttgtgtctgagctggtctgaaggctggttgttcagactgagcttcctgcctgcctgtaccccgccaacagcttcagaagaaggagcagcccctgggtgcgtccactttctgggcacgtgaggttgggccttggccgcctgagcccttgagttggtcacttgaaccttgggaatattgagattatattctcctgccttttaaaaagatggacttcagcagaaatctttatgatattggggaacaactggacagtgaagatctggcctccctcaagttcctgagcctggactacattccgcaaaggaagcaagaacccatcaaggatgccttgatgttattccagagactccaggaaaagagaatgttggaggaaagcaatctgtccttcctgaaggagctgctcttccgaattaatagactggatttgctgattacctacctaaacactagaaaggaggagatggaaagggaacttcagacaccaggcagggctcaaatttctgcctacagggtcatgctctatcagatttcagaagaagtgagcagatcagaattgaggtcttttaagtttcttttgcaagaggaaatctccaaatgcaaactggatgatgacatgaacctgctggatattttcatagagatggagaagagggtcatcctgggagaaggaaagttggacatcctgaaaagagtctgtgcccaaatcaacaagagcctgctgaagataatcaacgactatgaagaattcagcaaagactttggacaaagtttaccaaatgaaaagcaaacctcggggatactgtctgatcatcaacaatcacaattttgcaaaagcacgggagaaagtgcccaaacttcacagcattagggacaggaatggaacacacttggatgcaggggctttgaccacgacctttgaagagcttcattttgagatcaagccccacgatgactgcacagtagagcaaatctatgagattttgaaaatctaccaactcatggaccacagtaacatggactgcttcatctgctgtatcctctcccatggagacaagggcatcatctatggcactgatggacaggaggcccccatctatgagctgacatctcagttcactggtttgaagtgcccttcccttgctggaaaacccaaagtgttttttattcaggcttgtcagggggataactaccagaaaggtatacctgttgagactgattcagaggagcaaccctatttagaaatggatttatcatcacctcaaacgagatatatcccggatgaggctgactttctgctggggatggccactgtgaataactgtgtttcctaccgaaaccctgcagagggaacctggtacatccagtcactttgccagagcctgagagagcgatgtcctcgaggcgatgatattctcaccatcctgactgaagtgaactatgaagtaagcaacaaggatgacaagaaaaacatggggaaacagatgcctcagcctactttcacactaagaaaaaaacttgtcttcccttctgattgatggtgctattttgtttgttttgttttgttttgtttttttgagacagaatctcgctctgtcgcccaggctggagtgcagtggcgtgatctcggctcaccgcaagctccgcctcccgggttcaggccattctcctgcctcagcctcccgagtagctgggactacaggggcccgccaccacacctggctaattttttaaaaatatttttagtagagacagggtttcactgtgttagccagggtggtcttgatctcctgacctcgtgatccacccacctcggcctcccaaagtgctgggattacaggcgtgagccaccgcgcctggccgatggtactatttagatataacactatgtttatttactaattttctagattttctactttattaattgttttgcacttttttataagagctaaagttaaataggatattaacaacaataacactgtctcctttctcttatgcttaaggctttgggaatgtttttagctggtggcaataaataccagacacgtacaaaatccagctatgaatatagagggcttatgattcagattgttatctatcaactataagcccactgttaatattctattaactttaattctctttcaaagctaaattccacactaccacattaaaaaaattagaaagtagccacgtatggtggctcatgtctataatcccagcactttgggaggttgaggtgggaggattgcttgaacccaagaggtcaaggctgcagtgagccatgttcacaccgctgcactcaagcttgggtgacagaacaagaccccgtctcaaaaaaaattttttttttaataaaacaaaatttgtttgaaatcttttaaaaattcaaatgatttttacaagttttaaataagctctccccaaacttgctttatgccttcttattgcttttatgatatatatatgcttggctaactatatttgctttttgctaacaatgctctggggtctttttatgcatttgcatttgctctttcatctctgcttggattattttaaatcattaggaattaagttatctttaaaatttaagtatcttttttcaaaaacattttttaatagaataaaatataatttgatcttatt

SEQ ID NO: 822 - DNA, 658 bp, Homo sapiens
  source 1..658: mol_type = genomic DNA
gattctgcctttctgctggagggaagtgttttcacagattatattctcctgccttttaaaaagatggacttcagcagaaatctttatgatattggggaacaactggacagtgaagatctggcctccctcaagttcctgagcctggactacattccgcaaaggaagcaagaacccatcaaggatgccttgatgttattccagagactccaggaaaagagaatgttggaggaaagcaatctgtccttcctgaaggagctgctcttccgaattaatagactggatttgctgattacctacctaaacactagaaaggaggagatggaaagggaacttcagacaccaggcagggctcaaatttctgcctacagggtcatgctctatcagatttcagaagaagtgagcagatcagaattgaggtcttttaagtttcttttgcaagaggaaatctccaaatgcaaactggatgatgacatgaacctgctggatattttcatagagatggagaagagggtcatcctgggagaaggaaagttggacatcctgaaaagagtctgtgcccaaatcaacaagagcctgctgaagataatcaacgactatgaagaattcagcaaagagagaagcagcagccttgaaggaagtcctgatgaattttcaaatg

SEQ ID NO: 823 - DNA, 717 bp, Homo sapiens
  source 1..717: mol_type = genomic DNA
agattctagcacttcctttgtgaggctctaaccccctctcctatagtggatttgttaagaacttctgtttttgtggctttgttattataaaattttttgaaatgttgttctctaaaaaagttatgattttatgtttttcttcatgagattctttcactgccttccagctgcaagtagaatgacgtctaaatctttgtgatctgtcactgaagcccttgagtgagacacttaaatctggctgtggctctctctcttactagcttatttccaagccgtgatttttcacaacagaaaaatggggacagtaatagtagtttcttcagaggcttttagtgaaatgagattatattctcctgccttttaaaaagatggacttcagcagaaatctttatgatattggggaacaactggacagtgaagatctggcctccctcaagttcctgagcctggactacattccgcaaaggaagcaagaacccatcaaggatgccttgatgttattccagagactccaggaaaagagaatgttggaggaaagcaatctgtccttcctgaaggagctgctcttccgaattaatagactggatttgctgattacctacctaaacactagaaaggaggagatggaaagggaacttcagacaccaggcagggctcaaatttctgcctacagggtcatgctctatcagatttcagaagaagtgagcagatcagaat

SEQ ID NO: 824 - DNA, 1629 bp, Homo sapiens
  source 1..1629: mol_type = genomic DNA
ctgtttcaccttgtgtctgagctggtctgaaggctggttgttcagactgagcttcctgcctgcctgtaccccgccaacagcttcagaagaaggagcagcccctgggtgcgtccactttctgggcacgtgaggttgggccttggccgcctgagcccttgagttggtcacttgaaccttgggaatattgagatggacttcagcagaaatctttatgatattggggaacaactggacagtgaagatctggcctccctcaagttcctgagcctggactacattccgcaaaggaagcaagaacccatcaaggatgccttgatgttattccagagactccaggaaaagagaatgttggaggaaagcaatctgtccttcctgaaggagctgctcttccgaattaatagactggatttgctgattacctacctaaacactagaaaggaggagatggaaagggaacttcagacaccaggcagggctcaaatttctgcctacagggtcatgctctatcagatttcagaagaagtgagcagatcagaattgaggtcttttaagtttcttttgcaagaggaaatctccaaatgcaaactggatgatgacatgaacctgctggatattttcatagagatggagaagagggtcatcctgggagaaggaaagttggacatcctgaaaagagtctgtgcccaaatcaacaagagcctgctgaagataatcaacgactatgaagaattcagcaaagagagaagcagcagccttgaaggaagtcctgatgaattttcaaatggggaggagttgtgtggggtaatgacaatctcggactctccaagagaacaggatagtgaatcacagactttggacaaagtttaccaaatgaaaagcaaacctcggggatactgtctgatcatcaacaatcacaattttgcaaaagcacgggagaaagtgcccaaacttcacagcattagggacaggaatggaacacacttggatgcaggggctttgaccacgacctttgaagagcttcattttgagatcaagccccacgatgactgcacagtagagcaaatctatgagattttgaaaatctaccaactcatggaccacagtaacatggactgcttcatctgctgtatcctctcccatggagacaagggcatcatctatggcactgatggacaggaggcccccatctatgagctgacatctcagttcactggtttgaagtgcccttcccttgctggaaaacccaaagtgttttttattcaggcttgtcagggggataactaccagaaaggtatacctgttgagactgattcagaggagcaaccctatttagaaatggatttatcatcacctcaaacgagatatatcccggatgaggctgactttctgctggggatggccactgtgaataactgtgtttcctaccgaaaccctgcagagggaacctggtacatccagtcactttgccagagcctgagagagcgatgtcctcgaggcgatgatattctcaccatcctgactgaagtgaactatgaagtaagcaacaaggatgacaagaaaaacatggggaaacagatgcctcagcctactttcacactaagaaaaaaacttgtcttcccttctgattga

SEQ ID NO: 825 - DNA, 592 bp, Homo sapiens
  source 1..592: mol_type = genomic DNA
gttcagactgagcttcctgcctgcctgtaccccgccaacagcttcagaagaaggtgactggtggctgcctgaggaataccagtgggcaagagaattagcatttctggagcatctgctgtctgagcagcccctgggtgcgtccactttctgggcacgtgaggttgggccttggccgcctgagcccttgagttggtcacttgaaccttgggaatattgagatggacttcagcagaaatctttatgatattggggaacaactggacagtgaagatctggcctccctcaagttcctgagcctggactacattccgcaaaggaagcaagaacccatcaaggatgccttgatgttattccagagactccaggaaaagagaatgttggaggaaagcaatctgtccttcctgaaggagctgctcttccgaattaatagactggatttgctgattacctacctaaacactagaaaggaggagatggaaagggaacttcagacaccaggcagggctcaaatttctgcctacagggtcatgctctatcagatttcagaagaagtgagcagatcagaattgaggtcttttaagtttcttttgca

SEQ ID NO: 826 - DNA, 707 bp, Homo sapiens
  source 1..707: mol_type = genomic DNA
atggttggaaattgggcatctgttcctttaaacaggaaacatttcttgttcgaattatattctcctgccttttaaaaagatggacttcagcagaaatctttatgatattggggaacaactggacagtgaagatctggcctccctcaagttcctgagcctggactacattccgcaaaggaagcaagaacccatcaaggatgccttgatgttattccagagactccaggaaaagagaatgttggaggaaagcaatctgtccttcctgaaggagctgctcttccgaattaatagactggatttgctgattacctacctaaacactagaaaggaggagatggaaagggaacttcagacaccaggcagggctcaaatttctgcctacagggtcatgctctatcagatttcagaagaagtgagcagatcagaattgaggtcttttaagtttcttttgcaagaggaaatctccaaatgcaaactggatgatgacatgaacctgctggatattttcatagagatggagaagagggtcatcctgggagaaggaaagttggacatcctgaaaagagtctgtgcccaaatcaacaagagcctgctgaagataatcaacgactatgaagaattcagcaaagactttggacaaagtttaccaaatgaaaagcaaacctcggggatactgtctgatcatcaacaatcacaattttgcaaaa

SEQ ID NO: 827 - DNA, 2019 bp, Homo sapiens
  source 1..2019: mol_type = genomic DNA
ggccctggggcgggggcgggtcctggggactggggcgggcggccgaggcccggaagcggactgaggcggcctggagtcttagttggctactcgccatggacgaagcggatcggcggctcctgcggcggtgccggctgcggctggtggaagagctgcaggtggaccagctctgggacgccctgctgagccgcgagctgttcaggccccatatgatcgaggacatccagcgggcaggctctggatctcggcgggatcaggccaggcagctgatcatagatctggagactcgagggagtcaggctcttcctttgttcatctcctgcttagaggacacaggccaggacatgctggcttcgtttctgcgaactaacaggcaagcagcaaagttgtcgaagccaaccctagaaaaccttaccccagtggtgctcagaccagagattcgcaaaccagaggttctcagaccggaaacacccagaccagtggacattggttctggaggatttggtgatgtcggtgctcttgagagtttgaggggaaatgcagatttggcttacatcctgagcatggagccctgtggccactgcctcattatcaacaatgtgaacttctgccgtgagtccgggctccgcacccgcactggctccaacatcgactgtgagaagttgcggcgtcgcttctcctcgctgcatttcatggtggaggtgaagggcgacctgactgccaagaaaatggtgctggctttgctggagctggcgcagcaggaccacggtgctctggactgctgcgtggtggtcattctctctcacggctgtcaggccagccacctgcagttcccaggggctgtctacggcacagatggatgccctgtgtcggtcgagaagattgtgaacatcttcaatgggaccagctgccccagcctgggagggaagcccaagctctttttcatccaggcctgtggtggggagcagaaagaccatgggtttgaggtggcctccacttcccctgaagacgagtcccctggcagtaaccccgagccagatgccaccccgttccaggaaggtttgaggaccttcgaccagctggacgccatatctagtttgcccacacccagtgacatctttgtgtcctactctactttcccaggttttgtttcctggagggaccccaagagtggctcctggtacgttgagaccctggacgacatctttgagcagtgggctcactctgaagacctgcagtccctcctgcttagggtcgctaatgctgtttcggtgaaagggatttataaacagatgcctggttgctttaatttcctccggaaaaaacttttctttaaaacatcataaggccagggcccctcaccctgccttatcttgcaccccaaagctttcctgccccaggcctgaaagaggctgaggcctggactttcctgcaactcaaggactttgcagccggcacagggtctgctctttctctgccagtgacagacaggctcttagcagcttccagattgacgacaagtgctgaacagtggaggaagagggacagatgaatgccgtggattgcacgtggcctcttgagcagtggctggtccagggctagtgacttgtgtcccatgatccctgtgttgtctctagagcagggattaacctctgcactactgacatgtggggccaggtcaccctttgctgtgaggctgtcctgtacattgtgggatgttcagcactgtcccttgcctcaatgccagtaacgcgtcttcctgagtggtgccaaacaaaaaggttctcaggtgttgccaaatatgtcctggggtataaaactttcctcgcctgacaaccactggtctgtagggatttttggctacacacaaaccagtatcgctcatagatcagcaaaccggggcctactagagtctgaacagctgtaatctatgaattctaagtgaaattttaaaaattgttaatttttcctatattgcattaattttaaaaaataaatctgaggcaaatatggactctc

SEQ ID NO: 828 - DNA, 1621 bp, Homo sapiens
  source 1..1621: mol_type = genomic DNA
gtccggaggcggtggggagcgaagactgacccggggccgtgacgcgggggcaggccctggggcgggggcgggtcctggggactggggcgggcggccgaggcccggaagcggactgaggcggcctggagtcttagttggctactcgccatggacgaagcggatcggcggctcctgcggcggtgccggctgcggctggtggaagagctgcaggtggaccagctctgggacgccctgctgagccgcgagctgttcaggccccatatgatcgaggacatccagcgggcaggctctggatctcggcgggatcaggccaggcagctgatcatagatctggagactcgagggagtcaggctcttcctttgttcatctcctgcttagaggacacaggccaggacatgctggcttcgtttctgcgaactaacaggcaagcagcaaagttgtcgaagccaaccctagaaaaccttaccccagtggtgctcagaccagagattcgcaaaccagaggttctcagaccggaaacacccagaccagtggacattggttctggaggatttggtgatgtcgagcagaaagaccatgggtttgaggtggcctccacttcccctgaagacgagtcccctggcagtaaccccgagccagatgccaccccgttccaggaaggtttgaggaccttcgaccagctggacgccatatctagtttgcccacacccagtgacatctttgtgtcctactctactttcccaggttttgtttcctggagggaccccaagagtggctcctggtacgttgagaccctggacgacatctttgagcagtgggctcactctgaagacctgcagtccctcctgcttagggtcgctaatgctgtttcggtgaaagggatttataaacagatgcctggttgctttaatttcctccggaaaaaacttttctttaaaacatcataaggccagggcccctcaccctgccttatcttgcaccccaaagctttcctgccccaggcctgaaagaggctgaggcctggactttcctgcaactcaaggactttgcagccggcacagggtctgctctttctctgccagtgacagacaggctcttagcagcttccagattgacgacaagtgctgaacagtggaggaagagggacagatgaatgccgtggattgcacgtggcctcttgagcagtggctggtccagggctagtgacttgtgtcccatgatccctgtgttgtctctagagcagggattaacctctgcactactgacatgtggggccaggtcaccctttgctgtgaggctgtcctgtacattgtgggatgttcagcactgtcccttgcctcaatgccagtaacgcgtcttcctgagtggtgccaaacaaaaaggttctcaggtgttgccaaatatgtcctggggtataaaactttcctcgcctgacaaccactggtctgtagggatttttggctacacacaaaccagtatcgctcatagatcagcaaaccggggcctactagagtctgaacagctgtaatctatgaattctaagtgaaattttaaaaattgttaatttttcctatattgcattaattttaaaaaataaatctgaggcaaatatggactctc

SEQ ID NO: 829 - DNA, 1807 bp, Homo sapiens
  source 1..1807: mol_type = genomic DNA
ggccctggggcgggggcgggtcctggggactggggcgggcggccgaggcccggaagcggactgaggcggcctggagtcttagttggctactcgccatggacgaagcggatcggcggctcctgcggcggtgccggctgcggctggtggaagagctgcaggtggaccagctctgggacgccctgctgagccgcgagctgttcaggccccatatgatcgaggacatccagcgggcaggctctggatctcggcgggatcaggccaggcagctgatcatagatctggagactcgagggagtcaggctcttcctttgttcatctcctgcttagaggacacaggccaggacatgctggcttcgtttctgcgaactaacaggcaagcagcaaagttgtcgaagccaaccctagaaaaccttaccccagtggtgctcagaccagagattcgcaaaccagaggttctcagaccggaaacacccagaccagtggacattggttctggaggatttggtgatgtcggtgctcttgagagtttgaggggaaatgcagatttggcttacatcctgagcatggagccctgtggccactgcctcattatcaacaatgtgaacttctgccgtgagtccgggctccgcacccgcactggctccaacatcgactgtgagaagttgcggcgtcgcttctcctcgctgcatttcatggtggaggtgaagggcgacctgactgccaagaaaatggtgctggctttgctggagctggcgcagcaggaccacggtgctctggactgctgcgtggtggtcattctctctcacggctgtcaggccagccacctgcagttcccaggggctgtctacggcacagatggatgccctgtgtcggtcgagaagattgtgaacatcttcaatgggaccagctgccccagcctgggagggaagcccaagctctttttcatccaggcctgtggtgggggttttgtttcctggagggaccccaagagtggctcctggtacgttgagaccctggacgacatctttgagcagtgggctcactctgaagacctgcagtccctcctgcttagggtcgctaatgctgtttcggtgaaagggatttataaacagatgcctggttgctttaatttcctccggaaaaaacttttctttaaaacatcataaggccagggcccctcaccctgccttatcttgcaccccaaagctttcctgccccaggcctgaaagaggctgaggcctggactttcctgcaactcaaggactttgcagccggcacagggtctgctctttctctgccagtgacagacaggctcttagcagcttccagattgacgacaagtgctgaacagtggaggaagagggacagatgaatgccgtggattgcacgtggcctcttgagcagtggctggtccagggctagtgacttgtgtcccatgatccctgtgttgtctctagagcagggattaacctctgcactactgacatgtggggccaggtcaccctttgctgtgaggctgtcctgtacattgtgggatgttcagcactgtcccttgcctcaatgccagtaacgcgtcttcctgagtggtgccaaacaaaaaggttctcaggtgttgccaaatatgtcctggggtataaaactttcctcgcctgacaaccactggtctgtagggatttttggctacacacaaaccagtatcgctcatagatcagcaaaccggggcctactagagtctgaacagctgtaatctatgaattctaagtgaaattttaaaaattgttaatttttcctatattgcattaatttt

SEQ ID NO: 830 - DNA, 1351 bp, Homo sapiens
  source 1..1351: mol_type = genomic DNA
aattgaccctggggacagggcgaggcgcggaggcgtcctgaaggcgaggcggtgacgcaagagcgaatccttggggcggggcgaggcgttggagatgcgtcctgcgggcgggacggtaacgcgggggcggggcggtgacgtgagcgggcaggctctggatctcggcgggatcaggccaggcagctgatcatagatctggagactcgagggagtcaggctcttcctttgttcatctcctgcttagaggacacaggccaggacatgctggcttcgtttctgcgaactaacaggcaagcagcaaagttgtcgaagccaaccctagaaaaccttaccccagtggtgctcagaccagagattcgcaaaccagaggttctcagaccggaaacacccagaccagtggacattggttctggaggatttggtgatgtcggtgctcttgagagtttgaggggaaatgcagatttggcttacatcctgagcatggagccctgtggccactgcctcattatcaacaatgtgaacttctgccgtgagtccgggctccgcacccgcactggctccaacatcgactgtgagaagttgcggcgtcgcttctcctcgctgcatttcatggtggaggtgaagggcgacctgactgccaagaaaatggtgctggctttgctggagctggcgcagcaggaccacggtgctctggactgctgcgtggtggtcattctctctcacggctgtcaggccagccacctgcagttcccaggggctgtctacggcacagatggatgccctgtgtcggtcgagaagattgtgaacatcttcaatgggaccagctgccccagcctgggagggaagcccaagctctttttcatccaggcctgtggtggggagcagaaagaccatgggtttgaggtggcctccacttcccctgaagacgagtcccctggcagtaaccccgagccagatgccaccccgttccaggaaggtttgaggaccttcgaccagctggacgccatatctagtttgcccacacccagtgacatctttgtgtcctactctactttcccaggttttgtttcctggagggaccccaagagtggctcctggtacgttgagaccctggacgacatctttgagcagtgggctcactctgaagacctgcagtccctcctgcttagggtcgctaatgctgtttcggtgaaagggatttataaacagatgcctggttgctttaatttcctccggaaaaaacttttctttaaaacatcataaggccagggcccctcaccctgccttatcttgcaccccaaagctttcctgccccaggcctgaaagaggctgaggcctggactttcctgca

SEQ ID NO: 831 - DNA, 781 bp, Homo sapiens
  source 1..781: mol_type = genomic DNA
ttagttggctactcgccatggacgaagcggatcggcggctcctgcggcggtgccggctgcggctggtggaagagctgcaggtggaccagctctgggacgccctgctgagccgcgagctgttcaggccccatatgatcgaggacatccagcgggcaggctctggatctcggcgggatcaggccaggcagctgatcatagatctggagactcgagggagtcaggctcttcctttgttcatctcctgcttagaggacacaggccaggacatgctggcttcgtttctgcgaactaacaggcaagcagcaaagttgtcgaagccaaccctagaaaaccttaccccagtggtgctcagaccagagattcgcaaaccagaggttctcagaccggaaacacccagaccagtggacattggttctggaggatttggtgatgtcggtgctcttgagagtttgaggggaaatgcagatttggcttacatcctgagcatggagccctgtggccactgcctcattatcaacaatgtgaacttctgccgtgagtccgggctccgcacccgcactggctccaacatcgactgtgagaagttgcggcgtcgcttctcctcgctgcatttcatggtggaggtgaagggcgacctgactgccaaggccagccacctgcagttcccaggggctgtctacggcacagatggatgccctgtgtcggtcgagaagattgtgaacatcttcaatgggaccagctgccccagcctgggagggaagcccaagctctttttcatcca

SEQ ID NO: 832 - DNA, 954 bp, Homo sapiens
  source 1..954: mol_type = genomic DNA
gcgcggaatggattctggggtcggcgcgaggcgctgagcgggcaggctctggatctcggcgggatcaggccaggcagctgatcatagatctggagactcgagggagtcaggctcttcctttgttcatctcctgcttagaggacacaggccaggacatgctggcttcgtttctgcgaactaacaggcaagcagcaaagttgtcgaagccaaccctagaaaaccttaccccagtggtgctcagaccagagattcgcaaaccagaggttctcagaccggaaacacccagaccagtggacattggttctggaggatttggtgatgtcggtgctcttgagagtttgaggggaaatgcagatttggcttacatcctgagcatggagccctgtggccactgcctcattatcaacaatgtgaacttctgccgtgagtccgggctccgcacccgcactggctccaacatcgactgtgagaagttgcggcgtcgcttctcctcgctgcatttcatggtggaggtgaagggcgacctgactgccaagaaaatggtgctggctttgctggagctggcgcagcaggaccacggtgctctggactgctgcgtggtggtcattctctctcacggctgtcaggccagccacctgcagttcccaggggctgtctacggcacagatggatgccctgtgtcggtcgagaagattgtgaacatcttcaatgggaccagctgccccagcctgggagggaagcccaagctctttttcatccaggcctgtggtggggagcagaaagaccatgggtttgaggtggcctccacttcccctgaagacgagtcccctggcagtaaccccgagccagatgccaccccgttccaggaaggtttgaggaccttcgaccagctggacgccatatctagtttgcccacacccagtgacatctttgtgtcctactctactttcccag

SEQ ID NO: 833 - DNA, 4463 bp, Homo sapiens
  source 1..4463: mol_type = genomic DNA
ttggccctgggggcggggcgaggcgcagaggtgcgtcctgagggcggggcggtgacgcaagagcgactcctgggggcggggcgaggccttggagatgcgtccggaggcggtggggagcgaagactgacccggggccgtgacgcgggggcaggccctggggcgggggcgggtcctggggactggggcgggcggccgaggcccggaagcggactgaggcggcctggagtcttagttggctactcgccatggacgaagcggatcggcggctcctgcggcggtgccggctgcggctggtggaagagctgcaggtggaccagctctgggacgccctgctgagccgcgagctgttcaggccccatatgatcgaggacatccagcgggcaggctctggatctcggcgggatcaggccaggcagctgatcatagatctggagactcgagggagtcaggctcttcctttgttcatctcctgcttagaggacacaggccaggacatgctggcttcgtttctgcgaactaacaggcaagcagcaaagttgtcgaagccaaccctagaaaaccttaccccagtggtgctcagaccagagattcgcaaaccagaggttctcagaccggaaacacccagaccagtggacattggttctggaggatttggtgatgtcggtgctcttgagagtttgaggggaaatgcagatttggcttacatcctgagcatggagccctgtggccactgcctcattatcaacaatgtgaacttctgccgtgagtccgggctccgcacccgcactggctccaacatcgactgtgagaagttgcggcgtcgcttctcctcgctgcatttcatggtggaggtgaagggcgacctgactgccaagaaaatggtgctggctttgctggagctggcgcagcaggaccacggtgctctggactgctgcgtggtggtcattctctctcacggctgtcaggccagccacctgcagttcccaggggctgtctacggcacagatggatgccctgtgtcggtcgagaagattgtgaacatcttcaatgggaccagctgccccagcctgggagggaagcccaagctctttttcatccaggcctgtggtggggagcagaaagaccatgggtttgaggtggcctccacttcccctgaagacgagtcccctggcagtaaccccgagccagatgccaccccgttccaggaaggtttgaggaccttcgaccagctggacgccatatctagtttgcccacacccagtgacatctttgtgtcctactctactttcccaggttttgtttcctggagggaccccaagagtggctcctggtacgttgagaccctggacgacatctttgagcagtgggctcactctgaagacctgcagtccctcctgcttagggtgagtgctgccttcctctgcaaaggagaggggaggctgctgaggggcagcgtgtcctcctggggctggggatttggggtgagcagggcaggcccaaaccaagggtaaaaggtagtagactcctgcctctgagccttggagtcggcacttttgtgtctctttatgagaggcatcctgcctgtggtgacgtttgccctttattcaaagagttgccttccctgtctcctccaaggtccccaggttgacacctcccgctcctccactgatggagctggtcctcagtgccagcgcaggatggctctgtccagaccctgaaggcgggtcatgggcccctccctatatcctgtgggcatcatgtagtcttctactcttgaccctcaagaattgtgaacccctccttgtacatcgccttctcaggaggccccagtgaggaaacagatagggaagggtggcctgataggcccagtcctactccatagaaacccgactcagagcagttgcttcctctgagggtcctgtggccttgtggctgccttgggaggcagcatgtatgggccccagctgctctgctcaggtattcatgccacgagaaggggctgcgaggctggggccactcctggctccttgcaaatatttcagtctgatttgaactttatgaatttggaaattttgaattttgagttttttaaaggtaaagttgaggtgcgtattctttaagccctcctgctcaaagaggctgcagtttgagctgtttttaaggtgcgggttgagtggacattccccccagcccctcttgaattcttccttcagtccagagaactgaactcacagagctctccatggtcatgtcttacaggtcgctaatgctgtttcggtgaaagggatttataaacagatgcctggttgctttaatttcctccggaaaaaacttttctttaaaacatcataaggccagggcccctcaccctgccttatcttgcaccccaaagctttcctgccccaggcctgaaagaggctgaggcctggactttcctgcaactcaaggactttgcagccggcacagggtctgctctttctctgccagtgacagacaggctcttagcagcttccagattgacgacaagtgctgaacagtggaggaagagggacagatgaatgccgtggattgcacgtggcctcttgagcagtggctggtccagggctagtgacttgtgtcccatgatccctgtgttgtctctagagcagggattaacctctgcactactgacatgtggggccaggtcaccctttgctgtgaggctgtcctgtacattgtgggatgttcagcactgtcccttgcctcaatgccagtaacgcgtcttcctgagtggtgccaaacaaaaaggttctcaggtgttgccaaatatgtcctggggtataaaactttcctcgcctgacaaccactggtctgtagggatttttggctacacacaaaccagtatcgctcatagatcagcaaaccggggcctactagagtctgaacagctgtaatctatgaattctaagtgaaattttaaaaattgttaatttttcctatattgcattaattttaaaaaataaatctgaggcaaatatggactctcttttgcctatttcttccctcattttgctccaactctttcttcttccttacaaaagagacttttgcttttttcgaaacatttccccatgtttttctggggtctcgctatgttgcccaggctggtctcaaactcctgggctcaagtgaccctcccaagtagctcttactacaggcgtgcaccattgcacccagccccatttattcatgtcttatttcacttgatccttatcccatcccaggaaggcaacaagggtgagaaccctgtgctcagggaggttaggtctcttgtccaagggaaaacgattatccagagaagagacctggccagaacctgggtcccctgagtcctagccatgcttcccatgtgccttacttgctgaagcacccccggactgcagtgtgaacgtgctgtgcaatagtgacacgctgggcttccccacaaggctccaccctgaggtcttttaagctgtccttatgccagcctatttcttgttttttgggcctttttttttggagatagggtctcactctgtcgcccaggctggagtgcaatgacgcaatcttggcttattgcagtctcgacctcctgggctcaagagatccttccacctcagccacctgagtagcttggactacaggtgtgcaccacctctcccagttaatttttgtatttttagtagagacagagttatgccatgttactcaggctggtcttgaactcctggactcaagcgatcagcctgccttagcctcccaaagtgcaggggttacaggcttgagccattgcgcctgacctatttctggttcttagggccctggatgttaggatggatttctgaattaataataataataaaaccctcatcaagatgtgatttgcatagttgtcactttatataatattattttccttctgtgacctttccaagtctgaaacagtcccagggacttcttttggttagttatttgcaatcacctgcaggacacacacacaagaaaattgtcaggttcacgtaaccacagagctgtgcgtggcagtttcctgtctctgtcctcctgggctaagctactcaagtgagtcacaggcagcccacactacagtagctcctgcctgaggagttcagatgatgtttcggagaaaaagatgcaatcacagcttttcattgacctgttagggtcttcctgtaaagggggtcttagccaggagtcctgtgtgggcttcaggtcagggggccttcgaaccccctaaaaattatatgccaaatgtgcggatggcatatttttagatttcatttgtttctcatcaaaactgctgtttgcaaggcagttatgcactgtggttggggctataactgtttccagaggctgttgatcagtatctgttaaactttttttttttttttttgagacagtcttgctctgttgcccagacgagtaca

SEQ ID NO: 834 - DNA, 3756 bp, Homo sapiens
  source 1..3756: mol_type = genomic DNA
tcctcctcctagccggactggagggagacaaagcagcgcccgtctgcttcgggcctctggaatttagcgctcgcccagctagccgcagaaatgactgctgtccatgcaggcaacataaacttcaagtgggatcctaaaagtctagagatcaggactctggcagttgagagactgttggagcctcttgttacacaggttacaacccttgtaaacaccaatagtaaagggccctctaataagaagagaggtcgttctaagaaggcccatgttttggctgcatctgttgaacaagcaactgagaatttcttggagaagggggataaaattgcgaaggagagccagtttctcaaggaggagcttgtggctgctgtagaagatgttcgaaaacaaggtgatttgatgaaggctgctgcaggagagttcgcagatgatccctgctcttctgtgaagcgaggcaacatggttcgggcagctcgagctttgctctctgctgttacccggttgctgattttggctgacatggcagatgtctacaaattacttgttcagctgaaagttgtggaagatggtatcttgaagttgaggaatgctggcaatgaacaagacttaggaatccagtataaagccctaaaacctgaagtggataagctgaacattatggcagccaaaagacaacaggaattgaaagatgttggccatcgtgatcagatggctgcagctagaggaatcctgcagaagaacgttccgatcctctatactgcatcccaggcatgcctacagcaccctgatgtcgcagcctataaggccaacagggacctgatatacaagcagctgcagcaggcggtcacaggcatttccaatgcagcccaggccactgcctcagacgatgcctcacagcaccagggtggaggaggaggagaactggcatatgcactcaataactttgacaaacaaatcattgtggaccccttgagcttcagcgaggagcgctttaggccttccctggaggagcgtctggaaagcatcattagtggggctgccttgatggccgactcgtcctgcacgcgtgatgaccgtcgtgagcgaattgtggcagagtgtaatgctgtccgccaggccctgcaggacctgctttcggagtacatgggcaatgctggacgtaaagaaagaagtgatgcactcaattctgcaatagataaaatgaccaagaagaccagggacttgcgtagacagctccgcaaagctgtcatggaccacgtttcagattctttcctggaaaccaatgttccacttttggtattgattgaagctgcaaagaatggaaatgagaaagaagttaaggagtatgcccaagttttccgtgaacatgccaacaaattgattgaggttgccaacttggcctgttccatctcaaataatgaagaaggtgtaaagcttgttcgaatgtctgcaagccagttagaagccctctgtcctcaggttattaatgctgcactggctttagcagcaaaaccacagagtaaactggcccaagagaacatggatctttttaaagaacaatgggaaaaacaagtccgtgttctcacagatgctgtcgatgacattacttccattgatgacttcttggctgtctcagagaatcacattttggaagatgtgaacaaatgtgtcattgctctccaagagaaggatgtggatggcctggaccgcacagctggtgcaattcgaggccgggcagcccgggtcattcacgtagtcacctcagagatggacaactatgagccaggagtctacacagagaaggttctggaagccactaagctgctctccaacacagtcatgccacgttttactgagcaagtagaagcagccgtggaagccctcagctcggaccctgcccagcccatggatgagaatgagtttatcgatgcttcccgcctggtatatgatggcatccgggacatcaggaaagcagtgctgatgataaggacccctgaggagttggatgactctgactttgagacagaagattttgatgtcagaagcaggacgagcgtccagacagaagacgatcagctgatagctggccagagtgcccgggcgatcatggctcagcttccccaggagcaaaaagcgaagattgcggaacaggtggccagcttccaggaagaaaagagcaagctggatgctgaagtgtccaaatgggacgacagtggcaatgacatcattgtgctggccaagcagatgtgcatgattatgatggagatgacagactttacccgaggtaaaggaccactcaaaaatacatcggatgtcatcagtgctgccaagaaaattgctgaggcaggatccaggatggacaagcttggccgcaccattgcagaccattgccccgactcggcttgcaagcaggacctgctggcctacctgcaacgcatcgccctctactgccaccagctgaacatctgcagcaaggtcaaggccgaggtgcagaatctcggcggggagcttgttgtctctggggtggacagcgccatgtccctgatccaggcagccaagaacttgatgaatgctgtggtgcagacagtgaaggcatcctacgtcgcctctaccaaataccaaaagtcacagggtatggcttccctcaaccttcctgctgtgtcatggaagatgaaggcaccagagaaaaagccattggtgaagagagagaaacaggatgagacacagaccaagattaaacgggcatctcagaagaagcacgtgaacccggtgcaggccctcagcgagttcaaagctatggacagcatctaagtctgcccaggccggccgcccccacccctcggggctcctgaatatcagtcactgttcgtcactcaaatgaatttgctaaatacaacactgatactagattccacagggaaatgggcagactgaaccagtccaggtggtgaattttccaagaacatagtttaagttgattaaaaatgcttttagaatgcaggagcctacttctagctgtattttttgtatgcttaaataaaaataaaaattcataaccaaagagaatcccacattagcttgttagtaatgctctgaccaagccgagatgcccattctcttagtgatggcggcgttagggtttgagagaagggaatttggctcaacttcagttgagagggtgcagtccagacagcttgactgcttttaaatgaccaaagatgacctgtggtaagcaacctgggcatcttaggaagcagtccctggagaaggcatgttcccagaaaggtctctggagggacaaactcactcagtaaaacataatgtatcatgaagaaaactgattctctatgacatgaaatgaaaattttaatgcattgttataattactaatgtacgctgctgcaggacattaataaagttgcttttttaggctacagtgtctcgatgccataatcagaacacactttttttcctctttctcccagcttcaaatgcaaattcatcattgggctcacttctaataactgcagtgtttcccgccttgggcttgcagcagaaaaacctgacaacatagtgtttgctaaggcagtaatttagactttaccttatttgtgattactgtagtgattgattgattgattactattaactacaaggtataatttactatcaccttatttaaattttatgaattaatttgaatgttttttacactaactaacttttcccaataaagtccactatgaaaccacgaca

SEQ ID NO: 835 - DNA, 2741 bp, Homo sapiens
  source 1..2741: mol_type = genomic DNA
tttcctcctcctagccggactggagggagacaaagcagcgcccgtctgcttcgggcctctggaatttagcgctcgcccagctagccgcagaaatgactgctgtccatgcaggcaacataaacttcaagtgggatcctaaaagtctagagatcaggactctggcagttgagagactgttggagcctcttgttacacaggtgatttgatgaaggctgctgcaggagagttcgcagatgatccctgctcttctgtgaagcgaggcaacatggttcgggcagctcgagctttgctctctgctgttacccggttgctgattttggctgacatggcagatgtctacaaattacttgttcagctgaaagttgtggaagatggtatcttgaagttgaggaatgctggcaatgaacaagacttaggaatccagtataaagccctaaaacctgaagtggataagctgaacattatggcagccaaaagacaacaggaattgaaagatgttggccatcgtgatcagatggctgcagctagaggaatcctgcagaagaacgttccgatcctctatactgcatcccaggcatgcctacagcaccctgatgtcgcagcctataaggccaacagggacctgatatacaagcagctgcagcaggcggtcacaggcatttccaatgcagcccaggccactgcctcagacgatgcctcacagcaccagggtggaggaggaggagaactggcatatgcactcaataactttgacaaacaaatcattgtggaccccttgagcttcagcgaggagcgctttaggccttccctggaggagcgtctggaaagcatcattagtggggctgccttgatggccgactcgtcctgcacgcgtgatgaccgtcgtgagcgaattgtggcagagtgtaatgctgtccgccaggccctgcaggacctgctttcggagtacatgggcaatgctggacgtaaagaaagaagtgatgcactcaattctgcaatagataaaatgaccaagaagaccagggacttgcgtagacagctccgcaaagctgtcatggaccacgtttcagattctttcctggaaaccaatgttccacttttggtattgattgaagctgcaaagaatggaaatgagaaagaagttaaggagtatgcccaagttttccgtgaacatgccaacaaattgattgaggttgccaacttggcctgttccatctcaaataatgaagaaggtgtaaagcttgttcgaatgtctgcaagccagttagaagccctctgtcctcaggttattaatgctgcactggctttagcagcaaaaccacagagtaaactggcccaagagaacatggatctttttaaagaacaatgggaaaaacaagtccgtgttctcacagatgctgtcgatgacattacttccattgatgacttcttggctgtctcagagaatcacattttggaagatgtgaacaaatgtgtcattgctctccaagagaaggatgtggatggcctggaccgcacagctggtgcaattcgaggccgggcagcccgggtcattcacgtagtcacctcagagatggacaactatgagccaggagtctacacagagaaggttctggaagccactaagctgctctccaacacagtcatgccacgttttactgagcaagtagaagcagccgtggaagccctcagctcggaccctgcccagcccatggatgagaatgagtttatcgatgcttcccgcctggtatatgatggcatccgggacatcaggaaagcagtgctgatgataaggacccctgaggagttggatgactctgactttgagacagaagattttgatgtcagaagcaggacgagcgtccagacagaagacgatcagctgatagctggccagagtgcccgggcgatcatggctcagcttccccaggagcaaaaagcgaagattgcggaacaggtggccagcttccaggaagaaaagagcaagctggatgctgaagtgtccaaatgggacgacagtggcaatgacatcattgtgctggccaagcagatgtgcatgattatgatggagatgacagactttacccgaggtaaaggaccactcaaaaatacatcggatgtcatcagtgctgccaagaaaattgctgaggcaggatccaggatggacaagcttggccgcaccattgcagaccattgccccgactcggcttgcaagcaggacctgctggcctacctgcaacgcatcgccctctactgccaccagctgaacatctgcagcaaggtcaaggccgaggtgcagaatctcggcggggagcttgttgtctctggggtggacagcgccatgtccctgatccaggcagccaagaacttgatgaatgctgtggtgcagacagtgaaggcatcctacgtcgcctctaccaaataccaaaagtcacagggtatggcttccctcaaccttcctgctgtgtcatggaagatgaaggcaccagagaaaaagccattggtgaagagagagaaacaggatgagacacagaccaagattaaacgggcatctcagaagaagcacgtgaacccggtgcaggccctcagcgagttcaaagctatggacagcatctaagtctgcccaggccggccgcccccacccctcggggctcctgaatatcagtcactgttcgtcactcaaatgaatttgctaaatacaacactgatactagattccacagggaaatgggcagactgaa

SEQ ID NO: 836 - DNA, 696 bp, Homo sapiens
  source 1..696: mol_type = genomic DNA
aggagggggttgggcagtcgctggcgctgccgctggtggtccctgtgcttgaagtgccggtggtatcggagtccatgcacccaaggcccagcacccagcaacattctctggcccagcagagggggttattgtgaagatcaaatgacacattccctttggaaactcttaaaggctttacaaaggataccccaaaccaagacagatgtctcacaaaacacaagcagagatgtcagtcttcaggcctcgcatggagaagatgaaagagaggggtggcttttccaaagcccagcgtcagcacgaagcttccacgagatgattttccctcttattttgaagtcctgaaatgactgctgtccatgcaggcaacataaacttcaagtgggatcctaaaagtctagagatcaggactctggcagttgagagactgttggagcctcttgttacacaggttacaacccttgtaaacaccaatagtaaagggccctctaataagaagagaggtcgttctaagaaggcccatgttttggctgcatctgttgaacaagcaactgagaatttcttggagaagggggataaaattgcgaaggagagccagtttctcaaggaggagcttgtggctgctgtagaagatgttcgaaaacaaggtgatttgatgaaggctgctgcaggagagttcgcagatgatccctgctcttc

SEQ ID NO: 837 - DNA, 859 bp, Homo sapiens
  source 1..859: mol_type = genomic DNA
ccccgggcgggcgtgggacccgcgtcgggccggcggtcccttcccccgcagggcccgagtatggggcccgggcgggcacggccggcgcttcccagcgctcgggaagtcggggggccgcctgggctggggaggagaaactataggcccagcgccgccgccgcgtttcctcttggaaaagttttctcgcggtttccaaactttgttaccgcggcctcggcgcgcgcggcagccccgcgccgggcccctcggccgccttccttccctggggcggcttgtctgggagccgctttcccgggaagtgattgtcgtccggctccgaggcgttcctgccccctcccccttcccggccgctgagacttcccgatggggcggcggggacgcgggctcggcgaaccgggaggctggagcccgggcttctcccatacagcttcgccgtagaaatgactgctgtccatgcaggcaacataaacttcaagtgggatcctaaaagtctagagatcaggactctggcagttgagagactgttggagcctcttgttacacaggttacaacccttgtaaacaccaatagtaaagggccctctaataagaagagaggtcgttctaagaaggcccatgttttggctgcatctgttgaacaagcaactgagaatttcttggagaagggggataaaattgcgaaggagagccagtttctcaaggaggagcttgtggctgctgtagaagatgttcgaaaacaaggtgatttgatgaaggctgctgcaggagagttcgcagatgatccctgctcttctgtgaagcgaggcaacatggttcgggcagctcgagctttgctctctgctgttacccggttgctgat

SEQ ID NO: 838 - DNA, 719 bp, Homo sapiens
  source 1..719: mol_type = genomic DNA
ggcggcggttggcccagttccaaggttgactccctcttacgtcctcttgcatcttggtgacatttttttgaaatgactgctgtccatgcaggcaacataaacttcaagtgggatcctaaaagtctagagatcaggactctggcagttgagagactgttggagcctcttgttacacaggttacaacccttgtaaacaccaatagtaaagggccctctaataagaagagaggtcgttctaagaaggcccatgttttggctgcatctgttgaacaagcaactgagaatttcttggagaagggggataaaattgcgaaggagagccagtttctcaaggaggagcttgtggctgctgtagaagatgttcgaaaacaaggtgatttgatgaaggctgctgcaggagagttcgcagatgatccctgctcttctgtgaagcgaggcaacatggttcgggcagctcgagctttgctctctgctgttacccggttgctgattttggctgacatggcagatgtctacaaattacttgttcagctgaaagttgtggaagatggtatcttgaagttgaggaatgctggcaatgaacaagacttaggaatccagtataaagccctaaaacctgaagtggataagctgaacattatggcagccaaaagacaacaggaattgaaagatgttggccatcgtgatcagatggctgcagctagaggaatcctgcagaa

SEQ ID NO: 839 - DNA, 868 bp, Homo sapiens
  source 1..868: mol_type = genomic DNA
ccatttcctcctcctagccggactggagggagacaaagcagcgcccgtctgcttcgggcctctggaatttagcgctcgcccagctagccgcaggaagaatgaagaatgagtgtaggagttacctatagtttctgcctaattatttaccaatctggacttttgaacaaacattttttttaaagacggggtctccgtcgcccgggctggagcgcagtgacacgatcatgactcactgcggcttctgtctcctgggctcaagtgatccccccacctcggcttccgaagtagttgggactacaggcacgcgccaccacatccgtctaatttttgtatttttggtagagatggtgtctcgctgtcttgcccaagctggtctcgaactcctgggctcaagtggtcctcctgcctcagcctcccaaagtgttgtgattacaggcctgagccagggtgcctgaccccatctggatatttattcagcgaaagaataattttttaatccacctaagagctcacagtgtaataggggagacacacaccccaggtgtagtacagagcggactgcaaaatgactgctgtccatgcaggcaacataaacttcaagtgggatcctaaaagtctagagatcaggactctggcagttgagagactgttggagcctcttgttacacaggttacaacccttgtaaacaccaatagtaaagggccctctaataagaagagaggtcgttctaagaaggcccatgttttggctgcatctgttgaacaagcaactgagaatttcttggagaagggggataaaattgcgaaggagagccagtttctcaaggaggagcttgtggctgctgtagaagatgttcgaaaacaaggt

SEQ ID NO: 840 - DNA, 642 bp, Homo sapiens
  source 1..642: mol_type = genomic DNA
gggcagtcgctggcgctgccgctggtggtccctgtgcttgaagtgccggtggtatcggagtccatgcacccaaggcccagcacccagcaacattctctggcccagcagaggggataccccaaaccaagacagatgtctcacaaaacacaagcagagatgtcagtcttcaggcctcgcatggagaagatgaaagagaggggtggcttttccaaagcccagcgtcagcacgaagcttccacgagatgattttccctcttattttgaagtcctgaaatgactgctgtccatgcaggcaacataaacttcaagtgggatcctaaaagtctagagatcaggactctggcagttgagagactgttggagcctcttgttacacaggttacaacccttgtaaacaccaatagtaaagggccctctaataagaagagaggtcgttctaagaaggcccatgttttggctgcatctgttgaacaagcaactgagaatttcttggagaagggggataaaattgcgaaggagagccagtttctcaaggaggagcttgtggctgctgtagaagatgttcgaaaacaaggtgatttgatgaaggctgctgcaggagagttcgcagatgatccctgctcttctgtgaagcgaggcaac

SEQ ID NO: 841 - DNA, 545 bp, Homo sapiens
  source 1..545: mol_type = genomic DNA
accgctcctcctccctctcaggggtcactcccggcctaagctcccactaggggccggggaggaaggaattctgagaaatgactgctgtccatgcaggcaacataaacttcaagtgggatcctaaaagtctagagatcaggactctggcagttgagagactgttggagcctcttgttacacaggttacaacccttgtaaacaccaatagtaaagggccctctaataagaagagaggtcgttctaagaaggcccatgttttggctgcatctgttgaacaagcaactgagaatttcttggagaagggggataaaattgcgaaggagagccagtttctcaaggaggagcttgtggctgctgtagaagatgttcgaaaacaaggtgatttgatgaaggctgctgcaggagagttcgcagatgatccctgctcttctgtgaagcgaggcaacatggttcgggcagctcgagctttgctctctgctgttacccggttgctgattttggctgacatggcagatgtctacaaattacttgttcagctgaaagtt

SEQ ID NO: 842 - DNA, 483 bp, Homo sapiens
  source 1..483: mol_type = genomic DNA
agttccaggcagagggaacagccaaggcaagagcactgaggataccccaaaccaagacagatgtctcacaaaacacaagcagagatgtcagtcttcaggcctcgcatggagaagatgaaagagaggggtggcttttccaaagcccagcgtcagcacgaagcttccacgagatgattttccctcttattttgaagtcctgaaatgactgctgtccatgcaggcaacataaacttcaagtgggatcctaaaagtctagagatcaggactctggcagttgagagactgttggagcctcttgttacacaggttacaacccttgtaaacaccaatagtaaagggccctctaataagaagagaggtcgttctaagaaggcccatgttttggctgcatctgttgaacaagcaactgagaatttcttggagaagggggataaaattgcgaaggagagccagtttctcaaggaggagcttgtggctgctgta

SEQ ID NO: 843 - DNA, 3800 bp, Homo sapiens
  source 1..3800: mol_type = genomic DNA
gagacaaagcagcgcccgtctgcttcgggcctctggaatttagcgctcgcccagctagccgcagaaatgactgctgtccatgcaggcaacataaacttcaagtgggatcctaaaagtctagagatcaggactctggcagttgagagactgttggagcctcttgttacacaggttacaacccttgtaaacaccaatagtaaagggccctctaataagaagagaggtcgttctaagaaggcccatgttttggctgcatctgttgaacaagcaactgagaatttcttggagaagggggataaaattgcgaaggagagccagtttctcaaggaggagcttgtggctgctgtagaagatgttcgaaaacaaggtgatttgatgaaggctgctgcaggagagttcgcagatgatccctgctcttctgtgaagcgaggcaacatggttcgggcagctcgagctttgctctctgctgttacccggttgctgattttggctgacatggcagatgtctacaaattacttgttcagctgaaagttgtggaagatggtatcttgaagttgaggaatgctggcaatgaacaagacttaggaatccagtataaagccctaaaacctgaagtggataagctgaacattatggcagccaaaagacaacaggaattgaaagatgttggccatcgtgatcagatggctgcagctagaggaatcctgcagaagaacgttccgatcctctatactgcatcccaggcatgcctacagcaccctgatgtcgcagcctataaggccaacagggacctgatatacaagcagctgcagcaggcggtcacaggcatttccaatgcagcccaggccactgcctcagacgatgcctcacagcaccagggtggaggaggaggagaactggcatatgcactcaataactttgacaaacaaatcattgtggaccccttgagcttcagcgaggagcgctttaggccttccctggaggagcgtctggaaagcatcattagtggggctgccttgatggccgactcgtcctgcacgcgtgatgaccgtcgtgagcgaattgtggcagagtgtaatgctgtccgccaggccctgcaggacctgctttcggagtacatgggcaatgctggacgtaaagaaagaagtgatgcactcaattctgcaatagataaaatgaccaagaagaccagggacttgcgtagacagctccgcaaagctgtcatggaccacgtttcagattctttcctggaaaccaatgttccacttttggtattgattgaagctgcaaagaatggaaatgagaaagaagttaaggagtatgcccaagttttccgtgaacatgccaacaaattgattgaggttgccaacttggcctgttccatctcaaataatgaagaaggtgtaaagcttgttcgaatgtctgcaagccagttagaagccctctgtcctcaggttattaatgctgcactggctttagcagcaaaaccacagagtaaactggcccaagagaacatggatctttttaaagaacaatgggaaaaacaagtccgtgttctcacagatgctgtcgatgacattacttccattgatgacttcttggctgtctcagagaatcacattttggaagatgtgaacaaatgtgtcattgctctccaagagaaggatgtggatggcctggaccgcacagctggtgcaattcgaggccgggcagcccgggtcattcacgtagtcacctcagagatggacaactatgagccaggagtctacacagagaaggttctggaagccactaagctgctctccaacacagtcatgccacgttttactgagcaagtagaagcagccgtggaagccctcagctcggaccctgcccagcccatggatgagaatgagtttatcgatgcttcccgcctggtatatgatggcatccgggacatcaggaaagcagtgctgatgataaggacccctgaggagttggatgactctgactttgagacagaagattttgatgtcagaagcaggacgagcgtccagacagaagacgatcagctgatagctggccagagtgcccgggcgatcatggctcagcttccccaggagcaaaaagcgaagattgcggaacaggtggccagcttccaggaagaaaagagcaagctggatgctgaagtgtccaaatgggacgacagtggcaatgacatcattgtgctggccaagcagatgtgcatgattatgatggagatgacagactttacccgaggtaaaggaccactcaaaaatacatcggatgtcatcagtgctgccaagaaaattgctgaggcaggatccaggatggacaagcttggccgcaccattgcagaccattgccccgactcggcttgcaagcaggacctgctggcctacctgcaacgcatcgccctctactgccaccagctgaacatctgcagcaaggtcaaggccgaggtgcagaatctcggcggggagcttgttgtctctgggaactgtgacacctgcggggcactgcaagggctgaaaggctggcctcctcccctttgcgccactcactgggtggacagcgccatgtccctgatccaggcagccaagaacttgatgaatgctgtggtgcagacagtgaaggcatcctacgtcgcctctaccaaataccaaaagtcacagggtatggcttccctcaaccttcctgctgtgtcatggaagatgaaggcaccagagaaaaagccattggtgaagagagagaaacaggatgagacacagaccaagattaaacgggcatctcagaagaagcacgtgaacccggtgcaggccctcagcgagttcaaagctatggacagcatctaagtctgcccaggccggccgcccccacccctcggggctcctgaatatcagtcactgttcgtcactcaaatgaatttgctaaatacaacactgatactagattccacagggaaatgggcagactgaaccagtccaggtggtgaattttccaagaacatagtttaagttgattaaaaatgcttttagaatgcaggagcctacttctagctgtattttttgtatgcttaaataaaaataaaaattcataaccaaagagaatcccacattagcttgttagtaatgctctgaccaagccgagatgcccattctcttagtgatggcggcgttagggtttgagagaagggaatttggctcaacttcagttgagagggtgcagtccagacagcttgactgcttttaaatgaccaaagatgacctgtggtaagcaacctgggcatcttaggaagcagtccctggagaaggcatgttcccagaaaggtctctggagggacaaactcactcagtaaaacataatgtatcatgaagaaaactgattctctatgacatgaaatgaaaattttaatgcattgttataattactaatgtacgctgctgcaggacattaataaagttgcttttttaggctacagtgtctcgatgccataatcagaacacactttttttcctctttctcccagcttcaaatgcaaattcatcattgggctcacttctaataactgcagtgtttcccgccttgggcttgcagcagaaaaacctgacaacatagtgtttgctaaggcagtaatttagactttaccttatttgtgattactgtagtgattgattgattgattactattaactacaaggtataatttactatcaccttatttaaattttatgaattaatttgaatgttttttacactaactaacttttcccaataaagtccactatgaaaccacgac

SEQ ID NO: 844 - DNA, 2684 bp, Homo sapiens
  source 1..2684: mol_type = genomic DNA
ctgccgattctgcatagagagatcatctaaatgggcagaagcctgcacaatttatgaagtgctgatttaacaccagcctatgcaaggctggacgtaaagaaagaagtgatgcactcaattctgcaatagataaaatgaccaagaagaccagggacttgcgtagacagctccgcaaagctgtcatggaccacgtttcagattctttcctggaaaccaatgttccacttttggtattgattgaagctgcaaagaatggaaatgagaaagaagttaaggagtatgcccaagttttccgtgaacatgccaacaaattgattgaggttgccaacttggcctgttccatctcaaataatgaagaaggtgtaaagcttgttcgaatgtctgcaagccagttagaagccctctgtcctcaggttattaatgctgcactggctttagcagcaaaaccacagagtaaactggcccaagagaacatggatctttttaaagaacaatgggaaaaacaagtccgtgttctcacagatgctgtcgatgacattacttccattgatgacttcttggctgtctcagagaatcacattttggaagatgtgaacaaatgtgtcattgctctccaagagaaggatgtggatggcctggaccgcacagctggtgcaattcgaggccgggcagcccgggtcattcacgtagtcacctcagagatggacaactatgagccaggagtctacacagagaaggttctggaagccactaagctgctctccaacacagtcatgccacgttttactgagcaagtagaagcagccgtggaagccctcagctcggaccctgcccagcccatggatgagaatgagtttatcgatgcttcccgcctggtatatgatggcatccgggacatcaggaaagcagtgctgatgataaggacccctgaggagttggatgactctgactttgagacagaagattttgatgtcagaagcaggacgagcgtccagacagaagacgatcagctgatagctggccagagtgcccgggcgatcatggctcagcttccccaggagcaaaaagcgaagattgcggaacaggtggccagcttccaggaagaaaagagcaagctggatgctgaagtgtccaaatgggacgacagtggcaatgacatcattgtgctggccaagcagatgtgcatgattatgatggagatgacagactttacccgaggtaaaggaccactcaaaaatacatcggatgtcatcagtgctgccaagaaaattgctgaggcaggatccaggatggacaagcttggccgcaccattgcagaccattgccccgactcggcttgcaagcaggacctgctggcctacctgcaacgcatcgccctctactgccaccagctgaacatctgcagcaaggtcaaggccgaggtgcagaatctcggcggggagcttgttgtctctggggtggacagcgccatgtccctgatccaggcagccaagaacttgatgaatgctgtggtgcagacagtgaaggcatcctacgtcgcctctaccaaataccaaaagtcacagggtatggcttccctcaaccttcctgctgtgtcatggaagatgaaggcaccagagaaaaagccattggtgaagagagagaaacaggatgagacacagaccaagattaaacgggcatctcagaagaagcacgtgaacccggtgcaggccctcagcgagttcaaagctatggacagcatctaagtctgcccaggccggccgcccccacccctcggggctcctgaatatcagtcactgttcgtcactcaaatgaatttgctaaatacaacactgatactagattccacagggaaatgggcagactgaaccagtccaggtggtgaattttccaagaacatagtttaagttgattaaaaatgcttttagaatgcaggagcctacttctagctgtattttttgtatgcttaaataaaaataaaaattcataaccaaagagaatcccacattagcttgttagtaatgctctgaccaagccgagatgcccattctcttagtgatggcggcgttagggtttgagagaagggaatttggctcaacttcagttgagagggtgcagtccagacagcttgactgcttttaaatgaccaaagatgacctgtggtaagcaacctgggcatcttaggaagcagtccctggagaaggcatgttcccagaaaggtctctggagggacaaactcactcagtaaaacataatgtatcatgaagaaaactgattctctatgacatgaaatgaaaattttaatgcattgttataattactaatgtacgctgctgcaggacattaataaagttgcttttttaggctacagtgtctcgatgccataatcagaacacactttttttcctctttctcccagcttcaaatgcaaattcatcattgggctcacttctaataactgcagtgtttcccgccttgggcttgcagcagaaaaacctgacaacatagtgtttgctaaggcagtaatttagactttaccttatttgtgattactgtagtgattgattgattgattactattaactacaaggtataatttactatcaccttatttaaattttatgaattaatttgaatgttttttacactaactaacttttcccaataaagtccactatgaaacc

SEQ ID NO: 845 - DNA, 3686 bp, Homo sapiens
  source 1..3686: mol_type = genomic DNA
gagacaaagcagcgcccgtctgcttcgggcctctggaatttagcgctcgcccagctagccgcagaaatgactgctgtccatgcaggcaacataaacttcaagtgggatcctaaaagtctagagatcaggactctggcagttgagagactgttggagcctcttgttacacaggttacaacccttgtaaacaccaatagtaaagggccctctaataagaagagaggtcgttctaagaaggcccatgttttggctgcatctgttgaacaagcaactgagaatttcttggagaagggggataaaattgcgaaggagagccagtttctcaaggaggagcttgtggctgctgtagaagatgttcgaaaacaaggtgatttgatgaaggctgctgcaggagagttcgcagatgatccctgctcttctgtgaagcgaggcaacatggttcgggcagctcgagctttgctctctgctgttacccggttgctgaaagttgtggaagatggtatcttgaagttgaggaatgctggcaatgaacaagacttaggaatccagtataaagccctaaaacctgaagtggataagctgaacattatggcagccaaaagacaacaggaattgaaagatgttggccatcgtgatcagatggctgcagctagaggaatcctgcagaagaacgttccgatcctctatactgcatcccaggcatgcctacagcaccctgatgtcgcagcctataaggccaacagggacctgatatacaagcagctgcagcaggcggtcacaggcatttccaatgcagcccaggccactgcctcagacgatgcctcacagcaccagggtggaggaggaggagaactggcatatgcactcaataactttgacaaacaaatcattgtggaccccttgagcttcagcgaggagcgctttaggccttccctggaggagcgtctggaaagcatcattagtggggctgccttgatggccgactcgtcctgcacgcgtgatgaccgtcgtgagcgaattgtggcagagtgtaatgctgtccgccaggccctgcaggacctgctttcggagtacatgggcaatgctggacgtaaagaaagaagtgatgcactcaattctgcaatagataaaatgaccaagaagaccagggacttgcgtagacagctccgcaaagctgtcatggaccacgtttcagattctttcctggaaaccaatgttccacttttggtattgattgaagctgcaaagaatggaaatgagaaagaagttaaggagtatgcccaagttttccgtgaacatgccaacaaattgattgaggttgccaacttggcctgttccatctcaaataatgaagaaggtgtaaagcttgttcgaatgtctgcaagccagttagaagccctctgtcctcaggttattaatgctgcactggctttagcagcaaaaccacagagtaaactggcccaagagaacatggatctttttaaagaacaatgggaaaaacaagtccgtgttctcacagatgctgtcgatgacattacttccattgatgacttcttggctgtctcagagaatcacattttggaagatgtgaacaaatgtgtcattgctctccaagagaaggatgtggatggcctggaccgcacagctggtgcaattcgaggccgggcagcccgggtcattcacgtagtcacctcagagatggacaactatgagccaggagtctacacagagaaggttctggaagccactaagctgctctccaacacagtcatgccacgttttactgagcaagtagaagcagccgtggaagccctcagctcggaccctgcccagcccatggatgagaatgagtttatcgatgcttcccgcctggtatatgatggcatccgggacatcaggaaagcagtgctgatgataaggacccctgaggagttggatgactctgactttgagacagaagattttgatgtcagaagcaggacgagcgtccagacagaagacgatcagctgatagctggccagagtgcccgggcgatcatggctcagcttccccaggagcaaaaagcgaagattgcggaacaggtggccagcttccaggaagaaaagagcaagctggatgctgaagtgtccaaatgggacgacagtggcaatgacatcattgtgctggccaagcagatgtgcatgattatgatggagatgacagactttacccgaggtaaaggaccactcaaaaatacatcggatgtcatcagtgctgccaagaaaattgctgaggcaggatccaggatggacaagcttggccgcaccattgcagaccattgccccgactcggcttgcaagcaggacctgctggcctacctgcaacgcatcgccctctactgccaccagctgaacatctgcagcaaggtcaaggccgaggtgcagaatctcggcggggagcttgttgtctctggggtggacagcgccatgtccctgatccaggcagccaagaacttgatgaatgctgtggtgcagacagtgaaggcatcctacgtcgcctctaccaaataccaaaagtcacagggtatggcttccctcaaccttcctgctgtgtcatggaagatgaaggcaccagagaaaaagccattggtgaagagagagaaacaggatgagacacagaccaagattaaacgggcatctcagaagaagcacgtgaacccggtgcaggccctcagcgagttcaaagctatggacagcatctaagtctgcccaggccggccgcccccacccctcggggctcctgaatatcagtcactgttcgtcactcaaatgaatttgctaaatacaacactgatactagattccacagggaaatgggcagactgaaccagtccaggtggtgaattttccaagaacatagtttaagttgattaaaaatgcttttagaatgcaggagcctacttctagctgtattttttgtatgcttaaataaaaataaaaattcataaccaaagagaatcccacattagcttgttagtaatgctctgaccaagccgagatgcccattctcttagtgatggcggcgttagggtttgagagaagggaatttggctcaacttcagttgagagggtgcagtccagacagcttgactgcttttaaatgaccaaagatgacctgtggtaagcaacctgggcatcttaggaagcagtccctggagaaggcatgttcccagaaaggtctctggagggacaaactcactcagtaaaacataatgtatcatgaagaaaactgattctctatgacatgaaatgaaaattttaatgcattgttataattactaatgtacgctgctgcaggacattaataaagttgcttttttaggctacagtgtctcgatgccataatcagaacacactttttttcctctttctcccagcttcaaatgcaaattcatcattgggctcacttctaataactgcagtgtttcccgccttgggcttgcagcagaaaaacctgacaacatagtgtttgctaaggcagtaatttagactttaccttatttgtgattactgtagtgattgattgattgattactattaactacaaggtataatttactatcaccttatttaaattttatgaattaatttgaatgttttttacactaactaacttttcccaataaagtccactatgaaaccacgac

SEQ ID NO: 846 - DNA, 3729 bp, Homo sapiens
  source 1..3729: mol_type = genomic DNA
gccggtggcggcaggatacagcggcttctgcgcgacttataagagctccttgtgcggcgccattttaagcctctcggtctgtggcagcagcgttggcccggccccgggagcggagagcgaggggaggcggagacggaggaaggtctgaggagcagcttcagtccccgccgagccgccaccgcaggtcgaggacggtcggactcccgcggcgggaggagcctgttcccctgagggtatttgaagtataccatacaactgttttgaaaatccagcgtggacaatggctactcaagctgatttgatggagttggacatggccatggaaccagacagaaaagcggctgttagtcactggcagcaacagtcttacctggactctggaatccattctggtgccactaccacagctccttctctgagtggtaaaggcaatcctgaggaagaggatgtggatacctcccaagtcctgtatgagtgggaacagggattttctcagtccttcactcaagaacaagtagctgatattgatggacagtatgcaatgactcgagctcagagggtacgagctgctatgttccctgagacattagatgagggcatgcagatcccatctacacagtttgatgctgctcatcccactaatgtccagcgtttggctgaaccatcacagatgctgaaacatgcagttgtaaacttgattaactatcaagatgatgcagaacttgccacacgtgcaatccctgaactgacaaaactgctaaatgacgaggaccaggtggtggttaataaggctgcagttatggtccatcagctttctaaaaaggaagcttccagacacgctatcatgcgttctcctcagatggtgtctgctattgtacgtaccatgcagaatacaaatgatgtagaaacagctcgttgtaccgctgggaccttgcataacctttcccatcatcgtgagggcttactggccatctttaagtctggaggcattcctgccctggtgaaaatgcttggttcaccagtggattctgtgttgttttatgccattacaactctccacaaccttttattacatcaagaaggagctaaaatggcagtgcgtttagctggtgggctgcagaaaatggttgccttgctcaacaaaacaaatgttaaattcttggctattacgacagactgccttcaaattttagcttatggcaaccaagaaagcaagctcatcatactggctagtggtggaccccaagctttagtaaatataatgaggacctatacttacgaaaaactactgtggaccacaagcagagtgctgaaggtgctatctgtctgctctagtaataagccggctattgtagaagctggtggaatgcaagctttaggacttcacctgacagatccaagtcaacgtcttgttcagaactgtctttggactctcaggaatctttcagatgctgcaactaaacaggaagggatggaaggtctccttgggactcttgttcagcttctgggttcagatgatataaatgtggtcacctgtgcagctggaattctttctaacctcacttgcaataattataagaacaagatgatggtctgccaagtgggtggtatagaggctcttgtgcgtactgtccttcgggctggtgacagggaagacatcactgagcctgccatctgtgctcttcgtcatctgaccagccgacaccaagaagcagagatggcccagaatgcagttcgccttcactatggactaccagttgtggttaagctcttacacccaccatcccactggcctctgataaaggctactgttggattgattcgaaatcttgccctttgtcccgcaaatcatgcacctttgcgtgagcagggtgccattccacgactagttcagttgcttgttcgtgcacatcaggatacccagcgccgtacgtccatgggtgggacacagcagcaatttgtggagggggtccgcatggaagaaatagttgaaggttgtaccggagcccttcacatcctagctcgggatgttcacaaccgaattgttatcagaggactaaataccattccattgtttgtgcagctgctttattctcccattgaaaacatccaaagagtagctgcaggggtcctctgtgaacttgctcaggacaaggaagctgcagaagctattgaagctgagggagccacagctcctctgacagagttacttcactctaggaatgaaggtgtggcgacatatgcagctgctgttttgttccgaatgtctgaggacaagccacaagattacaagaaacggctttcagttgagctgaccagctctctcttcagaacagagccaatggcttggaatgagactgctgatcttggacttgatattggtgcccagggagaaccccttggatatcgccaggatgatcctagctatcgttcttttcactctggtggatatggccaggatgccttgggtatggaccccatgatggaacatgagatgggtggccaccaccctggtgctgactatccagttgatgggctgccagatctggggcatgcccaggacctcatggatgggctgcctccaggtgacagcaatcagctggcctggtttgatactgacctgtaaatcatcctttaggtaagaagttttaaaaagccagtttgggtaaaatacttttactctgcctacagaacttcagaaagacttggttggtagggtgggagtggtttaggctatttgtaaatctgccacaaaaacaggtatatactttgaaaggagatgtcttggaacattggaatgttctcagatttctggttgttatgtgatcatgtgtggaagttattaactttaatgttttttgccacagcttttgcaacttaatactcaaatgagtaacatttgctgttttaaacattaatagcagcctttctctctttatacagctgtattgtctgaacttgcattgtgattggcctgtagagttgctgagagggctcgaggggtgggctggtatctcagaaagtgcctgacacactaaccaagctgagtttcctatgggaacaattgaagtaaactttttgttctggtcctttttggtcgaggagtaacaatacaaatggattttgggagtgactcaagaagtgaagaatgcacaagaatggatcacaagatggaatttatcaaaccctagccttgcttgttaaatttttttttttttttttttaagaatatctgtaatggtactgactttgcttgctttgaagtagctctttttttttttttttttttttttttgcagtaactgttttttaagtctctcgtagtgttaagttatagtgaatactgctacagcaatttctaatttttaagaattgagtaatggtgtagaacactaattcataatcactctaattaattgtaatctgaataaagtgtaacaattgtgtagcctttttgtataaaatagacaaatagaaaatggtccaattagtttcctttttaatatgcttaaaataagcaggtggatctatttcatgtttttgatcaaaaactatttgggatatgtatgggtagggtaaatcagtaagaggtgttatttggaaccttgttttggacagtttaccagttgccttttatcccaaagttgttgtaacctgctgtgatacgatgcttcaagagaaaatgcggttataaaaaatggttcagaattaaacttttaattcattcga

SEQ ID NO: 847 - DNA, 3268 bp, Homo sapiens
  source 1..3268: mol_type = genomic DNA
gctgcgccggtggcggcaggatacagcggcttctgcgcgacttataagagctccttgtgcggcgccattttaagcctctcggtctgtggcagcagcgttggcccggccccgggagcggagagcgaggggaggcggagacggaggaaggtctgaggagcagcttcagtccccgccgagccgccaccgcaggtcgaggacggtcggactcccgcggcgggaggagcctgttcccctgagggtatttgaagtataccatacaactgttttgaaaatccagcgtggacaatggctactcaagctgatttgatggagttggacatggccatggaaccagacagaaaagcggctgttagtcactggcagcaacagtcttacctggactctggaatccattctggtgccactaccacagctccttctctgagtggtaaaggcaatcctgaggaagaggatgtggatacctcccaagtcctgtatgagtgggaacagggattttctcagtccttcactcaagaacaagtagctgatattgatggacagtatgcaatgactcgagctcagagggtacgagctgctatgttccctgagacattagatgagggcatgcagatcccatctacacagtttgatgctgctcatcccactaatgtccagcgtttggctgaaccatcacagatgctgaaacatgcagttgtaaacttgattaactatcaagatgatgcagaacttgccacacgtgcaatccctgaactgacaaaactgctaaatgacgaggaccaggtggtggttaataaggctgcagttatggtccatcagctttctaaaaaggaagcttccagacacgctatcatgcgttctcctcagatggtgtctgctattgtacgtaccatgcagaatacaaatgatgtagaaacagctcgttgtaccgctgggaccttgcataacctttcccatcatcgtgagggcttactggccatctttaagtctggaggcattcctgccctggtgaaaatgcttggttcaccagtggattctgtgttgttttatgccattacaactctccacaaccttttattacatcaagaaggagctaaaatggcagtgcgtttagctggtgggctgcagaaaatggttgccttgctcaacaaaacaaatgttaaattcttggctattacgacagactgccttcaaattttagcttatggcaaccaagaaagcaagctcatcatactggctagtggtggaccccaagctttagtaaatataatgaggacctatacttacgaaaaactactgtggaccacaagcagagtgctgaaggtgctatctgtctgctctagtaataagccggctattgtagaagctggtggaatgcaagctttaggacttcacctgacagatccaagtcaacgtcttgttcagaactgtctttggactctcaggaatctttcagatgctgcaactaaacaggaagggatggaaggtctccttgggactcttgttcagcttctgggttcagatgatataaatgtggtcacctgtgcagctggaattctttctaacctcacttgcaataattataagaacaagatgatggtctgccaagtgggtggtatagaggctcttgtgcgtactgtccttcgggctggtgacagggaagacatcactgagcctgccatctgtgctcttcgtcatctgaccagccgacaccaagaagcagagatggcccagaatgcagttcgccttcactatggactaccagttgtggttaagctcttacacccaccatcccactggcctctgataaaggctactgttggattgattcgaaatcttgccctttgtcccgcaaatcatgcacctttgcgtgagcagggtgccattccacgactagttcagttgcttgttcgtgcacatcaggatacccagcgccgtacgtccatgggtgggacacagcagcaatttgtggagggggtccgcatggaagaaatagttgaaggttgtaccggagcccttcacatcctagctcgggatgttcacaaccgaattgttatcagaggactaaataccattccattgtttgtgcagctgctttattctcccattgaaaacatccaaagagtagctgcaggggtcctctgtgaacttgctcaggacaaggaagctgcagaagctattgaagctgagggagccacagctcctctgacagagttacttcactctaggaatgaaggtgtggcgacatatgcagctgctgttttgttccgaatgtctgaggacaagccacaagattacaagaaacggctttcagttgagctgaccagctctctcttcagaacagagccaatggcttggaatgagactgctgatcttggacttgatattggtgcccagggagaaccccttggatatcgccaggatgatcctagctatcgttcttttcactctggtggatatggccaggatgccttgggtatggaccccatgatggaacatgagatgggtggccaccaccctggtgctgactatccagttgatgggctgccagatctggggcatgcccaggacctcatggatgggctgcctccaggtgacagcaatcagctggcctggtttgatactgacctgtaaatcatcctttaggagtaacaatacaaatggattttgggagtgactcaagaagtgaagaatgcacaagaatggatcacaagatggaatttatcaaaccctagccttgcttgttaaatttttttttttttttttttaagaatatctgtaatggtactgactttgcttgctttgaagtagctctttttttttttttttttttttttttgcagtaactgttttttaagtctctcgtagtgttaagttatagtgaatactgctacagcaatttctaatttttaagaattgagtaatggtgtagaacactaattcataatcactctaattaattgtaatctgaataaagtgtaacaattgtgtagcctttttgtataaaatagacaaatagaaaatggtccaattagtttcctttttaatatgcttaaaataagcaggtggatctatttcatgtttttgatcaaaaactatttgggatatgtatgggtagggtaaatcagtaagaggtgttatttggaaccttgttttggacagtttaccagttgccttttatcccaaagttgttgtaacctgctgtgatacgatgcttcaagagaaaatgcggttataaaaaatggttcagaattaaacttttaattcattc

SEQ ID NO: 848 - DNA, 3356 bp, Homo sapiens
  source 1..3356: mol_type = genomic DNA
aagcctctcggtctgtggcagcagcgttggcccggccccgggagcggagagcgaggggaggcggagacggaggaaggtctgaggagcagcttcagtccccgccgagccgccaccgcaggtcgaggacggtcggactcccgcggcgggaggagcctgttcccctgagggtatttgaagtataccatacaactgttttgaaaatccagcgtggacaatggctactcaagctgatttgatggagttggacatggccatggaaccagacagaaaagcggctgttagtcactggcagcaacagtcttacctggactctggaatccattctggtgccactaccacagctccttctctgagtggtaaaggcaatcctgaggaagaggatgtggatacctcccaagtcctgtatgagtgggaacagggattttctcagtccttcactcaagaacaagtagctgatattgatggacagtatgcaatgactcgagctcagagggtacgagctgctatgttccctgagacattagatgagggcatgcagatcccatctacacagtttgatgctgctcatcccactaatgtccagcgtttggctgaaccatcacagatgctgaaacatgcagttgtaaacttgattaactatcaagatgatgcagaacttgccacacgtgcaatccctgaactgacaaaactgctaaatgacgaggaccaggtggtggttaataaggctgcagttatggtccatcagctttctaaaaaggaagcttccagacacgctatcatgcgttctcctcagatggtgtctgctattgtacgtaccatgcagaatacaaatgatgtagaaacagctcgttgtaccgctgggaccttgcataacctttcccatcatcgtgagggcttactggccatctttaagtctggaggcattcctgccctggtgaaaatgcttggttcaccagtggattctgtgttgttttatgccattacaactctccacaaccttttattacatcaagaaggagctaaaatggcagtgcgtttagctggtgggctgcagaaaatggttgccttgctcaacaaaacaaatgttaaattcttggctattacgacagactgccttcaaattttagcttatggcaaccaagaaagcaagctcatcatactggctagtggtggaccccaagctttagtaaatataatgaggacctatacttacgaaaaactactgtggaccacaagcagagtgctgaaggtgctatctgtctgctctagtaataagccggctattgtagaagctggtggaatgcaagctttaggacttcacctgacagatccaagtcaacgtcttgttcagaactgtctttggactctcaggaatctttcagatgctgcaactaaacaggaagggatggaaggtctccttgggactcttgttcagcttctgggttcagatgatataaatgtggtcacctgtgcagctggaattctttctaacctcacttgcaataattataagaacaagatgatggtctgccaagtgggtggtatagaggctcttgtgcgtactgtccttcgggctggtgacagggaagacatcactgagcctgccatctgtgctcttcgtcatctgaccagccgacaccaagaagcagagatggcccagaatgcagttcgccttcactatggactaccagttgtggttaagctcttacacccaccatcccactggcctctgataaaggctactgttggattgattcgaaatcttgccctttgtcccgcaaatcatgcacctttgcgtgagcagggtgccattccacgactagttcagttgcttgttcgtgcacatcaggatacccagcgccgtacgtccatgggtgggacacagcagcaatttgtggagggggtccgcatggaagaaatagttgaaggttgtaccggagcccttcacatcctagctcgggatgttcacaaccgaattgttatcagaggactaaataccattccattgtttgtgcagctgctttattctcccattgaaaacatccaaagagtagctgcaggggtcctctgtgaacttgctcaggacaaggaagctgcagaagctattgaagctgagggagccacagctcctctgacagagttacttcactctaggaatgaaggtgtggcgacatatgcagctgctgttttgttccgaatgtctgaggacaagccacaagattacaagaaacggctttcagttgagctgaccagctctctcttcagaacagagccaatggcttggaatgagactgctgatcttggacttgatattggtgcccagggagaaccccttggatatcgccaggatgatcctagctatcgttcttttcactctggtggatatggccaggatgccttgggtatggaccccatgatggaacatgagatgggtggccaccaccctggtgctgactatccagttgatgggctgccagatctggggcatgcccaggacctcatggatgggctgcctccaggtgacagcaatcagctggcctggtttgatactgacctgtaaatcatcctttagctgtattgtctgaacttgcattgtgattggcctgtagagttgctgagagggctcgaggggtgggctggtatctcagaaagtgcctgacacactaaccaagctgagtttcctatgggaacaattgaagtaaactttttgttctggtcctttttggtcgaggagtaacaatacaaatggattttgggagtgactcaagaagtgaagaatgcacaagaatggatcacaagatggaatttatcaaaccctagccttgcttgttaaatttttttttttttttttttaagaatatctgtaatggtactgactttgcttgctttgaagtagctctttttttttttttttttttttttttgcagtaactgttttttaagtctctcgtagtgttaagttatagtgaatactgctacagcaatttctaatttttaagaattgagtaatggtgtagaacactaattcataatcactctaattaattgtaatctgaataaagtgtaacaattgtgtagcctttttgtataaaatagacaaatagaaaatggtccaattagtttcctttttaatatgcttaaaataagcaggtggatctatttcatgtttttgatcaaaaactatttgggatatgtatgggtagggtaaatcagtaagaggtgttatttggaaccttgttttggacagtttaccagttgccttttatcccaaagttgttgtaacctgctgtgatacgatgcttcaagagaaaatgcggttataaaaaatggttcagaattaaacttttaattcattc

SEQ ID NO: 849 - DNA, 2513 bp, Homo sapiens
  source 1..2513: mol_type = genomic DNA
aaagagggacggaatactgcagtgctagggtgctggagtccagaaatgattttttcgatgaatttaggattttgccgcagtatacatctgcagtcccagaatcctccgggtatttgaagtataccatacaactgttttgaaaatccagcgtggacaatggctactcaagctgatttgatggagttggacatggccatggaaccagacagaaaagcggctgttagtcactggcagcaacagtcttacctggactctggaatccattctggtgccactaccacagctccttctctgagtggtaaaggcaatcctgaggaagaggatgtggatacctcccaagtcctgtatgagtgggaacagggattttctcagtccttcactcaagaacaagtagctgatattgatggacagtatgcaatgactcgagctcagagggtacgagctgctatgttccctgagacattagatgagggcatgcagatcccatctacacagtttgatgctgctcatcccactaatgtccagcgtttggctgaaccatcacagatgctgaaacatgcagttgtaaacttgattaactatcaagatgatgcagaacttgccacacgtgcaatccctgaactgacaaaactgctaaatgacgaggaccaggtggtggttaataaggctgcagttatggtccatcagctttctaaaaaggaagcttccagacacgctatcatgcgttctcctcagatggtgtctgctattgtacgtaccatgcagaatacaaatgatgtagaaacagctcgttgtaccgctgggaccttgcataacctttcccatcatcgtgagggcttactggccatctttaagtctggaggcattcctgccctggtgaaaatgcttggttcaccagtggattctgtgttgttttatgccattacaactctccacaaccttttattacatcaagaaggagctaaaatggcagtgcgtttagctggtgggctgcagaaaatggttgccttgctcaacaaaacaaatgttaaattcttggctattacgacagactgccttcaaattttagcttatggcaaccaagaaagcaagctcatcatactggctagtggtggaccccaagctttagtaaatataatgaggacctatacttacgaaaaactactgtggaccacaagcagagtgctgaaggtgctatctgtctgctctagtaataagccggctattgtagaagctggtggaatgcaagctttaggacttcacctgacagatccaagtcaacgtcttgttcagaactgtctttggactctcaggaatctttcagatgctgcaactaaacaggaagggatggaaggtctccttgggactcttgttcagcttctgggttcagatgatataaatgtggtcacctgtgcagctggaattctttctaacctcacttgcaataattataagaacaagatgatggtctgccaagtgggtggtatagaggctcttgtgcgtactgtccttcgggctggtgacagggaagacatcactgagcctgccatctgtgctcttcgtcatctgaccagccgacaccaagaagcagagatggcccagaatgcagttcgccttcactatggactaccagttgtggttaagctcttacacccaccatcccactggcctctgataaaggctactgttggattgattcgaaatcttgccctttgtcccgcaaatcatgcacctttgcgtgagcagggtgccattccacgactagttcagttgcttgttcgtgcacatcaggatacccagcgccgtacgtccatgggtgggacacagcagcaatttgtggagggggtccgcatggaagaaatagttgaaggttgtaccggagcccttcacatcctagctcgggatgttcacaaccgaattgttatcagaggactaaataccattccattgtttgtgcagctgctttattctcccattgaaaacatccaaagagtagctgcaggggtcctctgtgaacttgctcaggacaaggaagctgcagaagctattgaagctgagggagccacagctcctctgacagagttacttcactctaggaatgaaggtgtggcgacatatgcagctgctgttttgttccgaatgtctgaggacaagccacaagattacaagaaacggctttcagttgagctgaccagctctctcttcagaacagagccaatggcttggaatgagactgctgatcttggacttgatattggtgcccagggagaaccccttggatatcgccaggatgatcctagctatcgttcttttcactctggtggatatggccaggatgccttgggtatggaccccatgatggaacatgagatgggtggccaccaccctggtgctgactatccagttgatgggctgccagatctggggcatgcccaggacctcatggatgggctgcctccaggtgacagcaatcagctggcctggtttgatactgacctgtaaatcatccttta

SEQ ID NO: 850 - DNA, 634 bp, Homo sapiens
  source 1..634: mol_type = genomic DNA
aggtactcctaaggacttgttgaattgcgggcttggcgcccgttctacggagagttcacagccttcgtgagtggggacagaaggcggctcggcccggtgattcaggtcgaaattcaagctgaacagcctgctgagagggtatttgaagtataccatacaactgttttgaaaatccagcgtggacaatggctactcaagctgatttgatggagttggacatggccatggaaccagacagaaaagcggctgttagtcactggcagcaacagtcttacctggactctggaatccattctggtgccactaccacagctccttctctgagtggtaaaggcaatcctgaggaagaggatgtggatacctcccaagtcctgtatgagtgggaacagggattttctcagtccttcactcaagaacaagtagctgatattgatggacagtatgcaatgactcgagctcagagggtacgagctgctatgttccctgagacattagatgagggcatgcagatcccatctacacagtttgatgctgctcatcccactaatgtccagcgtttggctgaaccatcacagatgctgaaacatgcagttgtaaacttgattaactatcaagatgatgcagaacttgccac

SEQ ID NO: 851 - DNA, 596 bp, Homo sapiens
  source 1..596: mol_type = genomic DNA
acataattttttgtttaagatccagtaagactccctgtttttaatacatataaagcaacagacatgtatatgtcgataaactgagggtttgcgtccctattgcctggtgcaagctacagcaaaaaaccggtgatatcacatctacaaatctcaatggattcaaaaacaatatgaaaatttttagctgacaagaacatgtctgctgcctgcagtccctgcaatagctcaccatgttgcctactaaccaaaagatcaaaaattatcgatttcatggcgctgcgaggtctggaaagaaaagctactttaaaatttgcattgtttaagaaatgacttaaaagaaaagaatcatttttttttctgaatactttggaaggtgaaaatggcttgttttaatcttatccatgatttactataattctattatttttagcagctggagtccagaaatgattttttcgatgaatttaggattttgccgcagtatacatctgcagtcccagaatcctccgggtatttgaagtataccatacaactgttttgaaaatccagcgtggacaatggctactcaagctgatttgatggagttggacatggcc

SEQ ID NO: 852 - DNA, 608 bp, Homo sapiens
  source 1..608: mol_type = genomic DNA
aaaattttcctgaagtgattggtaagttttggctaattgggagcactagaattgggcccttaatggttggcagggtgtggtggaggagagacagcccttagtccaaaggctcaggccagaaaaagaaagaggaaggctttccttttcctttccggagcagggttctgccctaggtcttgcttggcagtctatttgatttctttagcagttaatgctcagttttttggcatatgtggatctgcctccagagcaggtacaagggtatttgaagtataccatacaactgttttgaaaatccagcgtggacaatggctactcaagctgatttgatggagttggacatggccatggaaccagacagaaaagcggctgttagtcactggcagcaacagtcttacctggactctggaatccattctggtgccactaccacagctccttctctgagtggtaaaggcaatcctgaggaagaggatgtggatacctcccaagtcctgtatgagtgggaacagggattttctcagtccttcactcaagaacaagtagctgatattgatggacagtatgcaatgactcgagctcagagggtacgagctgctatgttccct

SEQ ID NO: 853 - DNA, 645 bp, Homo sapiens
  source 1..645: mol_type = genomic DNA
agttggggttcgggcgctgaggcagagacgccaccctaagtcccatcagtcctggggatcggaccagtggactttctcttaagatttcctctttcattcttaagaatagaagtgttattattttttttaatgccctggctatgtgagtttgaatcgaagcaactttaaaccttagagcaactaaactctaagtgcagcgggtgcgatgcgtcagtagggtgagcacataaaaaatccatgtcttgcacctgtattttagcgtactatgcagggtatttgaagtataccatacaactgttttgaaaatccagcgtggacaatggctactcaagctgatttgatggagttggacatggccatggaaccagacagaaaagcggctgttagtcactggcagcaacagtcttacctggactctggaatccattctggtgccactaccacagctccttctctgagtggtaaaggcaatcctgaggaagaggatgtggatacctcccaagtcctgtatgagtgggaacagggattttctcagtccttcactcaagaacaagtagctgatattgatggacagtatgcaatgactcgagctcagagggtacgagctgctatgttccctgagacattagatgagggcatgcagat

SEQ ID NO: 854 - DNA, 2841 bp, Homo sapiens
  source 1..2841: mol_type = genomic DNA
ggcggcaggatacagcggcttctgcgcgacttataagagctccttgtgcggcgccattttaagcctctcggtctgtggcagcagcgttggcccggccccgggagcggagagcgaggggaggcggagacggaggaaggtctgaggagcagcttcagtccccgccgagccgccaccgcaggtcgaggacggtcggactcccgcggcgggaggagcctgttcccctgagggtatttgaagtataccatacaactgttttgaaaatccagcgtggacaatggctactcaaggctaccttttgctccattttctgctcactcctcctaatggcttggtgaaatagcaaacaagccaccagcaggaatctagtctggatgactgcttctggagcctggatgcagtaccattcttccactgattcactgatttgatggagttggacatggccatggaaccagacagaaaagcggctgttagtcactggcagcaacagtcttacctggactctggaatccattctggtgccactaccacagctccttctctgagtggtaaaggcaatcctgaggaagaggatgtggatacctcccaagtcctgtatgagtgggaacagggattttctcagtccttcactcaagaacaagtagctgatattgatggacagtatgcaatgactcgagctcagagggtacgagctgctatgttccctgagacattagatgagggcatgcagatcccatctacacagtttgatgctgctcatcccactaatgtccagcgtttggctgaaccatcacagatgctgaaacatgcagttgtaaacttgattaactatcaagatgatgcagaacttgccacacgtgcaatccctgaactgacaaaactgctaaatgacgaggaccaggtggtggttaataaggctgcagttatggtccatcagctttctaaaaaggaagcttccagacacgctatcatgcgttctcctcagatggtgtctgctattgtacgtaccatgcagaatacaaatgatgtagaaacagctcgttgtaccgctgggaccttgcataacctttcccatcatcgtgagggcttactggccatctttaagtctggaggcattcctgccctggtgaaaatgcttggttcaccagtggattctgtgttgttttatgccattacaactctccacaaccttttattacatcaagaaggagctaaaatggcagtgcgtttagctggtgggctgcagaaaatggttgccttgctcaacaaaacaaatgttaaattcttggctattacgacagactgccttcaaattttagcttatggcaaccaagaaagcaagctcatcatactggctagtggtggaccccaagctttagtaaatataatgaggacctatacttacgaaaaactactgtggaccacaagcagagtgctgaaggtgctatctgtctgctctagtaataagccggctattgtagaagctggtggaatgcaagctttaggacttcacctgacagatccaagtcaacgtcttgttcagaactgtctttggactctcaggaatctttcagatgctgcaactaaacaggaagggatggaaggtctccttgggactcttgttcagcttctgggttcagatgatataaatgtggtcacctgtgcagctggaattctttctaacctcacttgcaataattataagaacaagatgatggtctgccaagtgggtggtatagaggctcttgtgcgtactgtccttcgggctggtgacagggaagacatcactgagcctgccatctgtgctcttcgtcatctgaccagccgacaccaagaagcagagatggcccagaatgcagttcgccttcactatggactaccagttgtggttaagctcttacacccaccatcccactggcctctgataaaggctactgttggattgattcgaaatcttgccctttgtcccgcaaatcatgcacctttgcgtgagcagggtgccattccacgactagttcagttgcttgttcgtgcacatcaggatacccagcgccgtacgtccatgggtgggacacagcagcaatttgtggagggggtccgcatggaagaaatagttgaaggttgtaccggagcccttcacatcctagctcgggatgttcacaaccgaattgttatcagaggactaaataccattccattgtttgtgcagctgctttattctcccattgaaaacatccaaagagtagctgcaggggtcctctgtgaacttgctcaggacaaggaagctgcagaagctattgaagctgagggagccacagctcctctgacagagttacttcactctaggaatgaaggtgtggcgacatatgcagctgctgttttgttccgaatgtctgaggacaagccacaagattacaagaaacggctttcagttgagctgaccagctctctcttcagaacagagccaatggcttggaatgagactgctgatcttggacttgatattggtgcccagggagaaccccttggatatcgccaggatgatcctagctatcgttcttttcactctggtggatatggccaggatgccttgggtatggaccccatgatggaacatgagatgggtggccaccaccctggtgctgactatccagttgatgggctgccagatctggggcatgcccaggacctcatggatgggctgcctccaggtgacagcaatcagctggcctggtttgatactgacctgtaaatcatcctttagctgtattgtctgaacttgcattgtgattggcctgtagagttgctgagagggctcgaggggtgggctggtatctcaga

SEQ ID NO: 855 - DNA, 2028 bp, Homo sapiens
  source 1..2028: mol_type = genomic DNA
ggctccggcaaccgctccggcaacgccaaccgctccgctgcgcgcaggctgggctgcaggctctcggctgcagcgctgggtgtcttcaggcctatggagagcagcttgcgtgggctgggcctgcagtacctggtttgcatagatgattggcaggtgggcagcacggggaaggacctgtgagtggccaacctggttcaggtggatctaggatccggcttccaacatgtggcagctctgggcctccctctgctgcctgctggtgttggccaatgcccggagcaggccctctttccatcccctgtcggatgagctggtcaactatgtcaacaaacggaataccacgtggcaggccgggcacaacttctacaacgtggacatgagctacttgaagaggctatgtggtaccttcctgggtgggcccaagccaccccagagagttatgtttaccgaggacctgaagctgcctgcaagcttcgatgcacgggaacaatggccacagtgtcccaccatcaaagagatcagagaccagggctcctgtggctcctgctgggccttcggggctgtggaagccatctctgaccggatctgcatccacaccaatgcgcacgtcagcgtggaggtgtcggcggaggacctgctcacatgctgtggcagcatgtgtggggacggctgtaatggtggctatcctgctgaagcttggaacttctggacaagaaaaggcctggtttctggtggcctctatgaatcccatgtagggtgcagaccgtactccatccctccctgtgagcaccacgtcaacggctcccggcccccatgcacgggggagggagatacccccaagtgtagcaagatctgtgagcctggctacagcccgacctacaaacaggacaagcactacggatacaattcctacagcgtctccaatagcgagaaggacatcatggccgagatctacaaaaacggccccgtggagggagctttctctgtgtattcggacttcctgctctacaagtcaggagtgtaccaacacgtcaccggagagatgatgggtggccatgccatccgcatcctgggctggggagtggagaatggcacaccctactggctggttgccaactcctggaacactgactggggtgacaatggcttctttaaaatactcagaggacaggatcactgtggaatcgaatcagaagtggtggctggaattccacgcaccgatcagtactgggaaaagatctaatctgccgtgggcctgtcgtgccagtcctgggggcgagatcggggtagaaatgcattttattctttaagttcacgtaagatacaagtttcagacagggtctgaaggactggattggccaaacatcagacctgtcttccaaggagaccaagtcctggctacatcccagcctgtggttacagtgcagacaggccatgtgagccaccgctgccagcacagagcgtccttccccctgtagactagtgccgtagggagtacctgctgccccagctgactgtggccccctccgtgatccatccatctccagggagcaagacagagacgcaggaatggaaagcggagttcctaacaggatgaaagttcccccatcagttcccccagtacctccaagcaagtagctttccacatttgtcacagaaatcagaggagagacggtgttgggagccctttggagaacgccagtctcccaggccccctgcatctatcgagtttgcaatgtcacaacctctctgatcttgtgctcagcatgattctttaatagaagttttattttttcgtgcactctgctaatcatgtgggtgagccagtggaacagcgggagacctgtgctagttttacagattgcctccttatgacgcggctcaaaaggaaaccaagtggtcaggagttgtttctgacccactgatctctactaccacaaggaaaatagtttaggagaaaccagcttttactgtttttgaaaaattacagcttcaccctgtcaagttaacaaggaatgcctgtgccaa

SEQ ID NO: 856 - DNA, 3591 bp, Homo sapiens
  source 1..3591: mol_type = genomic DNA
gggcggcggaaggtggcgggagggggtgggggctgggaagcaccgtgcgcgggcggcgggagggcccgggcggggctgcgcggtggtcacgtggggcggggccgggagggtacttagggccggggctggcccaggctacggcggctgcagggctccggcaaccgctccggcaacgccaaccgctccgctgcgcgcaggctgggctgcaggctctcggctgcagcgctgggtggatctaggatccggcttccaacatgtggcagctctgggcctccctctgctgcctgctggtgttggccaatgcccggagcaggccctctttccatcccctgtcggatgagctggtcaactatgtcaacaaacggaataccacgtggcaggccgggcacaacttctacaacgtggacatgagctacttgaagaggctatgtggtaccttcctgggtgggcccaagccaccccagagagttatgtttaccgaggacctgaagctgcctgcaagcttcgatgcacgggaacaatggccacagtgtcccaccatcaaagagatcagagaccagggctcctgtggctcctgctgggccttcggggctgtggaagccatctctgaccggatctgcatccacaccaatgcgcacgtcagcgtggaggtgtcggcggaggacctgctcacatgctgtggcagcatgtgtggggacggctgtaatggtggctatcctgctgaagcttggaacttctggacaagaaaaggcctggtttctggtggcctctatgaatcccatgtagggtgcagaccgtactccatccctccctgtgagcaccacgtcaacggctcccggcccccatgcacgggggagggagatacccccaagtgtagcaagatctgtgagcctggctacagcccgacctacaaacaggacaagcactacggatacaattcctacagcgtctccaatagcgagaaggacatcatggccgagatctacaaaaacggccccgtggagggagctttctctgtgtattcggacttcctgctctacaagtcaggagtgtaccaacacgtcaccggagagatgatgggtggccatgccatccgcatcctgggctggggagtggagaatggcacaccctactggctggttgccaactcctggaacactgactggggtgacaatggcttctttaaaatactcagaggacaggatcactgtggaatcgaatcagaagtggtggctggaattccacgcaccgatcagtactgggaaaagatctaatctgccgtgggcctgtcgtgccagtcctgggggcgagatcggggtagaaatgcattttattctttaagttcacgtaagatacaagtttcagacagggtctgaaggactggattggccaaacatcagacctgtcttccaaggagaccaagtcctggctacatcccagcctgtggttacagtgcagacaggccatgtgagccaccgctgccagcacagagcgtccttccccctgtagactagtgccgtagggagtacctgctgccccagctgactgtggccccctccgtgatccatccatctccagggagcaagacagagacgcaggaatggaaagcggagttcctaacaggatgaaagttcccccatcagttcccccagtacctccaagcaagtagctttccacatttgtcacagaaatcagaggagagacggtgttgggagccctttggagaacgccagtctcccaggccccctgcatctatcgagtttgcaatgtcacaacctctctgatcttgtgctcagcatgattctttaatagaagttttattttttcgtgcactctgctaatcatgtgggtgagccagtggaacagcgggagacctgtgctagttttacagattgcctccttatgacgcggctcaaaaggaaaccaagtggtcaggagttgtttctgacccactgatctctactaccacaaggaaaatagtttaggagaaaccagcttttactgtttttgaaaaattacagcttcaccctgtcaagttaacaaggaatgcctgtgccaataaaagttttctccaacttgaagtctactctgatgggatctcagatcctttgtcactgcctatagacttgtagctgctgtctctctttgtccctgcagagaatcacgtcctggaactgcatgttcttgcgactcttgggacttcatcttaacttctcgctgccccagccatgttttcaaccatggcatccctcccccaattagttccctgtcatcctcgtcaaccttctctgtaagtgcctggtaagcttgcccttgcttaagaactcaaaacatagctgtgctctatttttttgttgttgttgtgactgacagagtgagattccgtctcccaggctggagtgcagtggcgccttctcagctcactgcaacctgcagcctcctagattcaagcgattctcctgcttcagccttccgagtagctgggatgacaggcactcaccaatatgcctgggtaatttttgtatttttaagtacatacaggatttcaccatgttggccaggctagtttcaaactcccggcctcaggtggtctgcctgcctcagcctcccaaagtgttgggattacaggcgtgagccactgggccctgcctgtattttttatcagccacaaatccagcaacaagctgaggattcagctcataaaacaggcttggtgtcttggtgatctcacataaccaagatgctaccccgtggggaaccacatccccctggatgccctccagccttggtttgggctggagtcagggcctgtatacagtattttgaatttgtatgccactggtttgcattgctggtcaggaactctagtgctttgcatagccctggtttagaaacatgttatagcagttcttggtatagagcaaactagaagaaccagcaatcattccactgtcctgccaaggtacacctcagtactccccttcccaactgaagtggtatgaggctagctctttccaaaagcattcaagtttggcttctgatgtgactcagaatttaggaaccagatgctagatcaaataagctctgaaaatctgaggaacattgtaggaaaggtttgttaagcatctcttaagtgccatgatgagcataacagccggccgtcgtggctcacgcctgtaatcccagcactttgggaggccaaggtgggaggatgacaaggtcaggagttcaagaccagcctggccaacatgctgaaacctcacctctactaaaaatacaaaaattagctgggcatggtggcacatgcctgtaatcccagctacttgggaggctgaggcaggagaatcgcttgaacccgggaggcggaggttgcagtgagccaagacagtgccagtgcactccagcctcggtgacagcgcaaggctccgtctcaataattaaaaaaaaaaaaaaaaaaaaaaaggccgggcgcagtggctcaagcctgtaatcccagcactttgggaggctgaggcgggcagatcacctgaggtcaggagttttgagatcagccttggcaacacggtgaaaccccatctctactaaaaatac

SEQ ID NO: 857 - DNA, 1772 bp, Homo sapiens
  source 1..1772: mol_type = genomic DNA
cgacccacataacagagaggtgtcctgatgccctctgtcctctccaggtggatctaggatccggcttccaacatgtggcagctctgggcctccctctgctgcctgctggtgttggccaatgcccggagcaggccctctttccatcccctgtcggatgagctggtcaactatgtcaacaaacggaataccacgtggcaggccgggcacaacttctacaacgtggacatgagctacttgaagaggctatgtggtaccttcctgggtgggcccaagccaccccagagagttatgtttaccgaggacctgaagctgcctgcaagcttcgatgcacgggaacaatggccacagtgtcccaccatcaaagagatcagagaccagggctcctgtggctcctgctggctgtaatggtggctatcctgctgaagcttggaacttctggacaagaaaaggcctggtttctggtggcctctatgaatcccatgtagggtgcagaccgtactccatccctccctgtgagcaccacgtcaacggctcccggcccccatgcacgggggagggagatacccccaagtgtagcaagatctgtgagcctggctacagcccgacctacaaacaggacaagcactacggatacaattcctacagcgtctccaatagcgagaaggacatcatggccgagatctacaaaaacggccccgtggagggagctttctctgtgtattcggacttcctgctctacaagtcaggagtgtaccaacacgtcaccggagagatgatgggtggccatgccatccgcatcctgggctggggagtggagaatggcacaccctactggctggttgccaactcctggaacactgactggggtgacaatggcttctttaaaatactcagaggacaggatcactgtggaatcgaatcagaagtggtggctggaattccacgcaccgatcagtactgggaaaagatctaatctgccgtgggcctgtcgtgccagtcctgggggcgagatcggggtagaaatgcattttattctttaagttcacgtaagatacaagtttcagacagggtctgaaggactggattggccaaacatcagacctgtcttccaaggagaccaagtcctggctacatcccagcctgtggttacagtgcagacaggccatgtgagccaccgctgccagcacagagcgtccttccccctgtagactagtgccgtagggagtacctgctgccccagctgactgtggccccctccgtgatccatccatctccagggagcaagacagagacgcaggaatggaaagcggagttcctaacaggatgaaagttcccccatcagttcccccagtacctccaagcaagtagctttccacatttgtcacagaaatcagaggagagacggtgttgggagccctttggagaacgccagtctcccaggccccctgcatctatcgagtttgcaatgtcacaacctctctgatcttgtgctcagcatgattctttaatagaagttttattttttcgtgcactctgctaatcatgtgggtgagccagtggaacagcgggagacctgtgctagttttacagattgcctccttatgacgcggctcaaaaggaaaccaagtggtcaggagttgtttctgacccactgatctctactaccacaaggaaaatagtttaggagaaaccagcttttactgtttttgaaaaattacagcttcaccctgtcaagttaacaaggaatgcctgtgccaataaaagttttctcc

SEQ ID NO: 858 - DNA, 3859 bp, Homo sapiens
  source 1..3859: mol_type = genomic DNA
ggggcggggccgggagggtacttagggccggggctggcccaggctacggcggctgcagggctccggcaaccgctccggcaacgccaaccgctccgctgcgcgcaggctgggctgcaggctctcggctgcagcgctgggtgagtgctggggacccggggccaccgcagcgtaagtgacccagagaggtgtcctgatgccctctgtcctctccaggtggatctaggatccggcttccaacatgtggcagctctgggcctccctctgctgcctgctggtgttggccaatgcccggagcaggccctctttccatcccctgtcggatgagctggtcaactatgtcaacaaacggaataccacgtggcaggccgggcacaacttctacaacgtggacatgagctacttgaagaggctatgtggtaccttcctgggtgggcccaagccaccccagagagttatgtttaccgaggacctgaagctgcctgcaagcttcgatgcacgggaacaatggccacagtgtcccaccatcaaagagatcagagaccagggctcctgtggctcctgctgggccttcggggctgtggaagccatctctgaccggatctgcatccacaccaatgcgcacgtcagcgtggaggtgtcggcggaggacctgctcacatgctgtggcagcatgtgtggggacggctgtaatggtggctatcctgctgaagcttggaacttctggacaagaaaaggcctggtttctggtggcctctatgaatcccatgtagggtgcagaccgtactccatccctccctgtgagcaccacgtcaacggctcccggcccccatgcacgggggagggagatacccccaagtgtagcaagatctgtgagcctggctacagcccgacctacaaacaggacaagcactacggatacaattcctacagcgtctccaatagcgagaaggacatcatggccgagatctacaaaaacggccccgtggagggagctttctctgtgtattcggacttcctgctctacaagtcaggagtgtaccaacacgtcaccggagagatgatgggtggccatgccatccgcatcctgggctggggagtggagaatggcacaccctactggctggttgccaactcctggaacactgactggggtgacaatggcttctttaaaatactcagaggacaggatcactgtggaatcgaatcagaagtggtggctggaattccacgcaccgatcagtactgggaaaagatctaatctgccgtgggcctgtcgtgccagtcctgggggcgagatcggggtagaaatgcattttattctttaagttcacgtaagatacaagtttcagacagggtctgaaggactggattggccaaacatcagacctgtcttccaaggagaccaagtcctggctacatcccagcctgtggttacagtgcagacaggccatgtgagccaccgctgccagcacagagcgtccttccccctgtagactagtgccgtagggagtacctgctgccccagctgactgtggccccctccgtgatccatccatctccagggagcaagacagagacgcaggaatggaaagcggagttcctaacaggatgaaagttcccccatcagttcccccagtacctccaagcaagtagctttccacatttgtcacagaaatcagaggagagacggtgttgggagccctttggagaacgccagtctcccaggccccctgcatctatcgagtttgcaatgtcacaacctctctgatcttgtgctcagcatgattctttaatagaagttttattttttcgtgcactctgctaatcatgtgggtgagccagtggaacagcgggagacctgtgctagttttacagattgcctccttatgacgcggctcaaaaggaaaccaagtggtcaggagttgtttctgacccactgatctctactaccacaaggaaaatagtttaggagaaaccagcttttactgtttttgaaaaattacagcttcaccctgtcaagttaacaaggaatgcctgtgccaataaaagttttctccaacttgaagtctactctgatgggatctcagatcctttgtcactgcctatagacttgtagctgctgtctctctttgtccctgcagagaatcacgtcctggaactgcatgttcttgcgactcttgggacttcatcttaacttctcgctgccccagccatgttttcaaccatggcatccctcccccaattagttccctgtcatcctcgtcaaccttctctgtaagtgcctggtaagcttgcccttgcttaagaactcaaaacatagctgtgctctatttttttgttgttgttgtgactgacagagtgagattccgtctcccaggctggagtgcagtggcgccttctcagctcactgcaacctgcagcctcctagattcaagcgattctcctgcttcagccttccgagtagctgggatgacaggcactcaccaatatgcctgggtaatttttgtatttttaagtacatacaggatttcaccatgttggccaggctagtttcaaactcccggcctcaggtggtctgcctgcctcagcctcccaaagtgttgggattacaggcgtgagccactgggccctgcctgtattttttatcagccacaaatccagcaacaagctgaggattcagctcataaaacaggcttggtgtcttggtgatctcacataaccaagatgctaccccgtggggaaccacatccccctggatgccctccagccttggtttgggctggagtcagggcctgtatacagtattttgaatttgtatgccactggtttgcattgctggtcaggaactctagtgctttgcatagccctggtttagaaacatgttatagcagttcttggtatagagcaaactagaagaaccagcaatcattccactgtcctgccaaggtacacctcagtactccccttcccaactgaagtggtatgaggctagctctttccaaaagcattcaagtttggcttctgatgtgactcagaatttaggaaccagatgctagatcaaataagctctgaaaatctgaggaacattgtaggaaaggtttgttaagcatctcttaagtgccatgatgagcataacagccggccgtcgtggctcacgcctgtaatcccagcactttgggaggccaaggtgggaggatgacaaggtcaggagttcaagaccagcctggccaacatgctgaaacctcacctctactaaaaatacaaaaattagctgggcatggtggcacatgcctgtaatcccagctacttgggaggctgaggcaggagaatcgcttgaacccgggaggcggaggttgcagtgagccaagacagtgccagtgcactccagcctcggtgacagcgcaaggctccgtctcaataattaaaaaaaaaaaaaaaaaaaaaaaggccgggcgcagtggctcaagcctgtaatcccagcactttgggaggctgaggcgggcagatcacctgaggtcaggagttttgagatcagccttggcaacacggtgaaaccccatctctactaaaaatacaaaattagccaagcatgctggcacatgcctgtaatcccagctactcgggaggctgaggtacgagaatcgcttgaacctgggaggcagaggatgcagtgagccgagatcacgccattgcactccagcctgggggacaagagtgaatctgtgtctcaccaaaaaaaaaaagaaaaagaaagatgcttaacaaaggttaccataagccacaaattcataaccacttatccttccagtttcaagtagaatatattcataacctcaataaagttctccctgctcccaaa

SEQ ID NO: 859 - DNA, 2011 bp, Homo sapiens
  source 1..2011: mol_type = genomic DNA
ggctgcagggctccggcaaccgctccggcaacgccaaccgctccgctgcgcgcaggctgggctgcaggctctcggctgcagcgctgggtgtcttcaggcctatggagagcagcttgcgtgggctgggcctgcagtacctggtttgcatagatgattggcaggtggatctaggatccggcttccaacatgtggcagctctgggcctccctctgctgcctgctggtgttggccaatgcccggagcaggccctctttccatcccctgtcggatgagctggtcaactatgtcaacaaacggaataccacgtggcaggccgggcacaacttctacaacgtggacatgagctacttgaagaggctatgtggtaccttcctgggtgggcccaagccaccccagagagttatgtttaccgaggacctgaagctgcctgcaagcttcgatgcacgggaacaatggccacagtgtcccaccatcaaagagatcagagaccagggctcctgtggctcctgctgggccttcggggctgtggaagccatctctgaccggatctgcatccacaccaatgcgcacgtcagcgtggaggtgtcggcggaggacctgctcacatgctgtggcagcatgtgtggggacggctgtaatggtggctatcctgctgaagcttggaacttctggacaagaaaaggcctggtttctggtggcctctatgaatcccatgtagggtgcagaccgtactccatccctccctgtgagcaccacgtcaacggctcccggcccccatgcacgggggagggagatacccccaagtgtagcaagatctgtgagcctggctacagcccgacctacaaacaggacaagcactacggatacaattcctacagcgtctccaatagcgagaaggacatcatggccgagatctacaaaaacggccccgtggagggagctttctctgtgtattcggacttcctgctctacaagtcaggagtgtaccaacacgtcaccggagagatgatgggtggccatgccatccgcatcctgggctggggagtggagaatggcacaccctactggctggttgccaactcctggaacactgactggggtgacaatggcttctttaaaatactcagaggacaggatcactgtggaatcgaatcagaagtggtggctggaattccacgcaccgatcagtactgggaaaagatctaatctgccgtgggcctgtcgtgccagtcctgggggcgagatcggggtagaaatgcattttattctttaagttcacgtaagatacaagtttcagacagggtctgaaggactggattggccaaacatcagacctgtcttccaaggagaccaagtcctggctacatcccagcctgtggttacagtgcagacaggccatgtgagccaccgctgccagcacagagcgtccttccccctgtagactagtgccgtagggagtacctgctgccccagctgactgtggccccctccgtgatccatccatctccagggagcaagacagagacgcaggaatggaaagcggagttcctaacaggatgaaagttcccccatcagttcccccagtacctccaagcaagtagctttccacatttgtcacagaaatcagaggagagacggtgttgggagccctttggagaacgccagtctcccaggccccctgcatctatcgagtttgcaatgtcacaacctctctgatcttgtgctcagcatgattctttaatagaagttttattttttcgtgcactctgctaatcatgtgggtgagccagtggaacagcgggagacctgtgctagttttacagattgcctccttatgacgcggctcaaaaggaaaccaagtggtcaggagttgtttctgacccactgatctctactaccacaaggaaaatagtttaggagaaaccagcttttactgtttttgaaaaattacagcttcaccctgtcaagttaacaaggaatgcctgtgccaataaaagttttctccaacttg

SEQ ID NO: 860 - DNA, 1387 bp, Homo sapiens
  source 1..1387: mol_type = genomic DNA
ggccggggctggcccaggctacggcggctgcagggctccggcaaccgctccggcaacgccaaccgctccgctgcgcgcaggctgggctgcaggctctcggctgcagcgctgggtggatctaggatccggcttccaacatgtggcagctctgggcctccctctgctgcctgctggtgttggccaatgcccggagcaggccctctttccatcccctgtcggatgagctggtcaactatgtcaacaaacggaataccacgtggcaggccgggcacaacttctacaacgtggacatgagctacttgaagaggctatgtggtaccttcctgggtgggcccaagccaccccagagagttatgtttaccgaggacctgaagctgcctgcaagcttcgatgcacgggaacaatggccacagtgtcccaccatcaaagagatcagagaccagggctcctgtggctcctgctgggccttcggggctgtggaagccatctctgaccggatctgcatccacaccaatgcgcacgtcagcgtggaggtgtcggcggaggacctgctcacatgctgtggcagcatgtgtggggacggctgtaatggtggctatcctgctgaagcttggaacttctggacaagaaaaggcctggtttctggtggcctctatgaatcccatgtagggtgcagaccgtactccatccctccctgtgagcaccacgtcaacggctcccggcccccatgcacgggggagggagatacccccaagtgtagcaagatctgtgagcctggctacagcccgacctacaaacaggacaagcactacggatacaattcctacagcgtctccaatagcgagaaggacatcatggccgagatctacaaaaacggccccgtggagggagctttctctgtgtattcggacttcctgctctacaagtcaggagtgtaccaacacgtcaccggagagatgatgggtggccatgccatccgcatcctgggctggggagtggagaatggcacaccctactggctggttgccaactcctggaacactgactggggtgacaatggcttctttaaaatactcagaggacaggatcactgtggaatcgaatcagaagtggtggctggaattccacgcaccgatcagtactgggaaaagatctaatctgccgtgggcctgtcgtgccagtcctgggggcgagatcgggagaatcacgtcctggaactgcatgttcttgcgactcttgggacttcatcttaacttctcgctgccccagccatgttttcaaccatggcatccctcccccaattagttccctgtcatcctcgtcaaccttctctgtaagtgcctggtaagcttgcccttgcttaagaactcaaaacatagctgtgctc

SEQ ID NO: 861 - DNA, 1436 bp, Homo sapiens
  source 1..1436: mol_type = genomic DNA
ggccggggctggcccaggctacggcggctgcagggctccggcaaccgctccggcaacgccaaccgctccgctgcgcgcaggctgggctgcaggctctcggctgcagcgctgggctggtgtgcagtggtgcgaccacggctcacggcagcctcagccacccagatgtaagcgatctggttcccacctcagcctcccgagtagtggatctaggatccggcttccaacatgtggcagctctgggcctccctctgctgcctgctggtgttggccaatgcccggagcaggccctctttccatcccctgtcggatgagctggtcaactatgtcaacaaacggaataccacgtggcaggccgggcacaacttctacaacgtggacatgagctacttgaagaggctatgtggtaccttcctgggtgggcccaagccaccccagagagttatgtttaccgaggacctgaagctgcctgcaagcttcgatgcacgggaacaatggccacagtgtcccaccatcaaagagatcagagaccagggctcctgtggctcctgctgggccttcggggctgtggaagccatctctgaccggatctgcatccacaccaatgcgcacgtcagcgtggaggtgtcggcggaggacctgctcacatgctgtggcagcatgtgtggggacggctgtaatggtggctatcctgctgaagcttggaacttctggacaagaaaaggcctggtttctggtggcctctatgaatcccatgtagggtgcagaccgtactccatccctccctgtgagcaccacgtcaacggctcccggcccccatgcacgggggagggagatacccccaagtgtagcaagatctgtgagcctggctacagcccgacctacaaacaggacaagcactacggatacaattcctacagcgtctccaatagcgagaaggacatcatggccgagatctacaaaaacggccccgtggagggagctttctctgtgtattcggacttcctgctctacaagtcaggagtgtaccaacacgtcaccggagagatgatgggtggccatgccatccgcatcctgggctggggagtggagaatggcacaccctactggctggttgccaactcctggaacactgactggggtgacaatggcttctttaaaatactcagaggacaggatcactgtggaatcgaatcagaagtggtggctggaattccacgcaccgatcagtactgggaaaagatctaatctgccgtgggcctgtcgtgccagtcctgggggcgagatcgggagaatcacgtcctggaactgcatgttcttgcgactcttgggacttcatcttaacttctcgctgccccagccatgttttcaaccatggcatccctcccccaattagttccctgtcatcctcgtcaaccttctctgtaagtgcctggtaa

SEQ ID NO: 862 - DNA, 2009 bp, Homo sapiens
  source 1..2009: mol_type = genomic DNA
ggctggcccaggctacggcggctgcagggctccggcaaccgctccggcaacgccaaccgctccgctgcgcgcaggctgggctgcaggctctcggctgcagcgctgggctggtgtgcagtggtgcgaccacggctcacggcagcctcagccacccagatgtaagcgatctggttcccacctcagcctcccgagtagtggatctaggatccggcttccaacatgtggcagctctgggcctccctctgctgcctgctggtgttggccaatgcccggagcaggccctctttccatcccctgtcggatgagctggtcaactatgtcaacaaacggaataccacgtggcaggccgggcacaacttctacaacgtggacatgagctacttgaagaggctatgtggtaccttcctgggtgggcccaagccaccccagagagttatgtttaccgaggacctgaagctgcctgcaagcttcgatgcacgggaacaatggccacagtgtcccaccatcaaagagatcagagaccagggctcctgtggctcctgctgggccttcggggctgtggaagccatctctgaccggatctgcatccacaccaatgcgcacgtcagcgtggaggtgtcggcggaggacctgctcacatgctgtggcagcatgtgtggggacggctgtaatggtggctatcctgctgaagcttggaacttctggacaagaaaaggcctggtttctggtggcctctatgaatcccatgtagggtgcagaccgtactccatccctccctgtgagcaccacgtcaacggctcccggcccccatgcacgggggagggagatacccccaagtgtagcaagatctgtgagcctggctacagcccgacctacaaacaggacaagcactacggatacaattcctacagcgtctccaatagcgagaaggacatcatggccgagatctacaaaaacggccccgtggagggagctttctctgtgtattcggacttcctgctctacaagtcaggagtgtaccaacacgtcaccggagagatgatgggtggccatgccatccgcatcctgggctggggagtggagaatggcacaccctactggctggttgccaactcctggaacactgactggggtgacaatggcttctttaaaatactcagaggacaggatcactgtggaatcgaatcagaagtggtggctggaattccacgcaccgatcagtactgggaaaagatctaatctgccgtgggcctgtcgtgccagtcctgggggcgagatcggggtagaaatgcattttattctttaagttcacgtaagatacaagtttcagacagggtctgaaggactggattggccaaacatcagacctgtcttccaaggagaccaagtcctggctacatcccagcctgtggttacagtgcagacaggccatgtgagccaccgctgccagcacagagcgtccttccccctgtagactagtgccgtagggagtacctgctgccccagctgactgtggccccctccgtgatccatccatctccagggagcaagacagagacgcaggaatggaaagcggagttcctaacaggatgaaagttcccccatcagttcccccagtacctccaagcaagtagctttccacatttgtcacagaaatcagaggagagacggtgttgggagccctttggagaacgccagtctcccaggccccctgcatctatcgagtttgcaatgtcacaacctctctgatcttgtgctcagcatgattctttaatagaagttttattttttcgtgcactctgctaatcatgtgggtgagccagtggaacagcgggagacctgtgctagttttacagattgcctccttatgacgcggctcaaaaggaaaccaagtggtcaggagttgtttctgacccactgatctctactaccacaaggaaaatagtttaggagaaaccagcttttactgtttttgaaaaattacagcttcaccctgtcaagttaacaag

SEQ ID NO: 863 - DNA, 1989 bp, Homo sapiens
  source 1..1989: mol_type = genomic DNA
ggctggcccaggctacggcggctgcagggctccggcaaccgctccggcaacgccaaccgctccgctgcgcgcaggctgggctgcaggctctcggctgcagcgctggcacgctggcggccccttgagccccaacctggataccataggggaggagcagagaagccaggaacaccacagccctgggccaaggtggatctaggatccggcttccaacatgtggcagctctgggcctccctctgctgcctgctggtgttggccaatgcccggagcaggccctctttccatcccctgtcggatgagctggtcaactatgtcaacaaacggaataccacgtggcaggccgggcacaacttctacaacgtggacatgagctacttgaagaggctatgtggtaccttcctgggtgggcccaagccaccccagagagttatgtttaccgaggacctgaagctgcctgcaagcttcgatgcacgggaacaatggccacagtgtcccaccatcaaagagatcagagaccagggctcctgtggctcctgctgggccttcggggctgtggaagccatctctgaccggatctgcatccacaccaatgcgcacgtcagcgtggaggtgtcggcggaggacctgctcacatgctgtggcagcatgtgtggggacggctgtaatggtggctatcctgctgaagcttggaacttctggacaagaaaaggcctggtttctggtggcctctatgaatcccatgtagggtgcagaccgtactccatccctccctgtgagcaccacgtcaacggctcccggcccccatgcacgggggagggagatacccccaagtgtagcaagatctgtgagcctggctacagcccgacctacaaacaggacaagcactacggatacaattcctacagcgtctccaatagcgagaaggacatcatggccgagatctacaaaaacggccccgtggagggagctttctctgtgtattcggacttcctgctctacaagtcaggagtgtaccaacacgtcaccggagagatgatgggtggccatgccatccgcatcctgggctggggagtggagaatggcacaccctactggctggttgccaactcctggaacactgactggggtgacaatggcttctttaaaatactcagaggacaggatcactgtggaatcgaatcagaagtggtggctggaattccacgcaccgatcagtactgggaaaagatctaatctgccgtgggcctgtcgtgccagtcctgggggcgagatcggggtagaaatgcattttattctttaagttcacgtaagatacaagtttcagacagggtctgaaggactggattggccaaacatcagacctgtcttccaaggagaccaagtcctggctacatcccagcctgtggttacagtgcagacaggccatgtgagccaccgctgccagcacagagcgtccttccccctgtagactagtgccgtagggagtacctgctgccccagctgactgtggccccctccgtgatccatccatctccagggagcaagacagagacgcaggaatggaaagcggagttcctaacaggatgaaagttcccccatcagttcccccagtacctccaagcaagtagctttccacatttgtcacagaaatcagaggagagacggtgttgggagccctttggagaacgccagtctcccaggccccctgcatctatcgagtttgcaatgtcacaacctctctgatcttgtgctcagcatgattctttaatagaagttttattttttcgtgcactctgctaatcatgtgggtgagccagtggaacagcgggagacctgtgctagttttacagattgcctccttatgacgcggctcaaaaggaaaccaagtggtcaggagttgtttctgacccactgatctctactaccacaaggaaaatagtttaggagaaaccagcttttactgtttttgaaaaattacagcttcaccc

SEQ ID NO: 864 - DNA, 2400 bp, Homo sapiens
  source 1..2400: mol_type = genomic DNA
tagcggggatggctccaccttaacaacaaggtggtggcacagaactttctgctccagctgcctgcagcctcgccttggttccgcagtagcggtgttcactggcggctgcagatccgaaatgcctgagggcttaaaaaaatgcatgggcttctcccctaactagttaaatgggaatcactggcgattctcatttcagagaactggtggtgtttttaagtaccttagggaagtttagcgtctgctcagttgagaatcagtgttctacccggaagggcactcgtagcctggtctggtatggacatgaacaggagagcctcctgtcttctcccggatctttgtgggcaggggtggggctggcggttattccctgcaagctgtgcttatctagggagcgtcccttggagggtttggggtctgggaggtctgctcgcaccacttgctgcagctgggggtgggtccacgagtggcctcgggcacttgggtagcacacagtggtctggagagctggtggtgcttctctcagaggttttcattagaggctgtcttttcagctgtaatggtggctatcctgctgaagcttggaacttctggacaagaaaaggcctggtttctggtggcctctatgaatcccatgtagggtgcagaccgtactccatccctccctgtgagcaccacgtcaacggctcccggcccccatgcacgggggagggagatacccccaagtgtagcaagatctgtgagcctggctacagcccgacctacaaacaggacaagcactacggatacaattcctacagcgtctccaatagcgagaaggacatcatggccgagatctacaaaaacggccccgtggagggagctttctctgtgtattcggacttcctgctctacaagtcaggagtgtaccaacacgtcaccggagagatgatgggtggccatgccatccgcatcctgggctggggagtggagaatggcacaccctactggctggttgccaactcctggaacactgactggggtgacaatggcttctttaaaatactcagaggacaggatcactgtggaatcgaatcagaagtggtggctggaattccacgcaccgatcagtactgggaaaagatctaatctgccgtgggcctgtcgtgccagtcctgggggcgagatcggggtagaaatgcattttattctttaagttcacgtaagatacaagtttcagacagggtctgaaggactggattggccaaacatcagacctgtcttccaaggagaccaagtcctggctacatcccagcctgtggttacagtgcagacaggccatgtgagccaccgctgccagcacagagcgtccttccccctgtagactagtgccgtagggagtacctgctgccccagctgactgtggccccctccgtgatccatccatctccagggagcaagacagagacgcaggaatggaaagcggagttcctaacaggatgaaagttcccccatcagttcccccagtacctccaagcaagtagctttccacatttgtcacagaaatcagaggagagacggtgttgggagccctttggagaacgccagtctcccaggccccctgcatctatcgagtttgcaatgtcacaacctctctgatcttgtgctcagcatgattctttaatagaagttttattttttcgtgcactctgctaatcatgtgggtgagccagtggaacagcgggagacctgtgctagttttacagattgcctccttatgacgcggctcaaaaggaaaccaagtggtcaggagttgtttctgacccactgatctctactaccacaaggaaaatagtttaggagaaaccagcttttactgtttttgaaaaattacagcttcaccctgtcaagttaacaaggaatgcctgtgccaataaaagttttctccaacttgaagtctactctgatgggatctcagatcctttgtcactgcctatagacttgtagctgctgtctctctttgtccctgcagagaatcacgtcctggaactgcatgttcttgcgactcttgggacttcatcttaacttctcgctgccccagccatgttttcaaccatggcatccctcccccaattagttccctgtcatcctcgtcaaccttctctgtaagtgcctggtaagcttgcccttgcttaagaactcaaaacatagctgtgctctatttttttgttgttgttgtgactgacagagtgagattccgtctcccaggctgggggacaagagtgaatctgtgtctcaccaaaaaaaaaaagaaaaagaaagatgcttaacaaaggttaccataagccacaaattcataaccacttatccttccagtttcaagtagaatatattcataacctcaataaagttctccctgctccc

SEQ ID NO: 865 - DNA, 958 bp, Homo sapiens
  source 1..958: mol_type = genomic DNA
ggctgcagggctccggcaaccgctccggcaacgccaaccgctccgctgcgcgcaggctgggctgcaggctctcggctgcagcgctgggtggatctaggatccggcttccaacatgtggcagctctgggcctccctctgctgcctgctggtgttggccaatgcccggagcaggccctctttccatcccctgtcggatgagctgggccttcggggctgtggaagccatctctgaccggatctgcatccacaccaatgcgcacgtcagcgtggaggtgtcggcggaggacctgctcacatgctgtggcagcatgtgtggggacggctgtaatggtggctatcctgctgaagcttggaacttctggacaagaaaaggcctggtttctggtggcctctatgaatcccatgtagggtgcagaccgtactccatccctccctgtgagcaccacgtcaacggctcccggcccccatgcacgggggagggagatacccccaagtgtagcaagatctgtgagcctggctacagcccgacctacaaacaggacaagcactacggatacaattcctacagcgtctccaatagcgagaaggacatcatggccgagatctacaaaaacggccccgtggagggagctttctctgtgtattcggacttcctgctctacaagtcaggagtgtaccaacacgtcaccggagagatgatgggtggccatgccatccgcatcctgggctggggagtggagaatggcacaccctactggctggttgccaactcctggaacactgactggggtgacaatggcttctttaaaatactcagaggacaggatcactgtggaatcgaatcagaagtggtggctggaattccacgcaccgatcagtactgggaaaagatctaatctgccgtgggcctgtcgtgccagtcctgggggcgagatcggggtagaaatgcattttattc

SEQ ID NO: 866 - DNA, 2123 bp, Homo sapiens
  source 1..2123: mol_type = genomic DNA
gcgcacgccggccgcgcccacgtgaccggtccgggtgcaaacacgcgggtcagctgatccggcccaactgcggcgtcatcccggctataagcgcacggcctcggcgaccctctccgacccggccgccgccgccatgcagccctccagccttctgccgctcgccctctgcctgctggctgcacccgcctccgcgctcgtcaggatcccgctgcacaagttcacgtccatccgccggaccatgtcggaggttgggggctctgtggaggacctgattgccaaaggccccgtctcaaagtactcccaggcggtgccagccgtgaccgaggggcccattcccgaggtgctcaagaactacatggacgcccagtactacggggagattggcatcgggacgcccccccagtgcttcacagtcgtcttcgacacgggctcctccaacctgtgggtcccctccatccactgcaaactgctggacatcgcttgctggatccaccacaagtacaacagcgacaagtccagcacctacgtgaagaatggtacctcgtttgacatccactatggctcgggcagcctctccgggtacctgagccaggacactgtgtcggtgccctgccagtcagcgtcgtcagcctctgccctgggcggtgtcaaagtggagaggcaggtctttggggaggccaccaagcagccaggcatcaccttcatcgcagccaagttcgatggcatcctgggcatggcctacccccgcatctccgtcaacaacgtgctgcccgtcttcgacaacctgatgcagcagaagctggtggaccagaacatcttctccttctacctgagcagggacccagatgcgcagcctgggggtgagctgatgctgggtggcacagactccaagtattacaagggttctctgtcctacctgaatgtcacccgcaaggcctactggcaggtccacctggaccaggtggaggtggccagcgggctgaccctgtgcaaggagggctgtgaggccattgtggacacaggcacttccctcatggtgggcccggtggatgaggtgcgcgagctgcagaaggccatcggggccgtgccgctgattcagggcgagtacatgatcccctgtgagaaggtgtccaccctgcccgcgatcacactgaagctgggaggcaaaggctacaagctgtccccagaggactacacgctcaaggtgtcgcaggccgggaagaccctctgcctgagcggcttcatgggcatggacatcccgccacccagcgggccactctggatcctgggcgacgtcttcatcggccgctactacactgtgtttgaccgtgacaacaacagggtgggcttcgccgaggctgcccgcctctagttcccaaggcgtccgcgcgccagcacagaaacagaggagagtcccagagcaggaggcccctggcccagcggcccctcccacacacacccacacactcgcccgcccactgtcctgggcgccctggaagccggcggcccaagcccgacttgctgttttgttctgtggttttcccctccctgggttcagaaatgctgcctgcctgtctgtctctccatctgtttggtgggggtagagctgatccagagcacagatctgtttcgtgcattggaagaccccacccaagcttggcagccgagctcgtgtatcctggggctcccttcatctccagggagtcccctccccggccctaccagcgcccgctgggctgagcccctaccccacaccaggccgtcctcccgggccctcccttggaaacctgccctgcctgagggcccctctgcccagcttgggcccagctgggctctgccaccctacctgttcagtgtcccgggcccgttgaggatgaggccgctagaggcctgaggatgagctggaaggagtgagaggggacaaaacccaccttgttggagcctgcagggtggtgctgggactgagccagtcccaggggcatgtattggcctggaggtggggttgggattgggggctggtgccagccttcctctgcagctgacctctgttgtcctccccttgggcggctgagagccccagctgacatggaaatacagttgttggcctccggcctcccctctgt

SEQ ID NO: 867 - DNA, 1436 bp, Homo sapiens
  source 1..1436: mol_type = genomic DNA
aagctgggccagaaccgcgacctccgcaaccttgagcggcatccgtggagtgcgcctgcgcagctacgaccgcagcaggaaagcgccgccggccaggcccagctgtggccggacagggactggaagagaggacgcggtcgagtaggttttaaaacatgaatcctacactcatccttgctgccttttgcctgggaattgcctcagctactctaacatttgatcacagtttagaggcacagtggaccaagtggaaggcgatgcacaacagattatacggcatgaatgaagaaggatggaggagagcagtgtgggagaagaacatgaagatgattgaactgcacaatcaggaatacagggaagggaaacacagcttcacaatggccatgaacgcctttggagacatgaccagtgaagaattcaggcaggtgatgaatggctttcaaaaccgtaagcccaggaaggggaaagtgttccaggaacctctgttttatgaggcccccagatctgtggattggagagagaaaggctacgtgactcctgtgaagaatcagggtcagtgtggttcttgttgggcttttagtgctactggtgctcttgaaggacagatgttccggaaaactgggaggcttatctcactgagtgagcagaatctggtagactgctctgggcctcaaggcaatgaaggctgcaatggtggcctaatggattatgctttccagtatgttcaggataatggaggcctggactctgaggaatcctatccatatgaggcaacagaagaatcctgtaagtacaatcccaagtattctgttgctaatgacaccggctttgtggacatccctaagcaggagaaggccctgatgaaggcagttgcaactgtggggcccatttctgttgctattgatgcaggtcatgagtccttcctgttctataaagaaggcatttattttgagccagactgtagcagtgaagacatggatcatggtgtgctggtggttggctacggatttgaaagcacagaatcagataacaataaatattggctggtgaagaacagctggggtgaagaatggggcatgggtggctacgtaaagatggccaaagaccggagaaaccattgtggaattgcctcagcagccagctaccccactgtgtgagctggtggacggtgatgaggaaggacttgactggggatggcgcatgcatgggaggaattcatcttcagtctaccagcccccgctgtgtcggatacacactcgaatcattgaagatccgagtgtgatttgaattctgtgatattttcacactggtaaatgttacctctattttaattactgctataaataggtttatattattgattcacttactgactttgcattttcgtttttaaaaggatgtataaatttttacctgtttaaataaaatttaatttc

SEQ ID NO: 868 - DNA, 933 bp, Homo sapiens
  source 1..933: mol_type = genomic DNA
ttgagcggcatccgtggagtgcgcctgcgcagctacgaccgcagcaggaaagcgccgccggccaggcccagctgtggccggacagggactggaagagaggacgcggtcgagtaggttttaaaacatgaatcctacactcatccttgctgccttttgcctgggaattgcctcagctactctaacatttgatcacagtttagaggcacagtggaccaagtggaaggcgatgcacaacagattatacggcatgaatgaagaaggatggaggagagcagtgtgggagaagaacatgaagatgattgaactgcacaatcaggaatacagggaagggaaacacagcttcacaatggccatgaacgcctttggagacatgaccagtgaagaattcaggcaggtgatgaatggctttcaaaaccgtaagcccaggaaggggaaagtgttccaggaacctctgttttatgaggcccccagatctgtggattggagagagaaaggctacgtgactcctgtgaagaatcagggtcagtgtggttcttgttgggcttttagtgctactggtgctcttgaaggacagatgttccggaaaactgggaggcttatctcactgagtgagcagaatctggtagactgctctgggcctcaaggcaatgaaggctgcaatggtggcctaatggattatgctttccagtatgttcaggataatggaggcctggactctgaggaatcctatccatatgaggcaacagtaagtggagctccttgtcatcattccagctcagcttttggaaggtggacactttaagagataacagatacctttttcggaattcatatattagggctgggtggggtggctcacgcctgtaatcccagccctttaggaggctgagccaggcagatggcttaagctcaggagtttgagaccagcctggg

SEQ ID NO: 869 - DNA, 2177 bp, Homo sapiens
  source 1..2177: mol_type = genomic DNA
agccagtctcctccctcctagggtctggtcttgacgatagcatctcgtgttttggggatgcctttccttaccagattcttctaaagcccagctgcacccacccttaagtgggagataaggcttctgcccgcgggctctgcgttcgtccacccggccccacgtttgctgtggactaaacaggagccactggactagagtacacttgactctcggctctgcggaccaaaaattccaggactaaggaatagcaaggttaggctgaaacagtccacacagggcttgcggtaaacgtcttttcaggagccactcgcccagtgcagtaagtcgtgtacttagttgactcgagcgctccagggagacgcccgaccctactctgcgccgccccggggcaccagctctgcttcctccaggtccactgaggcaggcacgcccagctctgggacagtcagtaaacaagccacgaaccgcgccagggatcagagcacccagagtccccgcccagctgccggcacagccaatcgcagcgcagccaggcggcggggcggtgccggccgaacccagacccgaggttttagaagcagagtcaggcgaagctgggccagaaccgcgacctccgcaaccttgagcggcatccgtggagtgcgcctgcgcagctacgaccgcagcaggaaagcgccgccggccaggcccagctgtggccggacagggactggaagagaggacgcggtcgagtaggtgtgcaccagccctggcaacgagagcgtctaccccgaactctgctggccttgaggtggggaagccggggagggcagttgaggaccccgcggaggcgcgtgactggttgagcgggcaggccagcctccgagccgggtggacacaggttttaaaacatgaatcctacactcatccttgctgccttttgcctgggaattgcctcagctactctaacatttgatcacagtttagaggcacagtggaccaagtggaaggcgatgcacaacagattatacggcatgaatgaagaaggatggaggagagcagtgtgggagaagaacatgaagatgattgaactgcacaatcaggaatacagggaagggaaacacagcttcacaatggccatgaacgcctttggagacatgaccagtgaagaattcaggcaggtgatgaatggctttcaaaaccgtaagcccaggaaggggaaagtgttccaggaacctctgttttatgaggcccccagatctgtggattggagagagaaaggctacgtgactcctgtgaagaatcagggtcagtgtggttcttgttgggcttttagtgctactggtgctcttgaaggacagatgttccggaaaactgggaggcttatctcactgagtgagcagaatctggtagactgctctgggcctcaaggcaatgaaggctgcaatggtggcctaatggattatgctttccagtatgttcaggataatggaggcctggactctgaggaatcctatccatatgaggcaacagaagaatcctgtaagtacaatcccaagtattctgttgctaatgacaccggctttgtggacatccctaagcaggagaaggccctgatgaaggcagttgcaactgtggggcccatttctgttgctattgatgcaggtcatgagtccttcctgttctataaagaaggcatttattttgagccagactgtagcagtgaagacatggatcatggtgtgctggtggttggctacggatttgaaagcacagaatcagataacaataaatattggctggtgaagaacagctggggtgaagaatggggcatgggtggctacgtaaagatggccaaagaccggagaaaccattgtggaattgcctcagcagccagctaccccactgtgtgagctggtggacggtgatgaggaaggacttgactggggatggcgcatgcatgggaggaattcatcttcagtctaccagcccccgctgtgtcggatacacactcgaatcattgaagatccgagtgtgatttgaattctgtgatattttcacactggtaaatgttacctctattttaattactgctataaataggtttatattattgattcacttactgactttgcattttcgtttttaaaaggatgtataaatttttacctgtttaaataaaatttaatttcaaatgt

SEQ ID NO: 870 - DNA, 354 bp, Homo sapiens
  source 1..354: mol_type = genomic DNA
tttgcctgggcacgaaacctggattttttgcgattggtacaaaacctggatcaaccgtttcccggtttcctagttgttgccttaagcttctcacacacaaggtagtttcataccgttctcataacctaaattgtcatcgcataaactgtttcagctcctacagctctggacaggctgcttttcattttggttttaaaacatgaatcctacactcatccttgctgccttttgcctgggaattgcctcagctactctaacatttgatcacagtttagaggcacagtggaccaagtggaaggcgatgcacaacagattatacggcatgaatgaagaaggatggaggagagcagtgtg

SEQ ID NO: 871 - DNA, 2628 bp, Homo sapiens
  source 1..2628: mol_type = genomic DNA
agagtacagaggggtgtggtgtcctctgcgagatcctcttaaaaagctggctacgcgcaggcggtttctgtgcacggagccgtagctgtcggagcggttagttcgatttcgagctcgaggtttcccccgccgccaggctgacttctcatcgcttgtttttctttttgcatttttcctcccaccgccgttgccgccctccccgtcctggccgtccgccctccgccctctgcagggacatctctacaccgttcccatccgggaacagggcaacatctacaagcccaacaacaaggccatggcagacgagctgagcgagaagcaagtgtacgacgcgcacaccaaggagatcgacctggtcaaccgcgaccctaaacacctcaacgatgacgtggtcaagattgactttgaagatgtgattgcagaaccagaagggacacacagttttgacggcatttggaaggccagcttcaccaccttcactgtgacgaaatactggttttaccgcttgctgtctgccctctttggcatcccgatggcactcatctggggcatttacttcgccattctctctttcctgcacatctgggcagttgtaccatgcattaagagcttcctgattgagattcagtgcatcagccgtgtctattccatctacgtccacaccgtctgtgacccactctttgaagctgttgggaaaatattcagcaatgtccgcatcaacttgcagaaagaaatataaatgacatttcaaggatagaagtatacctgattttttttccttttaattttcctggtgccaatttcaagttccaagttgctaatacagcaacaatttatgaattgaattatcttggttgaaaataaaaagatcactttctcagttttcataagtattatgtctcttctgagctatttcatctatttttggcagtctgaatttttaaaacccatttaaatttttttccttacctttttatttgcatgtggatcaaccatcgctttattggctgagatatgaacatattgttgaaaggtaatttgagagaaatatgaagaactgaggaggaaaaaaaaaaaaaagaaaagaaccaacaacctcaactgcctactccaaaatgttggtcattttatgttaagggaagaattccagggtatggccatggagtgtacaagtatgtgggcagattttcagcaaactcttttcccactgtttaaggagttagtggattactgccattcacttcataatccagtaggatccagtgatccttacaagttagaaaacataatcttctgccttctcatgatccaactaatgccttactcttcttgaaattttaacctatgatattttctgtgcctgaatatttgttatgtagataacaagacctcagtgccttcctgtttttcacattttccttttcaaatagggtctaactcagcaactcgctttaggtcagcagcctccctgaagaccaaaattagaatatccatgacctagttttccatgcgtgtttctgactctgagctacagagtctggtgaagctcacttctgggcttcatctggcaacatctttatccgtagtgggtatggttgacactagcccaatgaaatgaattaaagtggaccaatagggctgagctctctgtgggctggcagtcctggaagccagctttccctgcctctcatcaactgaatgaggtcagcatgtctattcagcttcgtttattttcaagaataatcacgctttcctgaatccaaactaatccatcaccggggtggtttagtggctcaacattgtgttcccatttcagctgatcagtgggcctccaaggaggggctgtaaaatggaggccattgtgtgagcctatcagagttgctgcaaacctgacccctgctcagtaaagcacttgcaaccgtctgttatgctgtgacacatggcccctccccctgccaggagctttggacctaatccaagcatccctttgcccagaaagaagatgggggaggaggcagtaataaaaagattgaagtattttgctggaataagttcaaattcttctgaactcaaactgaggaatttcacctgtaaacctgagtcgtacagaaagctgcctggtatatccaaaagctttttattcctcctgctcatattgtgattctgcctttggggacttttcttaaaccttcagttatgatttttttttcatacacttattggaactctgcttgatttttgcctcttccagtcttcctgacactttaattaccaacctgttacctactttgactttttgcatttaaaacagacactggcatggatatagttttacttttaaactgtgtacataactgaaaatgtgctatactgcatactttttaaatgtaaagatatttttatctttatatgaagaaaatcacttaggaaatggctttgtgattcaatctgtaaactgtgtattccaagacatgtctgttctacatagatgcttagtccctcatgcaaatcaattactggtccaaaagattgctgaaattttatatgcttactgatatattttacaattttttatcatgcatgtcctgtaaaggttacaagcctgcacaataaaaatgtttaacggtt

SEQ ID NO: 872 - DNA, 2443 bp, Homo sapiens
  source 1..2443: mol_type = genomic DNA
gctgcccttcagccacccgcccgcagcctgggagtgccctgaggggacatctctacaccgttcccatccgggaacagggcaacatctacaagcccaacaacaaggccatggcagacgagctgagcgagaagcaagtgtacgacgcgcacaccaaggagatcgacctggtcaaccgcgaccctaaacacctcaacgatgacgtggtcaagattgactttgaagatgtgattgcagaaccagaagggacacacagttttgacggcatttggaaggccagcttcaccaccttcactgtgacgaaatactggttttaccgcttgctgtctgccctctttggcatcccgatggcactcatctggggcatttacttcgccattctctctttcctgcacatctgggcagttgtaccatgcattaagagcttcctgattgagattcagtgcatcagccgtgtctattccatctacgtccacaccgtctgtgacccactctttgaagctgttgggaaaatattcagcaatgtccgcatcaacttgcagaaagaaatataaatgacatttcaaggatagaagtatacctgattttttttccttttaattttcctggtgccaatttcaagttccaagttgctaatacagcaacaatttatgaattgaattatcttggttgaaaataaaaagatcactttctcagttttcataagtattatgtctcttctgagctatttcatctatttttggcagtctgaatttttaaaacccatttaaatttttttccttacctttttatttgcatgtggatcaaccatcgctttattggctgagatatgaacatattgttgaaaggtaatttgagagaaatatgaagaactgaggaggaaaaaaaaaaaaaagaaaagaaccaacaacctcaactgcctactccaaaatgttggtcattttatgttaagggaagaattccagggtatggccatggagtgtacaagtatgtgggcagattttcagcaaactcttttcccactgtttaaggagttagtggattactgccattcacttcataatccagtaggatccagtgatccttacaagttagaaaacataatcttctgccttctcatgatccaactaatgccttactcttcttgaaattttaacctatgatattttctgtgcctgaatatttgttatgtagataacaagacctcagtgccttcctgtttttcacattttccttttcaaatagggtctaactcagcaactcgctttaggtcagcagcctccctgaagaccaaaattagaatatccatgacctagttttccatgcgtgtttctgactctgagctacagagtctggtgaagctcacttctgggcttcatctggcaacatctttatccgtagtgggtatggttgacactagcccaatgaaatgaattaaagtggaccaatagggctgagctctctgtgggctggcagtcctggaagccagctttccctgcctctcatcaactgaatgaggtcagcatgtctattcagcttcgtttattttcaagaataatcacgctttcctgaatccaaactaatccatcaccggggtggtttagtggctcaacattgtgttcccatttcagctgatcagtgggcctccaaggaggggctgtaaaatggaggccattgtgtgagcctatcagagttgctgcaaacctgacccctgctcagtaaagcacttgcaaccgtctgttatgctgtgacacatggcccctccccctgccaggagctttggacctaatccaagcatccctttgcccagaaagaagatgggggaggaggcagtaataaaaagattgaagtattttgctggaataagttcaaattcttctgaactcaaactgaggaatttcacctgtaaacctgagtcgtacagaaagctgcctggtatatccaaaagctttttattcctcctgctcatattgtgattctgcctttggggacttttcttaaaccttcagttatgatttttttttcatacacttattggaactctgcttgatttttgcctcttccagtcttcctgacactttaattaccaacctgttacctactttgactttttgcatttaaaacagacactggcatggatatagttttacttttaaactgtgtacataactgaaaatgtgctatactgcatactttttaaatgtaaagatatttttatctttatatgaagaaaatcacttaggaaatggctttgtgattcaatctgtaaactgtgtattccaagacatgtctgttctacatagatgcttagtccctcatgcaaatcaattactggtccaaaagattgctgaaattttatatgcttactgatatattttacaattttttatcatgcatgtcctgtaaaggttacaagcctgcacaataaaaatgtttaacggttaaa

SEQ ID NO: 873 - DNA, 2704 bp, Homo sapiens
  source 1..2704: mol_type = genomic DNA
gggagaaacgttctcactcgctctctgctcgctgcgggcgctccccgccctctgctgccagaaccttggggatgtgcctagacccggcgcagcacacgtccgggccaaccgcgagcagaacaaacctttggcgggcggccaggaggctccctcccagccaccgcccccctccagcgcctttttttccccccatacaatacaagatcttccttcctcagttcccttaaagcacagcccagggaaacctcctcacagttttcatccagccacgggccagcatgtctgggggcaaatacgtagactcggagggacatctctacaccgttcccatccgggaacagggcaacatctacaagcccaacaacaaggccatggcagacgagctgagcgagaagcaagtgtacgacgcgcacaccaaggagatcgacctggtcaaccgcgaccctaaacacctcaacgatgacgtggtcaagattgactttgaagatgtgattgcagaaccagaagggacacacagttttgacggcatttggaaggccagcttcaccaccttcactgtgacgaaatactggttttaccgcttgctgtctgccctctttggcatcccgatggcactcatctggggcatttacttcgccattctctctttcctgcacatctgggcagttgtaccatgcattaagagcttcctgattgagattcagtgcatcagccgtgtctattccatctacgtccacaccgtctgtgacccactctttgaagctgttgggaaaatattcagcaatgtccgcatcaacttgcagaaagaaatataaatgacatttcaaggatagaagtatacctgattttttttccttttaattttcctggtgccaatttcaagttccaagttgctaatacagcaacaatttatgaattgaattatcttggttgaaaataaaaagatcactttctcagttttcataagtattatgtctcttctgagctatttcatctatttttggcagtctgaatttttaaaacccatttaaatttttttccttacctttttatttgcatgtggatcaaccatcgctttattggctgagatatgaacatattgttgaaaggtaatttgagagaaatatgaagaactgaggaggaaaaaaaaaaaaaagaaaagaaccaacaacctcaactgcctactccaaaatgttggtcattttatgttaagggaagaattccagggtatggccatggagtgtacaagtatgtgggcagattttcagcaaactcttttcccactgtttaaggagttagtggattactgccattcacttcataatccagtaggatccagtgatccttacaagttagaaaacataatcttctgccttctcatgatccaactaatgccttactcttcttgaaattttaacctatgatattttctgtgcctgaatatttgttatgtagataacaagacctcagtgccttcctgtttttcacattttccttttcaaatagggtctaactcagcaactcgctttaggtcagcagcctccctgaagaccaaaattagaatatccatgacctagttttccatgcgtgtttctgactctgagctacagagtctggtgaagctcacttctgggcttcatctggcaacatctttatccgtagtgggtatggttgacactagcccaatgaaatgaattaaagtggaccaatagggctgagctctctgtgggctggcagtcctggaagccagctttccctgcctctcatcaactgaatgaggtcagcatgtctattcagcttcgtttattttcaagaataatcacgctttcctgaatccaaactaatccatcaccggggtggtttagtggctcaacattgtgttcccatttcagctgatcagtgggcctccaaggaggggctgtaaaatggaggccattgtgtgagcctatcagagttgctgcaaacctgacccctgctcagtaaagcacttgcaaccgtctgttatgctgtgacacatggcccctccccctgccaggagctttggacctaatccaagcatccctttgcccagaaagaagatgggggaggaggcagtaataaaaagattgaagtattttgctggaataagttcaaattcttctgaactcaaactgaggaatttcacctgtaaacctgagtcgtacagaaagctgcctggtatatccaaaagctttttattcctcctgctcatattgtgattctgcctttggggacttttcttaaaccttcagttatgatttttttttcatacacttattggaactctgcttgatttttgcctcttccagtcttcctgacactttaattaccaacctgttacctactttgactttttgcatttaaaacagacactggcatggatatagttttacttttaaactgtgtacataactgaaaatgtgctatactgcatactttttaaatgtaaagatatttttatctttatatgaagaaaatcacttaggaaatggctttgtgattcaatctgtaaactgtgtattccaagacatgtctgttctacatagatgcttagtccctcatgcaaatcaattactggtccaaaagattgctgaaattttatatgcttactgatatattttacaattttttatcatgcatgtcctgtaaaggttacaagcctgcacaataaaaatgtttaacggtt

SEQ ID NO: 874 - DNA, 3301 bp, Homo sapiens
  source 1..3301: mol_type = genomic DNA
ctccctccaggaaggccgttgtcttccctgggacgacttgccagctctgaggcatgacagtacgggcccccagaagggtgaccaggaggccctcctcgtcccagctgccggcgtcgccgcccactgcagggcccgggctgtgactcgtggggacggttccctgcgccccggcgggggaggtgggcggggaggggcggcggggcgccggggcggggctcgggacggccgggctgggagctggagcccacagcgggaagcggccgccgcccgggcctcgcagggctaggcgaggcgagggggggcggggccgggcgctacgggaaggggaggccgcgcggaccgggagccgcaccgcgccagccgggctgcagcggccgcgcaccaaggctgcgatggggctggagacggagaaggcggacgtacagctcttcatggacgacgactcctacagccaccacagcggcctcgagtacgccgaccccgagaagttcgcggactcggaccaggaccgggatccccaccggctcaactcgcatctcaagctgggcttcgaggatgtgatcgcagagccggtgactacgcactcctttgacaaagtgtggatctgcagccatgccctctttgaaatcagcaaatacgtaatgtacaagttcctgacggtgttcctggccattcccctggccttcattgcgggaattctctttgccaccctcagctgtctgcacatctggattttaatgccttttgtaaagacctgcctaatggttctgccttcagtgcagacaatatggaagagtgtgacagatgttatcattgctccattgtgtacgagcgtaggacgatgcttctcttctgtcagcctgcaactgagccaggattgaatacttggaccccaggtctggagattgggatactgtaatacttctttgttattataacataaaagcaccactgttctgttcatttcctagctgttctaattaagaaaactattaagatgagcaaccacatttagaaatgtttattgacaggtcttttcaaataatgcttttctaattaatagccaaagatttcatatctaactttgtaaccagaattatacagtaagttgacaccacttagatttaaaggcagacagttttgctttagtacaatagtatacattttataatgatgaacttataatgattaagggacatttctataaaaatactacaatagttttatgcacaacttcccattaaaaatgagatttcttatttgtttgtctgtttttactctgggagtaatactttttaaattacctttacatatatagtcactggcatactgagaatatacaatgatcctggaaattgcagtaacaaaagcacacaacgattatagtaactataagatacaataaaacaaataaatatgaaagtagattcatgaaaatgtattcctttaaaatattgttttcctacaggcctatttaacaagatgtttcattttactgtatattttgtagttaatataaatgttgctctaatcagattgcttaaaagcatttttattatatttatgttgttgaactaatatatgaaataagtaaatgtagctcccacaaggtaaacttcattggtaagattgcactgttctgattatgtaagcatttgtacatcttctttggaaataaaagataaaagagcgatacacaaagctttcttttctaacttttccaagcaaaatctaaaatgttttatgacatttttctggctgtgatcttaaaataattcatatctaaatagtattttgtctaggagatgctttctctctagtagttagaaattaaatctgtgtcagcattcctattaatgtctcactttactttcaagtaatattggtgctatttaacattttacagtaaatgttacttctgatactttagtacaatttcaactacagtgattcatgtagagagacaggggagttgtcaacttgggctactgaactacatgcataaactaaaaactaacagctacaaacttttaagatttctctaatattggtatgtaacacaggataaagttattcttgtcattttgaactgtagagtcctatttcagtgtgatgaatcactgttgctttgaaaaatctcattatttctgggccgggcatggtggctcacccctgtaatcccagcactttgggaggccaaggcgggtggatcatgaggtcaggagatcaagaccatcctggccaacatggtgataccccgtctctactaaaaatacaaaaaaattagttgggcatggtggcatgcacctgtagtcccagctacctgggaggctgaggcaggagaattgcttgaacctgggaggcagaggttgcagtgagccaaaatcatgccactgcactcccgcctggcaacagagcaagagtctgtctcaaaaaaaaaaagaaaaaaagaaaaaaagaaaaaagaaaaatctcattatttcaaaatgatagacatataccaaaaacaagtctataatgtgagtagttactaaaatttacacatcttaaaagtgtgtaaatgcttaaatttcagaattaccatcagaacctcaattgacattcctttgaatacgctaataagtgacaaataagattaataagatttttcaaaatcgccaggactggtgaatataaatgatgattgaactggaataatattggggaccaaatcaaatgaatgattaaattatgaagctcatatccttttgaaggtagttgcaaagagacatttcaaaactgccctaggccattgcagcatccttagatgggacgcataatcattaccttaaagcatcaccactcattttgaccatatagattttattatgttagtttaaaaggtcaatcagcctcatgactttatagttatgtcttgtatttaaaaacattttttatacatttggttatgttgataaaccaaaaacatttgattaataaaatatctatttgaataaattatgagctatcctttcaaacagctattggcaagttttaaacccaaaatatatacacatagttctgtaataaaactgtttgacttctcaagtaacatgacttccttatttctgaacagtactggttactttcaaaatgaatttttattgagattttccattaactatttttttcaaagactcaaattttgtaccaagtaaatccaggctttatgtacaaacatgttgtttgttttatttggggctgggggaggtatatgatgagcagacttctcggaattcataataaattttctaaaagccta

SEQ ID NO: 875 - DNA, 776 bp, Homo sapiens
  source 1..776: mol_type = genomic DNA
accgcgccagccgggctgcagcggccgcgcaccaaggctgcgatggggctggagacggagaaggcggacgtacagctcttcatggacgacgactcctacagccaccacagcggcctcgagtacgccgaccccgagaagttcgcggactcggaccaggaccgggatccccaccggctcaactcgcatctcaaggattttaatgccttttgtaaagacctgcctaatggttctgccttcagtgcagacaatatggaagagtgtgacagatgttatcattgctccattgtgtacgagcgtaggacgatgcttctcttctgtcagcctgcaactgagccaggattgaatacttggaccccaggtctggagattgggatactgtaatacttctttgttattataacataaaagcaccactgttctgttcatttcctagctgttctaattaagaaaactattaagatgagcaaccacatttagaaatgtttattgacaggtcttttcaaataatgcttttctaattaatagccaaagatttcatatctaactttgtaaccagaattatacagtaagttgacaccacttagatttaaaggcagacagttttgctttagtacaatagtatacattttataatgatgaacttataatgattaagggacatttctataaaaatactacaatagttttatgcacaacttcccattaaaaatgagatttcttatttgtttgtctgtttttactctgggagtaatactttttaaattacctttacatat

SEQ ID NO: 876 - DNA, 893 bp, Homo sapiens
  source 1..893: mol_type = genomic DNA
cgatggggctggagacggagaaggcggacgtacagctcttcatggacgacgactcctacagccaccacagcggcctcgagtacgccgaccccgagaagttcgcggactcggaccaggaccgggatccccaccggctcaactcgcatctcaagctgggcttcgaggatgtgatcgcagagccggtgactacgcactcctttgacaaagtgtggatctgcagccatgccctctttgaaatcagcaaatacgtaatgtacaagttcctgacggtgttcctggccattcccctggccttcattgcgggaattctctttgccaccctcagctgtctgcacatctggtgagacggggcacaccgggtggaccggctttctgaaacatgggcatattctccgccacctgccccctactctcctcttatcccaggccggcgtcaggaggaggaacgcgcatcagttcccaagcagtaggaagaactggaaggccttgaaaggcaatgcgcttcctttagaataacagtttgggcttggagtttcaacaggagaaagaatgtcggtctttcctggggtgtgattttccttgcatacataaggctgggctgagtgtggaggcgggtacctggaagccacacttcttaccacaggctgctctcggggccctgttgtgactcgtacctgcggttctgggcaggactcttctttctttcattgccttttattcagtcactgcctgtgcttggggtaaaacaaaagtgatctctgagcagaatgccgctgacagtagaattggatgaggatgtcagacctggttaagcagtagtgtggaggggctgcttcaactttgcccctggcagatggcaaggatgggacccagaggaaagggaggtgtgtgca

SEQ ID NO: 877 - DNA, 1837 bp, Homo sapiens
  source 1..1837: mol_type = genomic DNA
gagccgcgcacgggactgggaaggggacccacccgagggtccagccaccagccccctcactaatagcggccaccccggcagcggcggcagcagcagcagcgacgcagcggcgacagctcagagcagggaggccgcgccacctgcgggccggccggagcgggcagccccaggccccctccccgggcacccgcgttcatgcaacgcctggtggcctgggacccagcatgtctccccctgccgccgccgccgcctgcctttaaatccatggaagtggccaacttctactacgaggcggactgcttggctgctgcgtacggcggcaaggcggcccccgcggcgccccccgcggccagacccgggccgcgcccccccgccggcgagctgggcagcatcggcgaccacgagcgcgccatcgacttcagcccgtacctggagccgctgggcgcgccgcaggccccggcgcccgccacggccacggacaccttcgaggcggctccgcccgcgcccgcccccgcgcccgcctcctccgggcagcaccacgacttcctctccgacctcttctccgacgactacgggggcaagaactgcaagaagccggccgagtacggctacgtgagcctggggcgcctgggggccgccaagggcgcgctgcaccccggctgcttcgcgcccctgcacccaccgcccccgccgccgccgccgcccgccgagctcaaggcggagccgggcttcgagcccgcggactgcaagcggaaggaggaggccggggcgccgggcggcggcgcaggcatggcggcgggcttcccgtacgcgctgcgcgcttacctcggctaccaggcggtgccgagcggcagcagcgggagcctctccacgtcctcctcgtccagcccgcccggcacgccgagccccgctgacgccaaggcgcccccgaccgcctgctacgcgggggccgcgccggcgccctcgcaggtcaagagcaaggccaagaagaccgtggacaagcacagcgacgagtacaagatccggcgcgagcgcaacaacatcgccgtgcgcaagagccgcgacaaggccaagatgcgcaacctggagacgcagcacaaggtcctggagctcacggccgagaacgagcggctgcagaagaaggtggagcagctgtcgcgcgagctcagcaccctgcggaacttgttcaagcagctgcccgagcccctgctcgcctcctccggccactgctagcgcggcccccgcgcgcgtccccctgccggccggggctgagactccggggagcgcccgcgcccgcgccctcgcccccgcccccggcggcgccggcaaaactttggcactggggcacttggcagcgcggggagcccgtcggtaattttaatattttattatatatatatatctatatttttgtccaaaccaaccgcacatgcagatggggctcccgcccgtggtgttatttaaagaagaaacgtctatgtgtacagatgaatgataaactctctgcttctccctctgcccctctccaggcgccggcgggcgggccggtttcgaagttgatgcaatcggtttaaacatggctgaacgcgtgtgtacacgggactgacgcaacccacgtgtaactgtcagccgggccctgagtaatcgcttaaagatgttcctacgggcttgttgctgttgatgttttgttttgttttgttttttggtctttttttgtattataaaaaataatctatttctatgagaaaagaggcgtctgtatattttgggaatcttttccgtttcaagcattaagaacacttttaataaacttttttttgagaatggttacaaagcc

SEQ ID NO: 878 - DNA, 3939 bp, Homo sapiens
  source 1..3939: mol_type = genomic DNA
cccatgctgccctgcgccaacccctcccctcacctttcctcccccgccctctactcgccgcccggccggtccccccacccgtcccttcccttatcagcacccgcggccccggcagcgccgacgcaggcgcactgcaccgcgccgccgccattttgtgtctgagcctgtggagcgattaaaccgtgcgcggagctgcttctttggcggcagcggcggcggcggtggccggtgcggacgcgcggagctcgccggagacgccgggtggccggagccgtggagcggcggcggagcgggcgccgcggggggtgtggcgcggagaatgattacggacctgaagccaaagaacaagatgcgctagtggacagattgctgaccaggggcttgagagctgggttctattttccctcctcaaactgactttgcagccacggagaggcaggggaaatggaaggtgatgcagtcgaagccattgtggaggagtccgaaacttttattaaaggaaaggagagaaagacttaccagagacgccgggaagggggccaggaagaagatgcctgccacttaccccagaaccagacggatgggggtgaggtggtccaggatgtcaacagcagtgtacagatggtgatgatggaacagctggaccccacccttcttcagatgaagactgaagtaatggagggcacagtggctccagaagcagaggctgctgtggacgatacccagattataactttacaggttgtaaatatggaggaacagcccataaacataggagaacttcagcttgttcaagtacctgttcctgtgactgtacctgttgctaccacttcagtagaagaacttcagggggcttatgaaaatgaagtgtctaaagagggccttgcggaaagtgaacccatgatatgccacaccctacctttgcctgaagggtttcaggtggttaaagtgggggccaatggagaggtggagacactagaacaaggggaacttccaccccaggaagatcctagttggcaaaaagacccagactatcagccaccagccaaaaaaacaaagaaaaccaaaaagagcaaactgcgttatacagaggagggcaaagatgtagatgtgtctgtctacgattttgaggaagaacagcaggagggtctgctatcagaggttaatgcagagaaagtggttggtaatatgaagcctccaaagccaacaaaaattaaaaagaaaggtgtaaagaagacattccagtgtgagctttgcagttacacgtgtccacggcgttcaaatttggatcgtcacatgaaaagccacactgatgagagaccacacaagtgccatctctgtggcagggcattcagaacagtcaccctcctgaggaatcaccttaacacacacacaggtactcgtcctcacaagtgcccagactgcgacatggcctttgtgaccagtggagaattggttcggcatcgtcgttacaaacacacccacgagaagccattcaagtgttccatgtgcgattacgccagtgtagaagtcagcaaattaaaacgtcacattcgctctcatactggagagcgtccgtttcagtgcagtttgtgcagttatgccagcagggacacatacaagctgaaaaggcacatgagaacccattcaggggaaaagccttatgaatgttatatttgtcatgctcggtttacccaaagtggtaccatgaagatgcacattttacagaagcacacagaaaatgtggccaaatttcactgtccccactgtgacacagtcatagcccgaaaaagtgatttgggtgtccacttgcgaaagcagcattcctatattgagcaaggcaagaaatgccgttactgtgatgctgtgtttcatgagcgctatgccctcatccagcatcagaagtcacacaagaatgagaagcgctttaagtgtgaccagtgtgattacgcttgtagacaggagaggcacatgatcatgcacaagcgcacccacaccggggagaagccttacgcctgcagccactgcgataagaccttccgccagaagcagcttctcgacatgcacttcaagcgctatcacgaccccaacttcgtccctgcggcttttgtctgttctaagtgtgggaaaacatttacacgtcggaataccatggcaagacatgctgataattgtgctggcccagatggcgtagagggggaaaatggaggagaaacgaagaagagtaaacgtggaagaaaaagaaagatgcgctctaagaaagaagattcctctgacagtgaaaatgctgaaccagatctggacgacaatgaggatgaggaggagcctgccgtagaaattgaacctgagccagagcctcagcctgtgaccccagccccaccacccgccaagaagcggagaggacgaccccctggcagaaccaaccagcccaaacagaaccagccaacagctatcattcaggttgaagaccagaatacaggtgcaattgagaacattatagttgaagtaaaaaaagagccagatgctgagcccgcagagggagaggaagaggaggcccagccagctgccacagatgcccccaacggagacctcacgcccgagatgatcctcagcatgatggaccggtgatggcggagccttgtgcgtcgccaggacttctctgggctgtgtttaaacggcccgcatcttaatttttctcccttctttctttttttggctttgggaaaagcatcattttaccaaacataccgagaacgaaaacttcaaggatgatgttagaaaaaaatgtgatttaactagaacttgctgtctgatgttagcaaatcatggaatgttctgagtccctgagggtttactgtgaagtgctgaggacagtgttgacaactaactcgttttcctagatggaaacggagacattgacccctccctccatgtggtaaaccactccagaatggccaccaggcttcccagagttctatggtcttcttcccaagagagtttttaattgtaaatgcatacttgggaaggacttagagttttaaactgttttttgcttttgcttttccctgactccctttgcttggagtcagctgcacaccagtagtatggcatgctacgatcaggttctgtcctgaaagctttgcctctttcttggcaaagtttctggtatggtcaagcttgtaaataactttttttacattttaatcttttccattaattaagaggttgaaaagaagtgcagtgtaagaaaacccagcattttaattacttgcaaattaagttaccacagactctgtagtgtgtaaatgttgacaaggaattggatcacaatcatgtagcagaatggcacccagaccactgcccaccagtgacggacatgcacgtggcagatcatgatttccagcccacggagccagcatttgaaccttgtataattaactttcagttatgatttcccatcgacattttctttgccctgtttgtagctgattgttgtgttttataaatcttctgttaaggcagaagggtgattatgagtggttcacagcagcccttataagctgggccagaaaatttcactaggtcagtaatttaaaccttggatcttcaaaaaataaaataatgtgaagcaaaaccaactaaaaagtgattcttgcacatgaactgtcacatgtttaaaaatgtgttttttagagagcctcagtcttactgatttcaaacacttttttcttctgtgtattgcttttaagagagccatcagttagctatcagactctaggttgatgcattttgtacttagctgtactgtgtgatatttttcattattttaggacgccaacatgagacctgtaataaaatatgtaatggggttgaaagctggggaggaggatctactgctgtacagctaataaatcataacggattaacaagtgctccaaa

SEQ ID NO: 879 - DNA, 2978 bp, Homo sapiens
  source 1..2978: mol_type = genomic DNA
cccatgctgccctgcgccaacccctcccctcacctttcctcccccgccctctactcgccgcccggccggtccccccacccgtcccttcccttatcagcacccgcggccccggcagcgccgacgcaggcgcactgcaccgcgccgccgccattttgtgtctgagcctgtggagcgattaaaccgtgcgcggagctgcttctttggcggcagcggcggcggcggtggccggtgcggacgcgcggagctcgccggagacgccgggtggccggagccgtggagcggcggcggagcgggcgccgcggggggtgtggcgcggagaatgattacggacctgaagccaaagaacaagatgcgctagtggacagattgctgaccaggggcttgagagctgggttctattttccctcctcaaactgactttgcagccacggagaggtactcgtcctcacaagtgcccagactgcgacatggcctttgtgaccagtggagaattggttcggcatcgtcgttacaaacacacccacgagaagccattcaagtgttccatgtgcgattacgccagtgtagaagtcagcaaattaaaacgtcacattcgctctcatactggagagcgtccgtttcagtgcagtttgtgcagttatgccagcagggacacatacaagctgaaaaggcacatgagaacccattcaggggaaaagccttatgaatgttatatttgtcatgctcggtttacccaaagtggtaccatgaagatgcacattttacagaagcacacagaaaatgtggccaaatttcactgtccccactgtgacacagtcatagcccgaaaaagtgatttgggtgtccacttgcgaaagcagcattcctatattgagcaaggcaagaaatgccgttactgtgatgctgtgtttcatgagcgctatgccctcatccagcatcagaagtcacacaagaatgagaagcgctttaagtgtgaccagtgtgattacgcttgtagacaggagaggcacatgatcatgcacaagcgcacccacaccggggagaagccttacgcctgcagccactgcgataagaccttccgccagaagcagcttctcgacatgcacttcaagcgctatcacgaccccaacttcgtccctgcggcttttgtctgttctaagtgtgggaaaacatttacacgtcggaataccatggcaagacatgctgataattgtgctggcccagatggcgtagagggggaaaatggaggagaaacgaagaagagtaaacgtggaagaaaaagaaagatgcgctctaagaaagaagattcctctgacagtgaaaatgctgaaccagatctggacgacaatgaggatgaggaggagcctgccgtagaaattgaacctgagccagagcctcagcctgtgaccccagccccaccacccgccaagaagcggagaggacgaccccctggcagaaccaaccagcccaaacagaaccagccaacagctatcattcaggttgaagaccagaatacaggtgcaattgagaacattatagttgaagtaaaaaaagagccagatgctgagcccgcagagggagaggaagaggaggcccagccagctgccacagatgcccccaacggagacctcacgcccgagatgatcctcagcatgatggaccggtgatggcggagccttgtgcgtcgccaggacttctctgggctgtgtttaaacggcccgcatcttaatttttctcccttctttctttttttggctttgggaaaagcatcattttaccaaacataccgagaacgaaaacttcaaggatgatgttagaaaaaaatgtgatttaactagaacttgctgtctgatgttagcaaatcatggaatgttctgagtccctgagggtttactgtgaagtgctgaggacagtgttgacaactaactcgttttcctagatggaaacggagacattgacccctccctccatgtggtaaaccactccagaatggccaccaggcttcccagagttctatggtcttcttcccaagagagtttttaattgtaaatgcatacttgggaaggacttagagttttaaactgttttttgcttttgcttttccctgactccctttgcttggagtcagctgcacaccagtagtatggcatgctacgatcaggttctgtcctgaaagctttgcctctttcttggcaaagtttctggtatggtcaagcttgtaaataactttttttacattttaatcttttccattaattaagaggttgaaaagaagtgcagtgtaagaaaacccagcattttaattacttgcaaattaagttaccacagactctgtagtgtgtaaatgttgacaaggaattggatcacaatcatgtagcagaatggcacccagaccactgcccaccagtgacggacatgcacgtggcagatcatgatttccagcccacggagccagcatttgaaccttgtataattaactttcagttatgatttcccatcgacattttctttgccctgtttgtagctgattgttgtgttttataaatcttctgttaaggcagaagggtgattatgagtggttcacagcagcccttataagctgggccagaaaatttcactaggtcagtaatttaaaccttggatcttcaaaaaataaaataatgtgaagcaaaaccaactaaaaagtgattcttgcacatgaactgtcacatgtttaaaaatgtgttttttagagagcctcagtcttactgatttcaaacacttttttcttctgtgtattgcttttaagagagccatcagttagctatcagactctaggttgatgcattttgtacttagctgtactgtgtgatatttttcattattttaggacgccaacatgagacctgtaataaaatatgtaatggggttgaaagctggggaggaggatctactgctgtacagctaataaatcataacggattaacaagtgctccaaa

SEQ ID NO: 880 - DNA, 1886 bp, Homo sapiens
  source 1..1886: mol_type = genomic DNA
aattctaccccccttggtgccaacagatgaggttcacaatctcttccacaaaacatgcagttaaatatctgaggatattcagggacttggatttggtggcaggagatcaacataaaccaagacaaggaagaagtcaaagaaatgaatcaagtagattctctgggatataaggtagggggattggggggttggatagtgcagagtatggtactggcctaaggcactgaggatcatccttttcccacacccaccagagaaggcttaggctcccgagtcaacagggcattcaccgcctggggcgcctgagtcatcaggacactgccaggagacacagaaccctagatgccctgcagaatccttcctgttacggtccccctccctgaaacatccttcattgcaatatttccaggaaaggaagggggctggctcggaggaagagaggtggggaggtgatcagggttcacagaggagggaactgaatgacatcccaggattacataaactgtcagaggcagccgaagagttcacaagtgtgaagcctggaagccggcgggtgccgctgtgtaggaaagaagctaaagcacttccagagcctgtccggagctcagaggttcggaagacttatcgaccatggagcgcgcgtcctgcttgttgctgctgctgctgccgctggtgcacgtctctgcgaccacgccagaaccttgtgagctggacgatgaagatttccgctgcgtctgcaacttctccgaacctcagcccgactggtccgaagccttccagtgtgtgtctgcagtagaggtggagatccatgccggcggtctcaacctagagccgtttctaaagcgcgtcgatgcggacgccgacccgcggcagtatgctgacacggtcaaggctctccgcgtgcggcggctcacagtgggagccgcacaggttcctgctcagctactggtaggcgccctgcgtgtgctagcgtactcccgcctcaaggaactgacgctcgaggacctaaagataaccggcaccatgcctccgctgcctctggaagccacaggacttgcactttccagcttgcgcctacgcaacgtgtcgtgggcgacagggcgttcttggctcgccgagctgcagcagtggctcaagccaggcctcaaggtactgagcattgcccaagcacactcgcctgccttttcctgcgaacaggttcgcgccttcccggcccttaccagcctagacctgtctgacaatcctggactgggcgaacgcggactgatggcggctctctgtccccacaagttcccggccatccagaatctagcgctgcgcaacacaggaatggagacgcccacaggcgtgtgcgccgcactggcggcggcaggtgtgcagccccacagcctagacctcagccacaactcgctgcgcgccaccgtaaaccctagcgctccgagatgcatgtggtccagcgccctgaactccctcaatctgtcgttcgctgggctggaacaggtgcctaaaggactgccagccaagctcagagtgctcgatctcagctgcaacagactgaacagggcgccgcagcctgacgagctgcccgaggtggataacctgacactggacgggaatcccttcctggtccctggaactgccctcccccacgagggctcaatgaactccggcgtggtcccagcctgtgcacgttcgaccctgtcggtgggggtgtcgggaaccctggtgctgctccaaggggcccggggctttgcctaagatccaagacagaataatgaatggactcaaactgccttggcttcaggggagtcccgtcaggacgttgaggacttttcgaccaattcaaccctttgccccacctttattaaaatcttaaacaacgggtc

SEQ ID NO: 881 - DNA, 1648 bp, Homo sapiens
  source 1..1648: mol_type = genomic DNA
aattctaccccccttggtgccaacagatgaggttcacaatctcttccacaaaacatgcagttaaatatctgaggatattcagggacttggatttggtggcaggagatcaacataaaccaagacaaggaagaagtcaaagaaatgaatcaagtagattctctgggatataaggaaaggaagggggctggctcggaggaagagaggtggggaggtgatcagggttcacagaggagggaactgaatgacatcccaggattacataaactgtcagaggcagccgaagagttcacaagtgtgaagcctggaagccggcgggtgccgctgtgtaggaaagaagctaaagcacttccagagcctgtccggagctcagaggttcggaagacttatcgaccatggagcgcgcgtcctgcttgttgctgctgctgctgccgctggtgcacgtctctgcgaccacgccagaaccttgtgagctggacgatgaagatttccgctgcgtctgcaacttctccgaacctcagcccgactggtccgaagccttccagtgtgtgtctgcagtagaggtggagatccatgccggcggtctcaacctagagccgtttctaaagcgcgtcgatgcggacgccgacccgcggcagtatgctgacacggtcaaggctctccgcgtgcggcggctcacagtgggagccgcacaggttcctgctcagctactggtaggcgccctgcgtgtgctagcgtactcccgcctcaaggaactgacgctcgaggacctaaagataaccggcaccatgcctccgctgcctctggaagccacaggacttgcactttccagcttgcgcctacgcaacgtgtcgtgggcgacagggcgttcttggctcgccgagctgcagcagtggctcaagccaggcctcaaggtactgagcattgcccaagcacactcgcctgccttttcctgcgaacaggttcgcgccttcccggcccttaccagcctagacctgtctgacaatcctggactgggcgaacgcggactgatggcggctctctgtccccacaagttcccggccatccagaatctagcgctgcgcaacacaggaatggagacgcccacaggcgtgtgcgccgcactggcggcggcaggtgtgcagccccacagcctagacctcagccacaactcgctgcgcgccaccgtaaaccctagcgctccgagatgcatgtggtccagcgccctgaactccctcaatctgtcgttcgctgggctggaacaggtgcctaaaggactgccagccaagctcagagtgctcgatctcagctgcaacagactgaacagggcgccgcagcctgacgagctgcccgaggtggataacctgacactggacgggaatcccttcctggtccctggaactgccctcccccacgagggctcaatgaactccggcgtggtcccagcctgtgcacgttcgaccctgtcggtgggggtgtcgggaaccctggtgctgctccaaggggcccggggctttgcctaagatccaagacagaataatgaatggactcaaactgccttggcttcaggggagtcccgtcaggacgttgaggacttttcgaccaattcaaccctttgccccacctttattaaaatcttaaacaacgggtc

SEQ ID NO: 882 - DNA, 478 bp, Homo sapiens
  source 1..478: mol_type = genomic DNA
atcaaaagaggaaaccaacccctaagatgagctttccatgtaaatttgtagccagcttccttctgattttcaatgtttcttccaaaggtgcagtctccaaagagattacgaatgccttggaaacctggggtgccttgggtcaggacatcaacttggacattcctagttttcaaatgagtgatgatattgacgatataaaatgggaaaaaacttcagacaagaaaaagattgcacaattcagaaaagagaaagagactttcaaggaaaaagatacatataagctatttaaaaatggaactctgaaaattaagcatctgaagaccgatgatcaggatatctacaaggtatcaatatatgatacaaaaggaaaaaatgtgttggaaaaaatatttgatttgaagattcaaggtaagtgttcattcccttaattgctttatttcagtgtgggtgctatttggcaagttggaaaatagcattt

SEQ ID NO: 883 - DNA, 1609 bp, Homo sapiens
  source 1..1609: mol_type = genomic DNA
gtaaagagaggcacgtggttaagctctcggggtgtggactccaccagtctcacttcagttccttttgcatgaagagctcagaatcaaaagaggaaaccaacccctaagatgagctttccatgtaaatttgtagccagcttccttctgattttcaatgtttcttccaaaggtgcagtctccaaagagattacgaatgccttggaaacctggggtgccttgggtcaggacatcaacttggacattcctagttttcaaatgagtgatgatattgacgatataaaatgggaaaaaacttcagacaagaaaaagattgcacaattcagaaaagagaaagagactttcaaggaaaaagatacatataagctatttaaaaatggaactctgaaaattaagcatctgaagaccgatgatcaggatatctacaaggtatcaatatatgatacaaaaggaaaaaatgtgttggaaaaaatatttgatttgaagattcaagagagggtctcaaaaccaaagatctcctggacttgtatcaacacaaccctgacctgtgaggtaatgaatggaactgaccccgaattaaacctgtatcaagatgggaaacatctaaaactttctcagagggtcatcacacacaagtggaccaccagcctgagtgcaaaattcaagtgcacagcagggaacaaagtcagcaaggaatccagtgtcgagcctgtcagctgtccagagaaaggtctggacatctatctcatcattggcatatgtggaggaggcagcctcttgatggtctttgtggcactgctcgttttctatatcaccaaaaggaaaaaacagaggagtcggagaaatgatgaggagctggagacaagagcccacagagtagctactgaagaaaggggccggaagccccaccaaattccagcttcaacccctcagaatccagcaacttcccaacatcctcctccaccacctggtcatcgttcccaggcacctagtcatcgtcccccgcctcctggacaccgtgttcagcaccagcctcagaagaggcctcctgctccgtcgggcacacaagttcaccagcagaaaggcccgcccctccccagacctcgagttcagccaaaacctccccatggggcagcagaaaactcattgtccccttcctctaattaaaaaagatagaaactgtctttttcaataaaaagcactgtggatttctgccctcctgatgtgcatatccgtacttccatgaggtgttttctgtgtgcagaacattgtcacctcctgaggctgtgggccacagccacctctgcatcttcgaactcagccatgtggtcaacatctggagtttttggtctcctcagagagctccatcacaccagtaaggagaagcaatataagtgtgattgcaagaatggtagaggaccgagcacagaaatcttagagatttcttgtcccctctcaggtcatgtgtagatgcgataaatcaagtgattggtgtgcctgggtctcactacaagcagcctatctgcttaagagactctggagtttcttatgtgccctggtggacacttgcccaccatcctgtgagtaaaagtgaaataaaagctttgactag

SEQ ID NO: 884 - DNA, 3286 bp, Homo sapiens
  source 1..3286: mol_type = genomic DNA
acttctccttttgctctcagatgctgccagggtccctgaagagggaagacacgcggaaacaggcttgcacccagacacgacaccatgcatctcctcggcccctggctcctgctcctggttctagaatacttggctttctctgactcaagtaaatgggtttttgagcaccctgaaaccctctacgcctgggagggggcctgcgtctggatcccctgcacctacagagccctagatggtgacctggaaagcttcatcctgttccacaatcctgagtataacaagaacacctcgaagtttgatgggacaagactctatgaaagcacaaaggatgggaaggttccttctgagcagaaaagggtgcaattcctgggagacaagaataagaactgcacactgagtatccacccggtgcacctcaatgacagtggtcagctggggctgaggatggagtccaagactgagaaatggatggaacgaatacacctcaatgtctctgaaaggccttttccacctcatatccagctccctccagaaattcaagagtcccaggaagtcactctgacctgcttgctgaatttctcctgctatgggtatccgatccaattgcagtggctcctagagggggttccaatgaggcaggctgctgtcacctcgacctccttgaccatcaagtctgtcttcacccggagcgagctcaagttctccccacagtggagtcaccatgggaagattgtgacctgccagcttcaggatgcagatgggaagttcctctccaatgacacggtgcagctgaacgtgaagcacaccccgaagttggagatcaaggtcactcccagtgatgccatagtgagggagggggactctgtgaccatgacctgcgaggtcagcagcagcaacccggagtacacgacggtatcctggctcaaggatgggacctcgctgaagaagcagaatacattcacgctaaacctgcgcgaagtgaccaaggaccagagtgggaagtactgctgtcaggtctccaatgacgtgggcccgggaaggtcggaagaagtgttcctgcaagtgcagtatgccccggaaccttccacggttcagatcctccactcaccggctgtggagggaagtcaagtcgagtttctttgcatgtcactggccaatcctcttccaacaaattacacgtggtaccacaatgggaaagaaatgcagggaaggacagaggagaaagtccacatcccaaagatcctcccctggcacgctgggacttattcctgtgtggcagaaaacattcttggtactggacagaggggcccgggagctgagctggatgtccagtatcctcccaagaaggtgaccacagtgattcaaaaccccatgccgattcgagaaggagacacagtgaccctttcctgtaactacaattccagtaaccccagtgttacccggtatgaatggaaaccccatggcgcctgggaggagccatcgcttggggtgctgaagatccaaaacgttggctgggacaacacaaccatcgcctgcgcagcttgtaatagttggtgctcgtgggcctcccctgtcgccctgaatgtccagtatgccccccgagacgtgagggtccggaaaatcaagcccctttccgagattcactctggaaactcggtcagcctccaatgtgacttctcaagcagccaccccaaagaagtccagttcttctgggagaaaaatggcaggcttctggggaaagaaagccagctgaattttgactccatctccccagaagatgctgggagttacagctgctgggtgaacaactccataggacagacagcgtccaaggcctggacacttgaagtgctgtatgcacccaggaggctgcgtgtgtccatgagcccgggggaccaagtgatggaggggaagagtgcaaccctgacctgtgagagcgacgccaaccctcccgtctcccactacacctggtttgactggaataaccaaagcctcccctaccacagccagaagctgagattggagccggtgaaggtccagcactcgggtgcctactggtgccaggggaccaacagtgtgggcaagggccgttcgcctctcagcaccctcaccgtctactatagcccggagaccatcggcaggcgagtggctgtgggactcgggtcctgcctcgccatcctcatcctggcaatctgtgggctcaagctccagcgacgttggaagaggacacagagccagcaggggcttcaggagaattccagcggccagagcttctttgtgaggaataaaaaggttagaagggcccccctctctgaaggcccccactccctgggatgctacaatccaatgatggaagatggcattagctacaccaccctgcgctttcccgagatgaacataccacgaactggagatgcagagtcctcagagatgcagagacctcccccggactgcgatgacacggtcacttattcagcattgcacaagcgccaagtgggcgactatgagaacgtcattccagattttccagaagatgaggggattcattactcagagctgatccagtttggggtcggggagcggcctcaggcacaagaaaatgtggactatgtgatcctcaaacattgacactggatgggctgcagcagaggcactgggggcagcgggggccagggaagtccccgagtttccccagacaccgccacatggcttcctcctgcgcgcatgtgcgcacacacacacacacacgcacacacacacacacacactcactgcggagaaccttgtgcctggctcagagccagtctttttggtgagggtaaccccaaacctccaaaactcctgcccctgttctcttccactctccttgctacccagaaatccatctaaatacctgccctgacatgcacacctccccctgcccccaccacggccactggccatctccacccccagctgcttgtgtccctcctgggatctgctcgtcatcatttttccttcccttctccatctctctggccctctacccctgatctgacatccccactcacgaatattatgcccagtttctgcctctgagggaaagcccagaaaaggacagaaacgaagtagaaaggggcccagtcctggcctggcttctcctttggaagtgaggcattgcacagggagacgtacgtatcagcggccccttgactctggggactccgggtttgagatggacacactggtgtggattaacctgccagggagacagagctcacaataaaaatggctcagatgccacttc

SEQ ID NO: 885 - DNA, 3084 bp, Homo sapiens
  source 1..3084: mol_type = genomic DNA
cttttgctctcagatgctgccagggtccctgaagagggaagacacgcggaaacaggcttgcacccagacacgacaccatgcatctcctcggcccctggctcctgctcctggttctagaatacttggctttctctgactcaagtaaatgggtttttgagcaccctgaaaccctctacgcctgggagggggcctgcgtctggatcccctgcacctacagagccctagatggtgacctggaaagcttcatcctgttccacaatcctgagtataacaagaacacctcgaagtttgatgggacaagactctatgaaagcacaaaggatgggaaggttccttctgagcagaaaagggtgcaattcctgggagacaagaataagaactgcacactgagtatccacccggtgcacctcaatgacagtggtcagctggggctgaggatggagtccaagactgagaaatggatggaacgaatacacctcaatgtctctgaaaggccttttccacctcatatccagctccctccagaaattcaagagtcccaggaagtcactctgacctgcttgctgaatttctcctgctatgggtatccgatccaattgcagtggctcctagagggggttccaatgaggcaggctgctgtcacctcgacctccttgaccatcaagtctgtcttcacccggagcgagctcaagttctccccacagtggagtcaccatgggaagattgtgacctgccagcttcaggatgcagatgggaagttcctctccaatgacacggtgcagctgaacgtgaagcacaccccgaagttggagatcaaggtcactcccagtgatgccatagtgagggagggggactctgtgaccatgacctgcgaggtcagcagcagcaacccggagtacacgacggtatcctggctcaaggatgggacctcgctgaagaagcagaatacattcacgctaaacctgcgcgaagtgaccaaggaccagagtgggaagtactgctgtcaggtctccaatgacgtgggcccgggaaggtcggaagaagtgttcctgcaagtgcagtatgccccggaaccttccacggttcagatcctccactcaccggctgtggagggaagtcaagtcgagtttctttgcatgtcactggccaatcctcttccaacaaattacacgtggtaccacaatgggaaagaaatgcagggaaggacagaggagaaagtccacatcccaaagatcctcccctggcacgctgggacttattcctgtgtggcagaaaacattcttggtactggacagaggggcccgggagctgagctggatgtccagtatcctcccaagaaggtgaccacagtgattcaaaaccccatgccgattcgagaaggagacacagtgaccctttcctgtaactacaattccagtaaccccagtgttacccggtatgaatggaaaccccatggcgcctgggaggagccatcgcttggggtgctgaagatccaaaacgttggctgggacaacacaaccatcgcctgcgcagcttgtaatagttggtgctcgtgggcctcccctgtcgccctgaatgtccagtatgccccccgagacgtgagggtccggaaaatcaagcccctttccgagattcactctggaaactcggtcagcctccaatgtgacttctcaagcagccaccccaaagaagtccagttcttctgggagaaaaatggcaggcttctggggaaagaaagccagctgaattttgactccatctccccagaagatgctgggagttacagctgctgggtgaacaactccataggacagacagcgtccaaggcctggacacttgaagtgctgtatgcacccaggaggctgcgtgtgtccatgagcccgggggaccaagtgatggaggggaagagtgcaaccctgacctgtgagagcgacgccaaccctcccgtctcccactacacctggtttgactggaataaccaaagcctcccctaccacagccagaagctgagattggagccggtgaaggtccagcactcgggtgcctactggtgccaggggaccaacagtgtgggcaagggccgttcgcctctcagcaccctcaccgtctactatagcccggagaccatcggcaggcgagtggctgtgggactcgggtcctgcctcgccatcctcatcctggcaatctgtgggctcaagctccagcgacgagatgcagagtcctcagagatgcagagacctcccccggactgcgatgacacggtcacttattcagcattgcacaagcgccaagtgggcgactatgagaacgtcattccagattttccagaagatgaggggattcattactcagagctgatccagtttggggtcggggagcggcctcaggcacaagaaaatgtggactatgtgatcctcaaacattgacactggatgggctgcagcagaggcactgggggcagcgggggccagggaagtccccgagtttccccagacaccgccacatggcttcctcctgcgcgcatgtgcgcacacacacacacacacgcacacacacacacacacactcactgcggagaaccttgtgcctggctcagagccagtctttttggtgagggtaaccccaaacctccaaaactcctgcccctgttctcttccactctccttgctacccagaaatccatctaaatacctgccctgacatgcacacctccccctgcccccaccacggccactggccatctccacccccagctgcttgtgtccctcctgggatctgctcgtcatcatttttccttcccttctccatctctctggccctctacccctgatctgacatccccactcacgaatattatgcccagtttctgcctctgagggaaagcccagaaaaggacagaaacgaagtagaaaggggcccagtcctggcctggcttctcctttggaagtgaggcattgcacagggagacgtacgtatcagcggccccttgactctggggactccgggtttgagatggacacactggtgtggattaacctgccagggagacagagctcacaataaaaatggctcagatgccacttc

SEQ ID NO: 886 - DNA, 2755 bp, Homo sapiens
  source 1..2755: mol_type = genomic DNA
acttctccttttgctctcagatgctgccagggtccctgaagagggaagacacgcggaaacaggcttgcacccagacacgacaccatgcatctcctcggcccctggctcctgctcctggttctagaatacttggctttctctgactcaagtaaatgggtttttgagcaccctgaaaccctctacgcctgggagggggcctgcgtctggatcccctgcacctacagagccctagatggtgacctggaaagcttcatcctgttccacaatcctgagtataacaagaacacctcgaagtttgatgggacaagactctatgaaagcacaaaggatgggaaggttccttctgagcagaaaagggtgcaattcctgggagacaagaataagaactgcacactgagtatccacccggtgcacctcaatgacagtggtcagctggggctgaggatggagtccaagactgagaaatggatggaacgaatacacctcaatgtctctgaaaggccttttccacctcatatccagctccctccagaaattcaagagtcccaggaagtcactctgacctgcttgctgaatttctcctgctatgggtatccgatccaattgcagtggctcctagagggggttccaatgaggcaggctgctgtcacctcgacctccttgaccatcaagtctgtcttcacccggagcgagctcaagttctccccacagtggagtcaccatgggaagattgtgacctgccagcttcaggatgcagatgggaagttcctctccaatgacacggtgcagctgaacgtgaagcatcctcccaagaaggtgaccacagtgattcaaaaccccatgccgattcgagaaggagacacagtgaccctttcctgtaactacaattccagtaaccccagtgttacccggtatgaatggaaaccccatggcgcctgggaggagccatcgcttggggtgctgaagatccaaaacgttggctgggacaacacaaccatcgcctgcgcagcttgtaatagttggtgctcgtgggcctcccctgtcgccctgaatgtccagtatgccccccgagacgtgagggtccggaaaatcaagcccctttccgagattcactctggaaactcggtcagcctccaatgtgacttctcaagcagccaccccaaagaagtccagttcttctgggagaaaaatggcaggcttctggggaaagaaagccagctgaattttgactccatctccccagaagatgctgggagttacagctgctgggtgaacaactccataggacagacagcgtccaaggcctggacacttgaagtgctgtatgcacccaggaggctgcgtgtgtccatgagcccgggggaccaagtgatggaggggaagagtgcaaccctgacctgtgagagcgacgccaaccctcccgtctcccactacacctggtttgactggaataaccaaagcctcccctaccacagccagaagctgagattggagccggtgaaggtccagcactcgggtgcctactggtgccaggggaccaacagtgtgggcaagggccgttcgcctctcagcaccctcaccgtctactatagcccggagaccatcggcaggcgagtggctgtgggactcgggtcctgcctcgccatcctcatcctggcaatctgtgggctcaagctccagcgacgttggaagaggacacagagccagcaggggcttcaggagaattccagcggccagagcttctttgtgaggaataaaaaggttagaagggcccccctctctgaaggcccccactccctgggatgctacaatccaatgatggaagatggcattagctacaccaccctgcgctttcccgagatgaacataccacgaactggagatgcagagtcctcagagatgcagagacctcccccggactgcgatgacacggtcacttattcagcattgcacaagcgccaagtgggcgactatgagaacgtcattccagattttccagaagatgaggggattcattactcagagctgatccagtttggggtcggggagcggcctcaggcacaagaaaatgtggactatgtgatcctcaaacattgacactggatgggctgcagcagaggcactgggggcagcgggggccagggaagtccccgagtttccccagacaccgccacatggcttcctcctgcgcgcatgtgcgcacacacacacacacacgcacacacacacacacacactcactgcggagaaccttgtgcctggctcagagccagtctttttggtgagggtaaccccaaacctccaaaactcctgcccctgttctcttccactctccttgctacccagaaatccatctaaatacctgccctgacatgcacacctccccctgcccccaccacggccactggccatctccacccccagctgcttgtgtccctcctgggatctgctcgtcatcatttttccttcccttctccatctctctggccctctacccctgatctgacatccccactcacgaatattatgcccagtttctgcctctgagggaaagcccagaaaaggacagaaacgaagtagaaaggggcccagtcctggcctggcttctcctttggaagtgaggcattgcacagggagacgtacgtatcagcggccccttgactctggggactccgggtttgagatggacacactggtgtggattaacctgccagggagacagagctcacaataaaaatggctcagatgccacttc

SEQ ID NO: 887 - DNA, 2642 bp, Homo sapiens
  source 1..2642: mol_type = genomic DNA
ggaagacacgcggaaacagaatacttggctttctctgactcaagtaaatgggtttttgagcaccctgaaaccctctacgcctgggagggggcctgcgtctggatcccctgcacctacagagccctagatggtgacctggaaagcttcatcctgttccacaatcctgagtataacaagaacacctcgaagtttgatgggacaagactctatgaaagcacaaaggatgggaaggttccttctgagcagaaaagggtgcaattcctgggagacaagaataagaactgcacactgagtatccacccggtgcacctcaatgacagtggtcagctggggctgaggatggagtccaagactgagaaatggatggaacgaatacacctcaatgtctctgtggctcctagagggggttccaatgaggcaggctgctgtcacctcgacctccttgaccatcaagtctgtcttcacccggagcgagctcaagttctccccacagtggagtcaccatgggaagattgtgacctgccagcttcaggatgcagatgggaagttcctctccaatgacacggtgcagctgaacgtgaagcacaccccgaagttggagatcaaggtcactcccagtgatgccatagtgagggagggggactctgtgaccatgacctgcgaggtcagcagcagcaacccggagtacacgacggtatcctggctcaaggatgggacctcgctgaagaagcagaatacattcacgctaaacctgcgcgaagtgaccaaggaccagagtgggaagtactgctgtcaggtctccaatgacgtgggcccgggaaggtcggaagaagtgttcctgcaagtgcagtatgccccggaaccttccacggttcagatcctccactcaccggctgtggagggaagtcaagtcgagtttctttgcatgtcactggccaatcctcttccaacaaattacacgtggtaccacaatgggaaagaaatgcagggaaggacagaggagaaagtccacatcccaaagatcctcccctggcacgctgggacttattcctgtgtggcagaaaacattcttggtactggacagaggggcccgggagctgagctggatgtccagtatcctcccaagaaggtgaccacagtgattcaaaaccccatgccgattcgagaaggagacacagtgaccctttcctgtaactacaattccagtaaccccagtgttacccggtatgaatggaaaccccatggcgcctgggaggagccatcgcttggggtgctgaagatccaaaacgttggctgggacaacacaaccatcgcctgcgcagcttgtaatagttggtgctcgtgggcctcccctgtcgccctgaatgtccagtatgccccccgagacgtgagggtccggaaaatcaagcccctttccgagattcactctggaaactcggtcagcctccaatgtgacttctcaagcagccaccccaaagaagtccagttcttctgggagaaaaatggcaggcttctggggaaagaaagccagctgaattttgactccatctccccagaagatgctgggagttacagctgctgggtgaacaactccataggacagacagcgtccaaggcctggacacttgaagtgctgtatgcacccaggaggctgcgtgtgtccatgagcccgggggaccaagtgatggaggggaagagtgcaaccctgacctgtgagagcgacgccaaccctcccgtctcccactacacctggtttgactggaataaccaaagcctcccctaccacagccagaagctgagattggagccggtgaaggtccagcactcgggtgcctactggtgccaggggaccaacagtgtgggcaagggccgttcgcctctcagcaccctcaccgtctactatagcccggagaccatcggcaggcgagtggctgtgggactcgggtcctgcctcgccatcctcatcctggcaatctgtgggctcaagctccagcgacgttggaagaggacacagagccagcaggggcttcaggagaattccagcggccagagcttctttgtgaggaataaaaaggttagaagggcccccctctctgaaggcccccactccctgggatgctacaatccaatgatggaagatggcattagctacaccaccctgcgctttcccgagatgaacataccacgaactggagatgcagagtcctcagagatgcagagacctcccccggactgcgatgacacggtcacttattcagcattgcacaagcgccaagtgggcgactatgagaacgtcattccagattttccagaagatgaggggattcattactcagagctgatccagtttggggtcggggagcggcctcaggcacaagaaaatgtggactatgtgatcctcaaacattgacactggatgggctgcagcagaggcactgggggcagcgggggccagggaagtccccgagtttccccagacaccgccacatggcttcctcctgcgcgcatgtgcgcacacacacacacacacgcacacacacacacacacactcactgcggagaaccttgtgcctggctcagagccagtctttttggtgagggtaaccccaaacctccaaaactcctgcccctgttctcttcca

SEQ ID NO: 888 - DNA, 3022 bp, Homo sapiens
  source 1..3022: mol_type = genomic DNA
acttctccttttgctctcagatgctgccagggtccctgaagagggaagacacgcggaaacaggcttgcacccagacacgacaccatgcatctcctcggcccctggctcctgctcctggttctagaatacttggctttctctgactcaagtaaatgggtttttgagcaccctgaaaccctctacgcctgggagggggcctgcgtctggatcccctgcacctacagagccctagatggtgacctggaaagcttcatcctgttccacaatcctgagtataacaagaacacctcgaagtttgatgggacaagactctatgaaagcacaaaggatgggaaggttccttctgagcagaaaagggtgcaattcctgggagacaagaataagaactgcacactgagtatccacccggtgcacctcaatgacagtggtcagctggggctgaggatggagtccaagactgagaaatggatggaacgaatacacctcaatgtctctgaaaggccttttccacctcatatccagctccctccagaaattcaagagtcccaggaagtcactctgacctgcttgctgaatttctcctgctatgggtatccgatccaattgcagtggctcctagagggggttccaatgaggcaggctgctgtcacctcgacctccttgaccatcaagtctgtcttcacccggagcgagctcaagttctccccacagtggagtcaccatgggaagattgtgacctgccagcttcaggatgcagatgggaagttcctctccaatgacacggtgcagctgaacgtgaagcacaccccgaagttggagatcaaggtcactcccagtgatgccatagtgagggagggggactctgtgaccatgacctgcgaggtcagcagcagcaacccggagtacacgacggtatcctggctcaaggatgggacctcgctgaagaagcagaatacattcacgctaaacctgcgcgaagtgaccaaggaccagagtgggaagtactgctgtcaggtctccaatgacgtgggcccgggaaggtcggaagaagtgttcctgcaagtgcagtatcctcccaagaaggtgaccacagtgattcaaaaccccatgccgattcgagaaggagacacagtgaccctttcctgtaactacaattccagtaaccccagtgttacccggtatgaatggaaaccccatggcgcctgggaggagccatcgcttggggtgctgaagatccaaaacgttggctgggacaacacaaccatcgcctgcgcagcttgtaatagttggtgctcgtgggcctcccctgtcgccctgaatgtccagtatgccccccgagacgtgagggtccggaaaatcaagcccctttccgagattcactctggaaactcggtcagcctccaatgtgacttctcaagcagccaccccaaagaagtccagttcttctgggagaaaaatggcaggcttctggggaaagaaagccagctgaattttgactccatctccccagaagatgctgggagttacagctgctgggtgaacaactccataggacagacagcgtccaaggcctggacacttgaagtgctgtatgcacccaggaggctgcgtgtgtccatgagcccgggggaccaagtgatggaggggaagagtgcaaccctgacctgtgagagcgacgccaaccctcccgtctcccactacacctggtttgactggaataaccaaagcctcccctaccacagccagaagctgagattggagccggtgaaggtccagcactcgggtgcctactggtgccaggggaccaacagtgtgggcaagggccgttcgcctctcagcaccctcaccgtctactatagcccggagaccatcggcaggcgagtggctgtgggactcgggtcctgcctcgccatcctcatcctggcaatctgtgggctcaagctccagcgacgttggaagaggacacagagccagcaggggcttcaggagaattccagcggccagagcttctttgtgaggaataaaaaggttagaagggcccccctctctgaaggcccccactccctgggatgctacaatccaatgatggaagatggcattagctacaccaccctgcgctttcccgagatgaacataccacgaactggagatgcagagtcctcagagatgcagagacctcccccggactgcgatgacacggtcacttattcagcattgcacaagcgccaagtgggcgactatgagaacgtcattccagattttccagaagatgaggggattcattactcagagctgatccagtttggggtcggggagcggcctcaggcacaagaaaatgtggactatgtgatcctcaaacattgacactggatgggctgcagcagaggcactgggggcagcgggggccagggaagtccccgagtttccccagacaccgccacatggcttcctcctgcgcgcatgtgcgcacacacacacacacacgcacacacacacacacacactcactgcggagaaccttgtgcctggctcagagccagtctttttggtgagggtaaccccaaacctccaaaactcctgcccctgttctcttccactctccttgctacccagaaatccatctaaatacctgccctgacatgcacacctccccctgcccccaccacggccactggccatctccacccccagctgcttgtgtccctcctgggatctgctcgtcatcatttttccttcccttctccatctctctggccctctacccctgatctgacatccccactcacgaatattatgcccagtttctgcctctgagggaaagcccagaaaaggacagaaacgaagtagaaaggggcccagtcctggcctggcttctcctttggaagtgaggcattgcacagggagacgtacgtatcagcggccccttgactctggggactccgggtttgagatggacacactggtgtggattaacctgccagggagacagagctcacaataaaaatggctcagatgccacttc

SEQ ID NO: 889 - DNA, 3167 bp, Homo sapiens
  source 1..3167: mol_type = genomic DNA
acttctccttttgctctcagatgctgccagggtccctgaagagggaagacacgcggaaacaggcttgcacccagacacgacaccatgcatctcctcggcccctggctcctgctcctggttctagaatacttggctttctctgactcaagtaaatgggtttttgagcaccctgaaaccctctacgcctgggagggggcctgcgtctggatcccctgcacctacagagccctagatggtgacctggaaagcttcatcctgttccacaatcctgagtataacaagaacacctcgaagtttgatgggacaagactctatgaaagcacaaaggatgggaaggttccttctgagcagaaaagggtgcaattcctgggagacaagaataagaactgcacactgagtatccacccggtgcacctcaatgacagtggtcagctggggctgaggatggagtccaagactgagaaatggatggaacgaatacacctcaatgtctctgaaaggccttttccacctcatatccagctccctccagaaattcaagagtcccaggaagtcactctgacctgcttgctgaatttctcctgctatgggtatccgatccaattgcagtggctcctagagggggttccaatgaggcaggctgctgtcacctcgacctccttgaccatcaagtctgtcttcacccggagcgagctcaagttctccccacagtggagtcaccatgggaagattgtgacctgccagcttcaggatgcagatgggaagttcctctccaatgacacggtgcagctgaacgtgaagcacaccccgaagttggagatcaaggtcactcccagtgatgccatagtgagggagggggactctgtgaccatgacctgcgaggtcagcagcagcaacccggagtacacgacggtatcctggctcaaggatgggacctcgctgaagaagcagaatacattcacgctaaacctgcgcgaagtgaccaaggaccagagtgggaagtactgctgtcaggtctccaatgacgtgggcccgggaaggtcggaagaagtgttcctgcaagtgcagtatgccccggaaccttccacggttcagatcctccactcaccggctgtggagggaagtcaagtcgagtttctttgcatgtcactggccaatcctcttccaacaaattacacgtggtaccacaatgggaaagaaatgcagggaaggacagaggagaaagtccacatcccaaagatcctcccctggcacgctgggacttattcctgtgtggcagaaaacattcttggtactggacagaggggcccgggagctgagctggatgtccagtatcctcccaagaaggtgaccacagtgattcaaaaccccatgccgattcgagaaggagacacagtgaccctttcctgtaactacaattccagtaaccccagtgttacccggtatgaatggaaaccccatggcgcctgggaggagccatcgcttggggtgctgaagatccaaaacgttggctgggacaacacaaccatcgcctgcgcagcttgtaatagttggtgctcgtgggcctcccctgtcgccctgaatgtccagtatgccccccgagacgtgagggtccggaaaatcaagcccctttccgagattcactctggaaactcggtcagcctccaatgtgacttctcaagcagccaccccaaagaagtccagttcttctgggagaaaaatggcaggcttctggggaaagaaagccagctgaattttgactccatctccccagaagatgctgggagttacagctgctgggtgaacaactccataggacagacagcgtccaaggcctggacacttgaagtgctgtatgcacccaggaggctgcgtgtgtccatgagcccgggggaccaagtgatggaggggaagagtgcaaccctgacctgtgagagcgacgccaaccctcccgtctcccactacacctggtttgactggaataaccaaagcctcccctaccacagccagaagctgagattggagccggtgaaggtccagcactcgggtgcctactggtgccaggggaccaacagtgtgggcaagggccgttcgcctctcagcaccctcaccgtctactatagcccggagaccatcggcaggcgagtggctgtgggactcgggtcctgcctcgccatcctcatcctggcaatctgtgggctcaagctccagcgacgttggaagaggacacagagccagcaggggcttcaggagaattccagcggccagagcttctttgtgaggaataaaaagagatgcagagtcctcagagatgcagagacctcccccggactgcgatgacacggtcacttattcagcattgcacaagcgccaagtgggcgactatgagaacgtcattccagattttccagaagatgaggggattcattactcagagctgatccagtttggggtcggggagcggcctcaggcacaagaaaatgtggactatgtgatcctcaaacattgacactggatgggctgcagcagaggcactgggggcagcgggggccagggaagtccccgagtttccccagacaccgccacatggcttcctcctgcgcgcatgtgcgcacacacacacacacacgcacacacacacacacacactcactgcggagaaccttgtgcctggctcagagccagtctttttggtgagggtaaccccaaacctccaaaactcctgcccctgttctcttccactctccttgctacccagaaatccatctaaatacctgccctgacatgcacacctccccctgcccccaccacggccactggccatctccacccccagctgcttgtgtccctcctgggatctgctcgtcatcatttttccttcccttctccatctctctggccctctacccctgatctgacatccccactcacgaatattatgcccagtttctgcctctgagggaaagcccagaaaaggacagaaacgaagtagaaaggggcccagtcctggcctggcttctcctttggaagtgaggcattgcacagggagacgtacgtatcagcggccccttgactctggggactccgggtttgagatggacacactggtgtggattaacctgccagggagacagagctcacaataaaaatggctcagatgccacttc

SEQ ID NO: 890 - DNA, 1338 bp, Homo sapiens
  source 1..1338: mol_type = genomic DNA
aatactctccccagcacacggaaggggaagggggtggaggttgctgctatgagagagaaaaaaaaaacagccacaatagagattctgccttcaaaggttggcttgccacctgaagcagccactgcccagggggtgcaaagaagagacagcagcgcccagcttggaggtgctaactccagaggccagcatcagcaactgggcacagaaaggagccgcctgggcagggaccatggcacggccacatccctggtggctgtgcgttctggggaccctggtggggctctcagctactccagcccccaagagctgcccagagaggcactactgggctcagggaaagctgtgctgccagatgtgtgagccaggaacattcctcgtgaaggactgtgaccagcatagaaaggctgctcagtgtgatccttgcataccgggggtctccttctctcctgaccaccacacccggccccactgtgagagctgtcggcactgtaactctggtcttctcgttcgcaactgcaccatcactgccaatgctgagtgtgcctgtcgcaatggctggcagtgcagggacaaggagtgcaccgagtgtgatcctcttccaaacccttcgctgaccgctcggtcgtctcaggccctgagcccacaccctcagcccacccacttaccttatgtcagtgagatgctggaggccaggacagctgggcacatgcagactctggctgacttcaggcagctgcctgcccggactctctctacccactggccaccccaaagatccctgtgcagctccgattttattcgcatccttgtgatcttctctggaatgttccttgttttcaccctggccggggccctgttcctccatcaacgaaggaaatatagatcaaacaaaggagaaagtcctgtggagcctgcagagccttgtcattacagctgccccagggaggaggagggcagcaccatccccatccaggaggattaccgaaaaccggagcctgcctgctccccctgagccagcacctgcgggagctgcactacagccctggcctccacccccaccccgccgaccatccaagggagagtgagacctggcagccacaactgcagtcccatcctcttgtcagggccctttcctgtgtacacgtgacagagtgccttttcgagactggcagggacgaggacaaatatggatgaggtggagagtgggaagcaggagcccagccagctgcgcctgcgctgcaggagggcgggggctctggttgtaaaacacacttcctgctgcgaaagacccacatgctacaagacgggcaaaataaagtgacagatgaccaccctgca

SEQ ID NO: 891 - DNA, 2679 bp, Homo sapiens
  source 1..2679: mol_type = genomic DNA
aagaagtgggatggggcctctccagaaagctgaacgaggcatctggagcccgaacaaacctccaccttttttggcctcgacggcggcaacccagcctccctcctaacgccctccgcctttgggaccaaccaggggagctcaagttagtagcagccaaggagaggcgctgccttgccaagactaaaaagggaggggagaagagaggaaaaaagcaagaatcccccacccctctcccgggcggagggggcgggaagagcgcgtcctggccaagccgagtagtgtcttccactcggtgcgtctctctaggagccgcgcgggaaggatgctggtccgcaggggcgcgcgcgcagggcccaggatgccgcggggctggaccgcgctttgcttgctgagtttgctgccttctgggttcatgagtcttgacaacaacggtactgctaccccagagttacctacccagggaacattttcaaatgtttctacaaatgtatcctaccaagaaactacaacacctagtacccttggaagtaccagcctgcaccctgtgtctcaacatggcaatgaggccacaacaaacatcacagaaacgacagtcaaattcacatctacctctgtgataacctcagtttatggaaacacaaactcttctgtccagtcacagacctctgtaatcagcacagtgttcaccaccccagccaacgtttcaactccagagacaaccttgaagcctagcctgtcacctggaaatgtttcagacctttcaaccactagcactagccttgcaacatctcccactaaaccctatacatcatcttctcctatcctaagtgacatcaaggcagaaatcaaatgttcaggcatcagagaagtgaaattgactcagggcatctgcctggagcaaaataagacctccagctgtgcggagtttaagaaggacaggggagagggcctggcccgagtgctgtgtggggaggagcaggctgatgctgatgctggggcccaggtatgctccctgctccttgcccagtctgaggtgaggcctcagtgtctactgctggtcttggccaacagaacagaaatttccagcaaactccaacttatgaaaaagcaccaatctgacctgaaaaagctggggatcctagatttcactgagcaagatgttgcaagccaccagagctattcccaaaagaccctgattgcactggtcacctcgggagccctgctggctgtcttgggcatcactggctatttcctgatgaatcgccgcagctggagccccacaggagaaaggctgggcgaagacccttattacacggaaaacggtggaggccagggctatagctcaggacctgggacctcccctgaggctcagggaaaggccagtgtgaaccgaggggctcaggaaaacgggaccggccaggccacctccagaaacggccattcagcaagacaacacgtggtggctgataccgaattgtgactcggctaggtggggcaaggctgggcagtgtccgagagagcacccctctctgcatctgaccacgtgctacccccatgctggaggtgacatctcttacgcccaacccttccccactgcacacacctcagaggctgttcttggggccctacaccttgaggaggggcaggtaaactcctgtcctttacacattcggctccctggagccagactctggtcttctttgggtaaacgtgtgacgggggaaagccaaggtctggagaagctcccaggaacaatcgatggccttgcagcactcacacaggacccccttcccctaccccctcctctctgccgcaatacaggaacccccaggggaaagatgagcttttctaggctacaattttctcccaggaagctttgatttttaccgtttcttccctgtattttctttctctactttgaggaaaccaaagtaaccttttgcacctgctctcttgtaatgatatagccagaaaaacgtgttgccttgaaccacttccctcatctctcctccaagacactgtggacttggtcaccagctcctcccttgttctctaagttccactgagctccatgtgccccctctaccatttgcagagtcctgcacagttttctggctggagcctagaacaggcctcccaagttttaggacaaacagctcagttctagtctctctggggccacacagaaactctttttgggctcctttttctccctctggatcaaagtaggcaggaccatgggaccaggtcttggagctgagcctctcacctgtactcttccgaaaaatcctcttcctctgaggctggatcctagccttatcctctgatctccatggcttcctcctccctcctgccgactcctgggttgagctgttgcctcagtcccccaacagatgcttttctgtctctgcctccctcaccctgagccccttccttgctctgcacccccatatggtcatagcccagatcagctcctaacccttatcaccagctgcctcttctgtgggtgacccaggtccttgtttgctgttgatttctttccagaggggttgagcagggatcctggtttcaatgacggttggaaatagaaatttccagagaagagagtattgggtagatattttttctgaatacaaagtgatgtgtttaaatactgcaattaaagtgatactgaaacac

SEQ ID NO: 892 - DNA, 2874 bp, Homo sapiens
  source 1..2874: mol_type = genomic DNA
aagaagtgggatggggcctctccagaaagctgaacgaggcatctggagcccgaacaaacctccaccttttttggcctcgacggcggcaacccagcctccctcctaacgccctccgcctttgggaccaaccaggggagctcaagttagtagcagccaaggagaggcgctgccttgccaagactaaaaagggaggggagaagagaggaaaaaagcaagaatcccccacccctctcccgggcggagggggcgggaagagcgcgtcctggccaagccgagtagtgtcttccactcggtgcgtctctctaggagccgcgcgggaaggatgctggtccgcaggggcgcgcgcgcagggcccaggatgccgcggggctggaccgcgctttgcttgctgagtttgctgccttctgggttcatgagtcttgacaacaacggtactgctaccccagagttacctacccagggaacattttcaaatgtttctacaaatgtatcctaccaagaaactacaacacctagtacccttggaagtaccagcctgcaccctgtgtctcaacatggcaatgaggccacaacaaacatcacagaaacgacagtcaaattcacatctacctctgtgataacctcagtttatggaaacacaaactcttctgtccagtcacagacctctgtaatcagcacagtgttcaccaccccagccaacgtttcaactccagagacaaccttgaagcctagcctgtcacctggaaatgtttcagacctttcaaccactagcactagccttgcaacatctcccactaaaccctatacatcatcttctcctatcctaagtgacatcaaggcagaaatcaaatgttcaggcatcagagaagtgaaattgactcagggcatctgcctggagcaaaataagacctccagctgtgcggagtttaagaaggacaggggagagggcctggcccgagtgctgtgtggggaggagcaggctgatgctgatgctggggcccaggtatgctccctgctccttgcccagtctgaggtgaggcctcagtgtctactgctggtcttggccaacagaacagaaatttccagcaaactccaacttatgaaaaagcaccaatctgacctgaaaaagctggggatcctagatttcactgagcaagatgttgcaagccaccagagctattcccaaaagaccctgattgcactggtcacctcgggagccctgctggctgtcttgggcatcactggctatttcctgatgaatcgccgcagctggagccccacaggagaaaggctggagctggaaccctgaccactcttcaggaagaaaggagtctgcacatgcagctgcaccctccctccgatccttcctcccacctccccctcccccttctcccacccctgcccccacttcctgtttgggcccctctcccatccagtgtctcacagccctgcttaccagataatgctactttatttatacactgtctagggcgaagacccttattacacggaaaacggtggaggccagggctatagctcaggacctgggacctcccctgaggctcagggaaaggccagtgtgaaccgaggggctcaggaaaacgggaccggccaggccacctccagaaacggccattcagcaagacaacacgtggtggctgataccgaattgtgactcggctaggtggggcaaggctgggcagtgtccgagagagcacccctctctgcatctgaccacgtgctacccccatgctggaggtgacatctcttacgcccaacccttccccactgcacacacctcagaggctgttcttggggccctacaccttgaggaggggcaggtaaactcctgtcctttacacattcggctccctggagccagactctggtcttctttgggtaaacgtgtgacgggggaaagccaaggtctggagaagctcccaggaacaatcgatggccttgcagcactcacacaggacccccttcccctaccccctcctctctgccgcaatacaggaacccccaggggaaagatgagcttttctaggctacaattttctcccaggaagctttgatttttaccgtttcttccctgtattttctttctctactttgaggaaaccaaagtaaccttttgcacctgctctcttgtaatgatatagccagaaaaacgtgttgccttgaaccacttccctcatctctcctccaagacactgtggacttggtcaccagctcctcccttgttctctaagttccactgagctccatgtgccccctctaccatttgcagagtcctgcacagttttctggctggagcctagaacaggcctcccaagttttaggacaaacagctcagttctagtctctctggggccacacagaaactctttttgggctcctttttctccctctggatcaaagtaggcaggaccatgggaccaggtcttggagctgagcctctcacctgtactcttccgaaaaatcctcttcctctgaggctggatcctagccttatcctctgatctccatggcttcctcctccctcctgccgactcctgggttgagctgttgcctcagtcccccaacagatgcttttctgtctctgcctccctcaccctgagccccttccttgctctgcacccccatatggtcatagcccagatcagctcctaacccttatcaccagctgcctcttctgtgggtgacccaggtccttgtttgctgttgatttctttccagaggggttgagcagggatcctggtttcaatgacggttggaaatagaaatttccagagaagagagtattgggtagatattttttctgaatacaaagtgatgtgtttaaatactgcaattaaagtgatactgaaacac

SEQ ID NO: 893 - DNA, 2538 bp, Homo sapiens
  source 1..2538: mol_type = genomic DNA
acagagacccagttctgatgatggtcacacaccccagcagttttcccctaacaggaaagttgtcagggctgttcaggcatttccttctctgccatctgccatccggactgaagagaaagtcttagtttcaattcctttcctgttcaggggaggaggacactctgattggaggctgctggaataaattctgactcactattgaagaattatcagagtttttcttctgagtccaaattcctgggtctgatggcccagtcagcaacctgaagaaaaatctatgaacttcattaaaactgggttccatgcttttaatggaaaacagagatggaagacgagacaaaaatgccatttcagtttgagcaatgcactttttgagactcctttgggtagaaagagggaggaggccactgaggtttccactgagtgtatattatagatttgttctctcctcctcacctcccttggcttttcttccatcattggggactgctgtaatcttgaaacagaatattttctcttagttattattgcattattaatattttctgtttttggccatttcttttgagtttaatttgcatatgtgtacatgggcaatgcttcaacgagacaatttttttaagtttgttctctaacatcttagatactagaagatatggattttggtcctgggagattatttaggtttttttcttattgtgttgttgcacatatacagttagcagttttttttttttctgttggaattttagaaacaaggatccttcttgcggacggggcggagtttaagaaggacaggggagagggcctggcccgagtgctgtgtggggaggagcaggctgatgctgatgctggggcccaggtatgctccctgctccttgcccagtctgaggtgaggcctcagtgtctactgctggtcttggccaacagaacagaaatttccagcaaactccaacttatgaaaaagcaccaatctgacctgaaaaagctggggatcctagatttcactgagcaagatgttgcaagccaccagagctattcccaaaagaccctgattgcactggtcacctcgggagccctgctggctgtcttgggcatcactggctatttcctgatgaatcgccgcagctggagccccacaggagaaaggctgggcgaagacccttattacacggaaaacggtggaggccagggctatagctcaggacctgggacctcccctgaggctcagggaaaggccagtgtgaaccgaggggctcaggaaaacgggaccggccaggccacctccagaaacggccattcagcaagacaacacgtggtggctgataccgaattgtgactcggctaggtggggcaaggctgggcagtgtccgagagagcacccctctctgcatctgaccacgtgctacccccatgctggaggtgacatctcttacgcccaacccttccccactgcacacacctcagaggctgttcttggggccctacaccttgaggaggggcaggtaaactcctgtcctttacacattcggctccctggagccagactctggtcttctttgggtaaacgtgtgacgggggaaagccaaggtctggagaagctcccaggaacaatcgatggccttgcagcactcacacaggacccccttcccctaccccctcctctctgccgcaatacaggaacccccaggggaaagatgagcttttctaggctacaattttctcccaggaagctttgatttttaccgtttcttccctgtattttctttctctactttgaggaaaccaaagtaaccttttgcacctgctctcttgtaatgatatagccagaaaaacgtgttgccttgaaccacttccctcatctctcctccaagacactgtggacttggtcaccagctcctcccttgttctctaagttccactgagctccatgtgccccctctaccatttgcagagtcctgcacagttttctggctggagcctagaacaggcctcccaagttttaggacaaacagctcagttctagtctctctggggccacacagaaactctttttgggctcctttttctccctctggatcaaagtaggcaggaccatgggaccaggtcttggagctgagcctctcacctgtactcttccgaaaaatcctcttcctctgaggctggatcctagccttatcctctgatctccatggcttcctcctccctcctgccgactcctgggttgagctgttgcctcagtcccccaacagatgcttttctgtctctgcctccctcaccctgagccccttccttgctctgcacccccatatggtcatagcccagatcagctcctaacccttatcaccagctgcctcttctgtgggtgacccaggtccttgtttgctgttgatttctttccagaggggttgagcagggatcctggtttcaatgacggttggaaatagaaatttccagagaagagagtattgggtagatattttttctgaatacaaagtgatgtgtttaaatactgcaattaaagtgatactgaaacac

SEQ ID NO: 894 - DNA, 1307 bp, Homo sapiens
  source 1..1307: mol_type = genomic DNA
aagcaagaatcccccacccctctcccgggcggagggggcgggaagagcgcgtcctggccaagccgagtagtgtcttccactcggtgcgtctctctaggagccgcgcgggaaggatgctggtccgcaggaccgcgctttgcttgctgagtttgctgccttctgggttcatgagtcttgacaacaacggtactgctaccccagagttacctacccagggaacattttcaaatgtttctacaaatgtatcctaccaagaaactacaacacctagtacccttggaagtaccagcctgcaccctgtgtctcaacatggcaatgaggccacaacaaacatcacagaaacgacagtcaaattcacatctacctctgtgataacctcagtttatggaaacacaaactcttctgtccagtcacagacctctgtaatcagcacagtgttcaccaccccagccaacgtttcaactccagagacaaccttgaagcctagcctgtcacctggaaatgtttcagacctttcaaccactagcactagccttgcaacatctcccactaaaccctatacatcatcttctcctatcctaagtgacatcaaggcagaaatcaaatgttcaggcatcagagaagtgaaattgactcagggcatctgcctggagcaaaataagacctccagctgtgcggagtttaagaaggacaggggagagggcctggcccgagtgctgtgtggggaggagcaggctgatgctgatgctggggcccaggtatgctccctgctccttgcccagtctgaggtgaggcctcagtgtctactgctggtcttggccaacagaacagaaatttccagcaaactccaacttatgaaaaagcaccaatctgacctgaaaaagctggggatcctagatttcactgagcaagatgttgcaagccaccagagctattcccaaaagaccctgattgcactggtcacctcgggagccctgctggctgtcttgggcatcactggctatttcctgatgaatcgccgcagctggagccccacaggagaaaggctgggcgaagacccttattacacggaaaacggtggaggccagggctatagctcaggacctgggacctcccctgaggctcagggaaaggccagtgtgaaccgaggggctcaggaaaacgggaccggccaggccacctccagaaacggccattcagcaagacaacacgtggtggctgataccgaattgtgactcggctaggtggggcaaggctgggcagtgtccgagagagcacccctctctgcatctgaccacgtgctaccc

SEQ ID NO: 895 - DNA, 1362 bp, Homo sapiens
  source 1..1362: mol_type = genomic DNA
cactcggtgcgtctctctaggagccgcgcgggaaggatgctggtccgcaggggcgcgcgcgcagggcccaggatgccgcggggctggaccgcgctttgcttgctgagtttgctgccttctgggttcatgagtcttgacaacaacggtactgctaccccagagttacctacccagggaacattttcaaatgtttctacaaatgtatcctaccaagaaactacaacacctagtacccttggaagtaccagcctgcaccctgtgtctcaacatggcaatgaggccacaacaaacatcacaggcagaaatcaaatgttcaggcatcagagaagtgaaattgactcagggcatctgcctggagcaaaataagacctccagctgtgcggagtttaagaaggacaggggagagggcctggcccgagtgctgtgtggggaggagcaggctgatgctgatgctggggcccaggtatgctccctgctccttgcccagtctgaggtgaggcctcagtgtctactgctggtcttggccaacagaacagaaatttccagcaaactccaacttatgaaaaagcaccaatctgacctgaaaaagctggggatcctagatttcactgagcaagatgttgcaagccaccagagctattcccaaaagaccctgattgcactggtcacctcgggagccctgctggctgtcttgggcatcactggctatttcctgatgaatcgccgcagctggagccccacaggagaaaggctgggcgaagacccttattacacggaaaacggtggaggccagggctatagctcaggacctgggacctcccctgaggctcagggaaaggccagtgtgaaccgaggggctcaggaaaacgggaccggccaggccacctccagaaacggccattcagcaagacaacacgtggtggctgataccgaattgtgactcggctaggtggggcaaggctgggcagtgtccgagagagcacccctctctgcatctgaccacgtgctacccccatgctggaggtgacatctcttacgcccaacccttccccactgcacacacctcagaggctgttcttggggccctacaccttgaggaggggcaggtaaactcctgtcctttacacattcggctccctggagccagactctggtcttctttgggtaaacgtgtgacgggggaaagccaaggtctggagaagctcccaggaacaatcgatggccttgcagcactcacacaggacccccttcccctaccccctcctctctgccgcaatacaggaacccccaggggaaagatgagcttttctaggctacaattttctcccaggaagctttgatttttaccgtttcttccctgta

SEQ ID NO: 896 - DNA, 861 bp, Homo sapiens
  source 1..861: mol_type = genomic DNA
agagaagcagacatcttctagttcctcccccactctcctctttccggtacctgtgagtcagctaggggagggcagctctcacccaggctgatagttcggtgacctggctttatctactggatgagttccgctgggagatggaacatagcacgtttctctctggcctggtactggctacccttctctcgcaagtgagccccttcaagatacctatagaggaacttgaggacagagtgtttgtgaattgcaataccagcatcacatgggtagagggaacggtgggaacactgctctcagacattacaagactggacctgggaaaacgcatcctggacccacgaggaatatataggtgtaatgggacagatatatacaaggacaaagaatctaccgtgcaagttcattatcgaatgtgccagagctgtgtggagctggatccagccaccgtggctggcatcattgtcactgatgtcattgccactctgctccttgctttgggagtcttctgctttgctggacatgagactggaaggctgtctggggctgccgacacacaagctctgttgaggaatgaccaggtctatcagcccctccgagatcgagatgatgctcagtacagccaccttggaggaaactgggctcggaacaagtgaacctgagactggtggcttctagaagcagccattaccaactgtaccttcccttcttgctcagccaataaatatatcctctttcactcagcaggtgcctgggcttcttaaggctcctgggcaaggcgtgggagttgtcctgacttgcttgggatctcgccctcctacctacctgtttcttccttcatctccttccttcctctgcctcaca

SEQ ID NO: 897 - DNA, 476 bp, Homo sapiens
  source 1..476: mol_type = genomic DNA
ctactggatgagttccgctgggagatggaacatagcacgtttctctctggcctggtactggctacccttctctcgcaagtgagccccttcaagatacctatagaggaacttgaggacagagtgtttgtgaattgcaataccagcatcacatgggtagagggaacggtgggaacactgctctcagacattacaagactggacctgggaaaacgcatcctggacccacgaggaatatataggtgtaatgggacagatatatacaaggacaaagaatctaccgtgcaagttcattatcgaactgccgacacacaagctctgttgaggaatgaccaggtctatcagcccctccgagatcgagatgatgctcagtacagccaccttggaggaaactgggctcggaacaagtgaacctgagactggtggcttctagaagcagccattaccaactgtaccttcccttcttgctcagccaataa

SEQ ID NO: 898 - DNA, 3114 bp, Homo sapiens
  source 1..3114: mol_type = genomic DNA
gtttggggccggcccaggcctagggtgtggaggagccttgccatcgggcttcctgtctctcttcatttaagcacgactctgcagaaggaacaaagcaccctccccactgggctcctggttgcagagctccaagtcctcacacagatacgcctgtttgagaagcagcgggcaagaaagacgcaagcccagaggccctgccatttctgtgggctcaggtccctactggctcaggcccctgcctccctcggcaaggccacaatgaaccggggagtcccttttaggcacttgcttctggtgctgcaactggcgctcctcccagcagccactcagggaaagaaagtggtgctgggcaaaaaaggggatacagtggaactgacctgtacagcttcccagaagaagagcatacaattccactggaaaaactccaaccagataaagattctgggaaatcagggctccttcttaactaaaggtccatccaagctgaatgatcgcgctgactcaagaagaagcctttgggaccaaggaaactttcccctgatcatcaagaatcttaagatagaagactcagatacttacatctgtgaagtggaggaccagaaggaggaggtgcaattgctagtgttcggattgactgccaactctgacacccacctgcttcaggggcagagcctgaccctgaccttggagagcccccctggtagtagcccctcagtgcaatgtaggagtccaaggggtaaaaacatacagggggggaagaccctctccgtgtctcagctggagctccaggatagtggcacctggacatgcactgtcttgcagaaccagaagaaggtggagttcaaaatagacatcgtggtgctagctttccagaaggcctccagcatagtctataagaaagagggggaacaggtggagttctccttcccactcgcctttacagttgaaaagctgacgggcagtggcgagctgtggtggcaggcggagagggcttcctcctccaagtcttggatcacctttgacctgaagaacaaggaagtgtctgtaaaacgggttacccaggaccctaagctccagatgggcaagaagctcccgctccacctcaccctgccccaggccttgcctcagtatgctggctctggaaacctcaccctggcccttgaagcgaaaacaggaaagttgcatcaggaagtgaacctggtggtgatgagagccactcagctccagaaaaatttgacctgtgaggtgtggggacccacctcccctaagctgatgctgagtttgaaactggagaacaaggaggcaaaggtctcgaagcgggagaaggcggtgtgggtgctgaaccctgaggcggggatgtggcagtgtctgctgagtgactcgggacaggtcctgctggaatccaacatcaaggttctgcccacatggtccaccccggtgcagccaatggccctgattgtgctggggggcgtcgccggcctcctgcttttcattgggctaggcatcttcttctgtgtcaggtgccggcaccgaaggcgccaagcagagcggatgtctcagatcaagagactcctcagtgagaagaagacctgccagtgtcctcaccggtttcagaagacatgtagccccatttgaggcacgaggccaggcagatcccacttgcagcctccccaggtgtctgccccgcgtttcctgcctgcggaccagatgaatgtagcagatccccagcctctggcctcctgttcgcctcctctacaatttgccattgtttctcctgggttaggccccggcttcactggttgagtgttgctctctagtttccagaggcttaatcacaccgtcctccacgccatttccttttccttcaagcctagcccttctctcattatttctctctgaccctctccccactgctcatttggatcccaggggagtgttcagggccagccctggctggcatggagggtgaggctgggtgtctggaagcatggagcatgggactgttcttttacaagacaggaccctgggaccacagagggcaggaacttgcacaaaatcacacagccaagccagtcaaggatggatgcagatccagaggtttctggcagccagtacctcctgccccatgctgcccgcttctcaccctatgtgggtgggaccacagactcacatcctgaccttgcacaaacagcccctctggacacagccccatgtacacggcctcaagggatgtctcacatcctctgtctatttgagacttagaaaaatcctacaaggctggcagtgacagaactaagatgatcatctccagtttatagaccagaaccagagctcagagaggctagatgattgattaccaagtgccggactagcaagtgctggagtcgggactaacccaggtcccttgtcccaagttccactgctgcctcttgaatgcagggacaaatgccacacggctctcaccagtggctagtggtgggtactcaatgtgtacttttgggttcacagaagcacagcacccatgggaagggtccatctcagagaatttacgagcagggatgaaggcctccctgtctaaaatccctccttcatcccccgctggtggcagaatctgttaccagaggacaaagcctttggctcttctaatcagagcgcaagctgggagcacaggcactgcaggagagaatgcccagtgaccagtcactgaccctgtgcagaacctcctggaagcgagctttgctgggagagggggtagctagcctgagagggaaccctctaagggacctcaaaggtgattgtgccaggctctgcgcctgccccacaccctcccttaccctcctccagaccattcaggacacagggaaatcagggttacaaatcttcttgatccacttctctcaggatcccctctcttcctacccttcctcaccacttccctcagtcccaactccttttccctatttccttctcctcctgtctttaaagcctgcctcttccaggaagacccccctattgctgctggggctccccatttgcttactttgcatttgtgcccactctccacccctgctcccctgagctgaaataaaaatacaataaacttactataaagat

SEQ ID NO: 899 - DNA, 1720 bp, Homo sapiens
  source 1..1720: mol_type = genomic DNA
accatttcaactttaacacagcatgatcgaaacatacaaccaaacttctccccgatctgcggccactggactgcccatcagcatgaaaatttttatgtatttacttactgtttttcttatcacccagatgattgggtcagcactttttgctgtgtatcttcatagaaggttggacaagatagaagatgaaaggaatcttcatgaagattttgtattcatgaaaacgatacagagatgcaacacaggagaaagatccttatccttactgaactgtgaggagattaaaagccagtttgaaggctttgtgaaggatataatgttaaacaaagaggagacgaagaaagaaaacagctttgaaatgcaaaaagtgttacagtgggctgaaaaaggatactacaccatgagcaacaacttggtaaccctggaaaatgggaaacagctgaccgttaaaagacaaggactctattatatctatgcccaagtcaccttctgttccaatcgggaagcttcgagtcaagctccatttatagccagcctctgcctaaagtcccccggtagattcgagagaatcttactcagagctgcaaatacccacagttccgccaaaccttgcgggcaacaatccattcacttgggaggagtatttgaattgcaaccaggtgcttcggtgtttgtcaatgtgactgatccaagccaagtgagccatggcactggcttcacgtcctttggcttactcaaactctgaacagtgtcaccttgcaggctgtggtggagctgacgctgggagtcttcataatacagcacagcggttaagcccaccccctgttaactgcctatttataaccctaggatcctccttatggagaactatttattatacactccaaggcatgtagaactgtaataagtgaattacaggtcacatgaaaccaaaacgggccctgctccataagagcttatatatctgaagcagcaaccccactgatgcagacatccagagagtcctatgaaaagacaaggccattatgcacaggttgaattctgagtaaacagcagataacttgccaagttcagttttgtttctttgcgtgcagtgtctttccatggataatgcatttgatttatcagtgaagatgcagaagggaaatggggagcctcagctcacattcagttatggttgactctgggttcctatggccttgttggagggggccaggctctagaacgtctaacacagtggagaaccgaaaccccccccccccccccgccaccctctcggacagttattcattctctttcaatctctctctctccatctctctctttcagtctctctctctcaacctctttcttccaatctctctttctcaatctctctgtttccctttgtcagtctcttccctcccccagtctctcttctcaatccccctttctaacacacacacacacacacacacacacacacacacacacacacacacacacacagagtcaggccgttgctagtcagttctcttctttccaccctgtccctatctctaccactatagatgagggtgaggagtagggagtgcagccctgagcctgcccactcctcattacgaaatgactgtatttaaaggaaatctattgtatctacctgcagtctccattgtttccagagtgaacttgtaattatcttgttatttattttttgaataataaagacctcttaacatta

(The sequence listing continues in the following parts.)
